United States Patent Application Publication US 2007/0054278 A1 - sequence listing, part 80

SEQ ID NO: 96397 - DNA, 72656 bp, Homo sapiens
agggagccaagctgtggccgctctgctgagccatccgttccagcaggcagcaggcagcggactgagaatgctcagttcagaactcgagcctgggcatgaaccggagcctccagaaacctgccccttaagcgggccggctaagagtggcagctgggagctggagacccaggacacaggcagcccccagcagcccatgtggcctcttctcagccacaccccgagggccccgggctctgctcccaccatggccggcctcctgggagcccctcgcctggctggatgggccagtgaggcggtggcattgagcagagggtggtggggccggcagaccccagatgtcctgacacaggctaggagaagcgcctccaaggctggcagcaaaccccagccagcctatatagtcagcaggaatcctggctaaaaataccccagtctcagaggcccaccagctgctgcagtctcagaaccccctcctcacgctgggcactgcccatgtgcccctccacctcccttgcaggcaataaggcctgcggacacaggaggaaactcaggccctgtgccagcaagtcctagccccagggcctggcctccaggactgcccacagaggcccccatcttactgcaaggccagggctggccccgccctgctctgcacccgtgagcctgggcaggggtcagggcaggccccatcaggaccagctcgggcaggggcgcaggctctgctggccccaccctgcacagctccctgtcccatggctctcagaggcagagccactggctggggggcagagccccaaggacttggtctgagtcaccctggcagaatgtggggtgctaggtgggctcttcccagtcacccctgtgggcttcaagtgaccacacggcatggctatgccctttatcctggaatcactggctggggaactcaggccaaggcccacctccccggggctcagtttccccacctgtacccagtggggatatgtggaataggggtccagtaaaggtatacggggtgttacagcttgcctctcagagtgtttgttgagtgactaaatgaatgaggaagtgagcagatgaaggcagtgagggaggctgtgaagggtgggaccactgcgctcagagcaagccctcagcctctccatctgggaaacggaacaaacctgcatgccgcatggatcatggtggcccagagtggggtgcccagggacccagggagctcctacaagagcaaggctgggcactagccagccaaggcatcctagggaccatctcactgtggccccaaggtgggtttggcggtccaccctgccttccactccccacccactcctgctgacagctatcgccatgccttccctgccttccctgctccactgggagctcgtgggtgctttcaacaggtgcccctcccccccaacccaggtttgactgcctgctgggctcctggtgttaacagcagctcccaatttagctgtcactgccaggtgggtggctctagaaggatccgtactccctgcaggggtgggggaggggcgtgaagccacagcggatgccttgggcacagcccagggacccccaccttccggagctctgcccctgcaccagatttgtgcctacagggaccagaagcctcctactccccagccccacccagccggcctccccagagagaggccaccaagttggttgtgcccactgagagaagaccctgagcccatctgctggcgaacacaagtggcccgagctcatctcaaggtccaggaaccctggggactcaccccttcctctgggcaccaggaagagtggtggaccaggggtccaggtgccagcctggcatgtcccacttggtcgagtgtcctttcatctctgttcaggttcccatcctggagatgggccacaagggatccagtccagggctgggggaggcagccctgtgggaggaggcccttgctagtgaagggtcagaggcatttggagatgggcaggcccagtgggattcttggggccactgccaggatttggttgtcggtcccttccttgtgccagccccctttgctgctgcgtgtggctttgatgaataagagatgaggaagcatattaattatggcttaacatgcaccaaagttgggcagagggactcctagggatgggagtcctcaggggtgcagaactgatgggggaagaccaggacaccctctgcagccctggggatgggggatggtgagaggcttctggaggaggcagaggctgtgggcaaagagagggctgagagaggctgccaagacgtgggtccacctaagctccccagacctccttctctggtctggaaaatgggtggtggtagtagtgtctacactgcaggactgaatgggatgactcactcagcaggcctggcacagagtcctctcgggccttgggcatgcagccaccctctgtggtgagagcagatggcaggctgacgccccccagctccctggcaccgggaccacatccctagccgcccactcagagtgcagggaagggttggtcacattgacacgcttgggcagcaggcatgtgcttgccgcatgaccttctagcttccttcctggtctctccttgcattggcctggagtggcccagaatgtgtggagcaaagacccagtttccttgctgcccatccctccccaggagacaccgagggcctggatgtccgtgagaaccgcacaggcatgccaaggaaagccatggcacgcctatctctccaggcgggagatgagcctcccgaagccctgggaagaagggaccttccaaggaggctgaaccgtgtccctgtcagcccaagacgggccactgcgaaaggtcccctcatctcaagctggcttctatgggcaggcatggagttttgagtgaaaaccctgcatgatcctctcaggggacaggaggggtgaacaaaggagggacagtgaccagctgaccaggccctgaggcattagcgtctgcctcgtccacatgctgtgcaagctcagcgaggccaaggggctgggccgaggtcacacagctgggcagggccctcatgaccggcatgctggtcgtggaggccgagccccaggttgggggtgggggtgggaggtgaggcagcccctggcctcactggaggggggtggtgggctggggaagctggcaaaggatgtgccctacatggtgggtgtgaggtggggaacgattcgggcagatgcccgtgtggccctgctgacccagtccaggcagggtgtgacaggtctgcccagccctgaggtcacagctgtctgcagtctccagctcactcctgatccccagggccacgtgtccagaaagcctgggagcttgcatcagctgggcacagatggcctgtcctcccagcacccctgctggggcttcctaggaactgactggtgtagactccgggcagcagacggccaggctctgcccacagggtccctggctcctcccatgaggtgacccgatagaactggctgtgccccttgaccaggggctccagcccttgtcaagccctccctgctagcccctcaccagccgtcagctgccctccctcccttgcccgttgggccctgggggggtgatggctccgcggtcgcctgcccagagagtacaccactccccatgctgccccccgacctggctacaccctgaaaaatgtggcttaccaaaccctcccacatgcacagcctgagaagcgggctgtgccttgctggtagcagaccgaccggctgcctagccctgctcaactctgcctctgcacccccataactccctatcagcgctggcccacacctaatcgttccagctagcacccaggagtgggctcagcttccagtggggagggcgctggccaaggtgctgaccgaggtggcggacacaggaaaccagccggtcccccagcgctccctctgtgggccttgggcctgctcccactgcacagacaggtggggaggtggaggcccaggtcccagcccagagcagctgggaacagccggacttgatggctggagagggctgtggtgccagaagcctccaggttagccctggctccccatttccccccatgcccatcccatgccccagaatggtcactttggctgctgcaggaggggtgggaggggctttaaacctatgagatagggtgtggggtcacaatcttcaattgtagtgggccgctctgggtcactggtaattgaggagacgcctgcatagtaagcacgcaagtgtcctctcaagccctctctgcaagcacagagcagcccgagactggagcctggtccaccccagcgctgtcctcagactgatggtcagtgcctcatgactcatctagggtctgatacatccctgtggtgagagctcagttcctagtctaggggctgctgcgtgcagggaccctggaggaagaatgcttgtttaggggtcaggcctcagcctcccactggctctgtcagcttcgcctgaggttccccatctgtgcaatgggtgatgacatcttggtgtggctctgggaggacctgttgagccagctcaggggctgagctggtggcactcggcagccagcaccctctggggaggtggcagtgtgtgcacagcccaccccttcaggaggccaggggacagagtggctgggggtgtctgggccccacctcaccttctgtgtggctgggaatggcatgcactccacaatgccctcataagcctaggctgggacaagggtgatagggataaagcaggccaaggtgatgagggccacagagcggcagccagaggcatgtgggcagtgcagcctccacaccaggcagagggcccggccagcatggctccaccctgggaagctgcctgccactgggatcagatgggagcaccagggctctgggaggtcctcacttcctctggacaaggcaggcaggtcaccagccctgtgccctgctcatctccctcagggccacctccatggccaggggcaggcagagagcacagggctgcccagtcaccaggtctctctgcttcatatcagtggacctgggctctgaggggagccatcaagacctcaggctggcccactccgtccttgagtcagggtcctacagactgacaccaggttggcctgcaagaccctggtcctgtcatgcagggtgggcctggggaggacccagcccagctgagctgactcccagcactcctccaggtgcagggacagcctggcagttgtctgaagaccccgggatgggcttaggagctcatcatcatcggatgccccccgagcagaagacggagaaggaacacccccaccctgtgtggtgtgtgtaggggtgtcactgggttctctggctccatgacgcccccccggccccgctgggggctggcttagtagagtgggggatgatactaagcaggcggcctcggagagcgtcttctgggtttggaggccacattccgcaggaaggaagaggtgggggacccctgcagggttatgggtaacatcaggcctgggtcccctccctggggtggtgcagagagggccacaaaggcccaagagggcccccagaacgctcttaagccttgagcctgtttcttactgaaaaatgggggcgatcgtgctccagcaaggggcttctgtgcagggggcgggggggggcggggggttcatgggtttcgtgaggccaggaagcgagtgggtcgcgcagaggccatccccaggcctcaatggccccagccgccatcccctccgccgcctgcagggccgccgcctcttcaggaatgcgcggctttgtctagggccgggtgggctgagcacctcctgctgcccggcctacgctccccggccagccgcgccgctcacgccccaacttgggcccgcgccccccagcccccgcccaggcccgcgccccccagcccccgcccaggcaggcgcctgcgcccaggtgagggccccgcccgccgccgcctcccgcgccctgcgcgcccgcggcccgagccccgcccgagccgggcggagcggagcgcgcggagcctagacccgctgccgggccggggctgggccggagcggcggcgcctggatgccggcccggggctgggccggagactggcgcccgccccgaagcgactttcggtccccgacccgctccgcctgacccctatgatgaagagggcgtccactggaggtgagtgtccacgcggcgccagagcccagcaggcggcggggcgcagagcggggtggttcgcccctcctcggagccgcagggcccgtccagggcttccaaggctggggaagcgtagccgggcggccgggagggccaccgcagtgccgcgccaggctggggccaagggcgccccggccccgggagggcggagccggaggcagcaggaaaagttgccgcttcccgggtaagttgacggcgatggcggggccgggggtggcggcccgggggtccccgaggctgggccaggtccggggtgggggccgcgggctggaaggacggggtccggcctcggcgccgcggccmcgaaggggttaatgagcgggtttttttgcagaaacgcgggtaccgagagtaggtggaggtatcgggccgcctccgcccccgcctcgcggactgggctcagaacctcccgtttttctgaggtcaggcctcagggggatcaatgggggcgttggcggcagtagagggcgtgggggacaaggttgtcccarcgctgcctccagggcgggcggtgagaggaggcagcaaygcccagacatccgcagcccgagggacattgagaggcttggctgggggaatcaggggyggtggggcaatcagcawcccctccctggcagccttcgtgagactcccccgccccactgggtgtgaggtcccgcagtggggggcaagggagggtgggctccatgtgagttgggcatgcccygcctggagggtgctccccaggtgcccacccaggctgccctgctgatgtccatggtgycgcaggctgcacacacgtttccttgcacgtgcacatgtctacacggactgcacacttgcacacctctggtgcacatgcgtgccagcrccaccccagtgtacacatgcacgaacactgggtgcacacacggactctgagggtgcatatctgtgtcctcgcccccgcttgcacgcccacggccacacatgcatgtacgcgacatgcctgctgtggtctccacgggtggcacatgctggggcccctttcrcaatacccactcccgcacccacatgctcgtctgttgagtggggaggccaggcccacagacaggggcaagacatcctgggccccacctctgcctgcctgcctccgtgtcctgggggtccccgcctcgggcgtgtgtgcgtgtgtgtaacttggtatgcatctgcacgtgtgtctgtgcgcgtgatcatgtgtgcctgcgagcacataggcatatgtctctttgcctccagggtgtgggtgccccttgtgtgcctagacaggctgtggcctaatctggagcagaggccctggaatgtgtgttgggggctcattgaatgcccccagcccagggtgtgaggggcagggtctcccagccactccsyacccaccagggctgaggcagtgatagatgatggtgggctggaacctgtctggtcagggaagacccatttcaggccatgaggtcaacactgtgaccaacaggcmagaccctgggcacccttggtggccgctgcagcttggctgactggagcacgtgacccagcgtgactgcagaggccccgcctccagtacctcagtttctccatggtgaggaccttcttggtgaggggttctgtggtgggctcccctacctccggtgttgtgtagggtgctgagcagatggatgccatgctgcatgatgggcaagggtggcccactagcactgtggcaagggccctgggctggggcttgrattggcaggccacacctcctgctcccctggccaccaccagaggctcatctatagagtggggaccagcaggttatccttgtaggttgtgtgagggtgaaacatactagcagaggggcagctgaagcagtggggctggccagtctctttttctaagcctcagttttcccatctataaagggggtactgttccctgttcttctctactgaggtgagraggaagtgagctcccatgccgggggtgggaatgggtggccatcagcacctagaccccacctggcagaggggcacgtgcagggcctgccgtggcagaaccgtgacctggatttgggtcctggctcagccacctgctggcagtgtgaccttgggtgtgacaggtcacctctctgcctcagtcttcctcacctgcaccatgggccagtggtcagggattatcggggcacttccaggctgaggctgggcggaattggcccggctttccctgtggagttccgactctggtgcttctgcctcagaatgcccagaacacctccccacaccccaactcagcagagtcctcctgggacctttgcatggccagctggcccctcaccccatccatttgcagaagggacaataaaagcccctagtcaggcaactcaggccacaggtgagtggagaggggacagggcagggatgctgcccagcttgggagaccctcccatagtaccttcactycctccctgccctccccctgttcctcacctgggggtctgtggaacccctgagcctcagtttccctgtgccagggtccttccactgggactggcagaaacgtaggtttgcatggagtgagaagcaggggagaggttgagggagggcctggcccagcaggtctcygaaagccagagggcttgtggagggtctatggaggacacccccacaggggctggggccctggaaggtgggggaaggtcctgttgtcctgggaggctggggactggcccacagcctgtggaggggctggggtttgtttgctgttgctgtgagtgacaggcaggctgtgagggccagggcatgtgggaccgtgccctccgcctccctctgcccaaggacagtgcagccttgtagcactgccctctcctcgtccctgccccagccttgaattcatgctttgtggcacggacggccctgtgcagccggtgcaacaccaggagggtccagctggtgaggacaggacgggygggaggcagaggagccctcctgctgtcctgggcctgtggcccggaacctctcaccgggagccttggtctgtgcacctgggaaaggggtcaagaacaggaagcatacggggagtttcaggatgacctggaaatgaacaaatgcatgtgtgagccaggcgccctgcccggccctggcacagggttagtgagggctcccgacgcttggctactgtctgatcaatgaggttcatgccgtcccgcccccattctggcargcctgacctctgatccccaggctggcctgcctgaccctctgcagccacccagggcctgggctttggggtctgcaggagccggcctggctgcctgctgcctctgcagctgtgcagatgccctctcggggccctctctgcacccctcagtgtccctgctctgcagcctggctgcacccaggccaaggtcacaggcaccctcctcgaagccagatcccagatgctgcatttgccccaactgtccgttcactttctcatttgttcattcatttgcttgttcgttcctagcctgtcagattctcttctgagccaggcaaatcaaggggtgcaatccttggcatcgtgcatctctaggattaaatgctttaaaggataggaggtaacagagtggccccggggaagcccgatcggagtggcgggcatgctaccccaccctgcaaatctccctgcactgtccctggggcccagctgggttccccacaccagttgttctgtgctgccgtttcttcttttatcgctgtattttaaacactttgcacatcgggaactattcttgtgcatcgtgggttttctggtgtgtgtggaatcccttcctgagaatgcaccatcatttatttatccaaacctgcaccggcctcctgcactgcctgcagccgtggagctgggcaccgggagatgcagctctgcacacccaccccaccatgtcctcagctggcacccaccaggtctaggggctggtcacgtgcctctcccctgatgcttgagctgatttcaggggactcggcagcagggccagatcccgcccctcctagccagctgaggcctttgacaaccgtgggctggccgggtgggtgatggtgagtgagtagagtctgggcatccatttgtgcagtgggtgccttggggccgcctctcctctccctctttcacacagcctctggtcttgcccgctatggcctgcggggcctcttctgcggggcagcagggcagcggggcatggggtaatgctgacactgttctgcagctgtgtcctgtccratggaggcaacccacggcagccagaccaggaggtggagaagaaaggcagggctgttggcacacctcgagagtggccttaggagaggctgagtgggcacaggccagggtccccatgtagttctacacaggcctggcaggcggtaagccccattcagggccctggcacatggagccgggctgatctgggagtgaagtgtcaggtgctgacccagcctcactcagagcagcctgccctgggcccccgggtgcctcttggctctccagtcggcaccctggcattcttagctggctgtcacgggtcacggtccatggagttgaaattctttggaatgttgggggtatcacataagggctttgtggtcaaatgtgggacctgctggaataaatggtgctgatggtgctcctttcccgcagggcatcttgggctctgttttggagaggggtgggcagcaccttctctgagaggcacccctatgcgatgtacctcagggcctggtgtgcccaggaacctgttttgggaaacagtggttgaagtgcctcggaggaccagaggagacctgtgggcctccagcaagtgccccaggatgggtagaccctgccacacaaaccccgcacccacggggcgcccagtgggtggagggaccactgcttcccccagcagtttgaggcgatgtgcaaatttaacctttggatttatgactcaatttctttgtagcaaatgtcacgggaaatgtcaggccaaggctgaggctgggtgaggggccygtcgaggaagcgggtagggctaggcaggctagagtaccgaggaggggctcaggccagggtgggcttcaggcccctcacctcctcctgggagccttcctggattgtccctygcttgcctggatccccggcactgtrtcctcaatttgtcccagctatcacaaccttgttgagatgttgcctttatttgccttctaccagggcccagatgaggccagctcggggacatgccagaagtcccccattccccaaggctgggcagccatgggatcagcttgtgcagtgccggcttgctgtatgaccttgggcagctccacccttcctggtcaccgtaggcctctctgcagtccacagctggtggccagaggtggtgttcccagctcagtgccttcaagagtgggaaaacgcctagagtcctcagtatgtggggtgtggggctctggaggaagtgggtgggggctgaatgcagggctggggttgcggagggctggcccttggtggtcccaggggctagagcagcccctgcacacagcaggtgctcagtaaagaccaaaaggcagtgcgtggatgtggaaggtggaggtggattccagctgggagtccacagtccccagttacatgtcccccctccaccgccacatgccagatgtcattccaaggccccacgctggcccgtcaccarctctgccctgcctcccaggcccgggcgggtcagggaatggtgactgcctcctccctgccgtgtgccaggcctgtgcactggagcaggggttcaggctccctagtgctctgcatctctcctgcacacacagctccccacactgcacaccttaggcctccagatccagcctgtctgctagtgtcacatcctccgtacccaatgtccaagcccagagtctcagcctcttccctcgacccatccccaaaagcaaaatcagtgtcaaacctgcaccctgtctcccggtccatcccctttactcctcactgaggaccagcctcagacctggcctctgtccccagcctgtggccacagctggcccctgcaacctccctgcctcctgggttcaagcgattctcctgcctcagcctcctgagtagctgggattacaggtgcccaccaccaagctaatttttttgtatttttagtagagatggggtttcaccatgttggccaggctggtcttgaactcttgaccccaagtgatccacccacctcaacctcccagagtgctgggattacaagcgtgagccaccgtgcctggcctctgaaggacactttcaagagaatacacaaacaacaaatcaggagaaactatttgcaaatcatatatctggtaaaagacttatatcctaaatatacaaataataactctcaaaactcaataataagaaaaaaacctattcacaaattgggcaaaataattgaacagatggttcaccaaagaagacattttgtcagcaaacaggcacctgaatagatgctccacatctttagtcattatggaaatgcaaaatagaacctcagtgagataatatttcacacccactaggatggctgtaatttaaaacagaaaatatcaagtgttagsaaggatgtggaggaactggaactctcatacgctgttggtgggaatataacatgatgcaaccactttggaaaatagtttggtagtttcttaaagagttaaatatgaacctaccatatgacagtcattcccctcctaggtatttacccaagataagtggaagcatttgtccagacaaagatttgtatacaaaggtttatagcagctttattcgtataagcaaaaactggaaatgacccagaagtctgtccacatgtgaatggataaacaggctatgtgatatcaatacagtggaattgacttttgacacatgcaacgtggatgtgtatcatggatgaatatcaaaggattttagacatggataaatatcagaatgattatgctgagtgaaagaagtcagacaaaaaggagtacatactgtatgtttctgtttagattaaattccacaagatgtaaactaatctacagtgacaatatagaagaatggttgcccggggcagggaagggcacggggaaccttttgggggtaaccacctcaactgtggtcagaggttcacaggtacaaacatgtcaaaaggtaccaaattatacgttttaaatgggtgcaatttatgtcaattacacctcaacagagaaaaatacaatgcttattttatgcaaagggttattttgtaaaactcttttgaggaggaccgtcctggtcagcggccctcaccatcgagactctccctgcacatgggtgctgtggtgactcggcccctggrctcaccctctggtgctgtgtgcacctcaagagcaggatggaaaggtcccctccccacagcctggctgtcagacccycggcacagaggtgcaccgtgcagcctcccgtcatttcccatttgcctgcccaagctctcagtgtctgagctctgtcctctttctggaagacagccaggtttagtgttgggagcaggagaccagcatgggctagcccagtcccaccacctgaacagaggggctgtgatcctccaagctacccagggaaggtgccacctgggtgcacagctggtcccaatggtcaggcctccccttgacagaggggcagggccgtgtcatggtcagggcctgtgctctaaagccagactgagggtcaaaacccagctgccccatttacaagcttcacggtctcaggagtgtcactctgcacatcagtttcctcatctgtaaaaccgatcagtgacatctgcctggttacctgctggggcaagtgggtgagttgagtccgatgaagcacttagaacggtgcctggtatgtggcagtgtacagagcatggggcaatcactgcagccgacctagctggtggctccagtgggccttagtgccccaggcatctgaggagcccactcttcagcactgcccccgagtggctgcagcacacactcccccaggactcattcagccctcccaaggagtgggaagcctccggaacctggtgctgtccgaggcacgacacgcaggaagcagggcaggtgtcctccctggcccctcacccttcctagccaggctgcagctgatccgaggtggttccttgatcctggagtctgaagggacattgaggggctacctgtgctccaaacagaccagcccgcttctcatctgcttcacacacaggggttctgggtaagatttcacttcatttctttgaaacaccactctgctgggccagccaagtcctgtagaccccatcacttgtaccccttgacctcagcaacaggaccaagacctgtagaccccaccacttgcaccccttgacctgaaaaacaggaccacaacctacacccagccrtcctcacctggactatgaggatggtactgctcactggctccggacagctgtgtgactccaggggagccagctgtggttgagatctcgggggtcttggtaaatctggtaaactccttgtgcagttctagcgagcccagtgtgaggactgcctgttggctgggaaccgtaaatctgcttgggtttcatgagaatcttgccctgagtgacctccagctggggaactcaccctccatctgcgccarggagagcttggtcattgtctgcagggacccaactaatcaggacgkgcttccacgaggagacagatttgaaagtatgctctcttcgggaagcagtagctttaaactggactagctcttatataatgggcactgtgtccctaacgaaaccaaaatatggtccaataatggcttctttgagggaagcacagggcagttgggttgtccaaagccttctttggaacttcacaggtttaaaaggtgatggttcaagaggccccagtattattcagccatataaaggaatacataaacaaaaatgtggcctagccatacagtggaatattactcagccataaaaaaataacattctaatacgtgctacaacatggaagaaccttgaagcatgatcctgagtgaaagaagccagacacaaaaggtcacatgtaatgwgattccactcatatgaaatatccagaataggtcaattcaaagcgacggaagatacattagrggttgccaggggccagggaacrgggaaatggggagtgactgctaatgggttctgctttagggtaataaaaatgttctggaattaaacagcagtgatgattgcacaccattgtgaatgtactaaaaccaattaattctaccctttaaagtggtggatcttatgtgaattatatctcaattgtatctaaataaataataatttgtaaaggcctcaggagaggagctgataatcaggacttaatccctgacttggcacactacctgtcacccaactgtctccagtccttcatactcatcaggagccttgtgcaacatcacctttgcacttgaggcttcctctgcttagaatgctgatctgcctgccccagcatgtcccatgagcctgcctggctcagctcagtgactctcggcttctgctctccccattccaggtatcacagcttgtattctgctttcagaaatcaggtagtcaatcttgctggtgcctaggggactggcattctgtcacatataaagagtgggtgaccgccaggtgcggtggctcacacctgtaatcccagcactttgggaggctgaggygggaggatcacgaggtcaggagatcgagaccgtcctggctaacacggtgaaaccccatctctactaaaaatacaaaaaattagctgggcgtggtggcgggtgcctgtagtcccagctactcaggaggctgaggcaggagaatggcatgaacccaggagagctaagatcgcgccactgcactccagcctgggcaacagagcaaggctccatctcaaaaaaaaaaaaaaaatgagtgggtgaccagcattagagcatcagggaacaccctcacccaggcactcacctgtgggatgaagccacagcacatcaccatgtggaagccaaacttggtcacatactgaggctcagcaccctcacctcttcagcctgttgacagagatccttggcctgaaggagctgtttgtctttctcttaaatgccagacctcagcagagcatcagtacaagcctgggctgcacatgctagaatatgggtggtctaaggatgtactacatacagtagcaattagtcaatatatggatctgccaggacactcctacctgaagcacactggacagcagggttgggtataaaaggggttattattacctcaagcacaccagacaagagggctgggtataaaaggggtcatgtgccaattctactagcttatcagctccatcaaaattcttatttaataatgtcattttcataatgtagtgtaaagggagatggtatacaactcaacctattattgaaatgccaccaagaagtaccatgagcaccaatctagggtagacaatgtggctgggtcaaggtacccaaaagcaatctgaacatacccactgtgttctcctccttcaacttctccctgagcttctggttgtaaaggtgcaaatctgccatctggtctccaagttttgatgcttaacggaggaaagaagaaatgcccctaattaaaataacaaataaaaaataacattatccagtttgttccattttcagaaatgttttaaatacattaaaaactactctgcactctttaaaaagtaaaaaatgaaccccaggcaatgactcttttcctatttcttttttttttcttttcttttttgagacggggtcttgctgtgtcatccaggctgtagtgcagtagcacaatcatggctcactgcagccttgacctccaggcctcaagcaatcctcccacctcagcctcacaactagctgggacaacatgcatgtgccaccattcctttttttttttttttttttttaagatatggagtctccctatgttgcccagctggtcttgaactcctgagctcaggcgatcttcctgccttggctccccaaaatactgggattacaggtgtgaaccactatgcctagccctggcaatgacgctttccaaaatataaaattgtgtaatcacaaagaggaattaagcaggtgagcttcaacagaagtcttagcaggtactaggaattaaaggaggagtgctgaaaaagtaacaataagtgaaaatgcagggtcaggcacagtggcacagtggctcaggcctataatcccagcactttgggaggctgaggtgggaggactgcatgagaccaggagctgaagaccagcctgggcaacatagtgagatcccatctctacaaaaaatttaaaaattaaaaaaaaaatagctataaattttttgtgaaaaccaatgtaaatcacatataggaaaaagactgggactgggtgtggtggctcacaactgtaatcccagcactttgtgaggctgaagggggtggatcactgaggtcaggagtttgaggccagcctggctagcatggtgaaaccctgtctctactaaaaatacaaaaattagctggttgaggtggccggatacctgtaatcccagctactcgggaggctgaggcaggagaattgcttgaacttgggakggggaggttacagtgagccaagatcgtgccattgcactccagcttgggtgacagagcaagactttgtctcaaaaaacaagcaaactgtctgggtggggtggctcacgcctgtaatcccagcactttgggaggttgaggcaggtgcatcatgaggtcaggagatcgagaccatcctggctaacacggtgaaatccygtctctactaaaaatacaaaagagaaaagaaaaaaaaatagctgggcgtggtggtgggcgcctgtagtcctagctcttagggaggctgaggcaggagaatggcatgaacccaggaggcggagcttgcagtgaaccgagatcgcgccactgcactccagcctgggtgacagtgagactccaactcaaaaaaaaaaaaaaaaagaattgcgtatttgtttgttttgagacagggtctcactctgtcatccgggaaggagtgcagtggcgcgatcttggctcactagagcctctgcctcctgggtccaagcaattctcctgcctcagccccggagtagctgggattacaggtgtgygccaccacaccctgctgtgtttttgtatttttactagagacggggtttcaccatgttggccaggctgatcaagaactcctggcctcaagtgatccaccttcctcggcctcccaaagtgtaggattgcatgtttaaaaaaaatcaaacctcatgaatgagaccaaagcgtctactggcgcacaggaaaagaacaccctttacttgaaattaccccagggaaaacccaggcacagcctccccagcctggcagcccctgccagcctgtacctagggtgggcgtgagcgtccacagctgggagagcagccggcacaccccagccctgctcccagggtgagccacgcatgcaccaggcagagaactcctgggcttccggctgctaagccccaggggccccagcgtcacctgctctcgtgcgtggactgagcacctactgtgtgcaggcccttctcaggggtgggagggaaggagtggtctcaccctgcagagctttcaggacaactgaggaagtttyccagggtccatgggaagtctgaaccaaaaactgcttcccagtgagtgggactcctcactttgagggatttgggttctgagccagtagagcaggcaatgcaagaggatccgatcccacatccaggctgcatggctctgggagtcctcctgycagcactctccaccaggacccctgctgcccctcagagcaccccccaccagagtatgcagggcctcttgagcccacttgggccaggagggcacccaggcctgcctttccctgcctgcctgctctcaagggttaagctaactttctccatttgtgctaacrttttccatacattctttatttatttttttttattttttgagacagartcttgctctgtcgcccaggctggagtgcagtgttaccgtctcaatctaggctcactgcaacctctgcctcccgggttcgactgattgtcttgcctcagcctcctgagtagctgggattacaggcccgtgccacccccccgcccccactggctaattattgtattttttagtagagacggggtttcaccatgttggccaggctggtctcaaactcctgatccacccacctcagcctcccaaagtgctgggattacaggcatgagccaccacgcttggatttccatacattctggccattgggacgagctgtgcacccaggtgtcacattccctgggtagcttggaggatcacagcccctctgttcaggtggtgggactgggctagcccatgctggtgtcctgctcccaacactaaacctggttgtctcatccacgcagggcccccacaggacctccagtccatgcagggcccccacgagaccttctggtctgcacagggcccccagagaccaggaagggtcccctcgctggaatttgagtcccagcctgcgagttgggccagtggcatttgttctccacgtgtgactctgtaaacagctttccctcctggtttctgtcttttttttttttttttttttccgagacatggtcttgctctgttgcccaggccrgagtgcagtggtgtgatcttgactcactgcaacctccacctcccgggttcaagcaattcccctgccgcagcctcccaagtagctgggattacaggcgcccrccaccacrcccagctaattttttgtatttttagtagagatggggttttaccatgttggccaggatggtctcgaactcctgacctcaggtgatccacccgcctcagcctcccaaagtggtgggattacaggcgtgagccaccgtgtctgccctggtttctgtcttgggtgtggtccccaaactcttaagcacagcctcacacctccacccagtcattcacatagaccctggggtgcgcagaggcagagggtcacccgcagaggagctgtccgcatgtccatggcrgcctcagtgtggcttctctgctcagcccagggtgtggtgattccgtcactgctttaaatgtggggttcaggaggaattctgatataacagggaygtctccacatgtcttccctgccttrgcgtcttgaggtgtacgtggaaaaacctctggcagggctcactctgacagagtcccggcctctgacattgaatcacccacagtctctctagtttatgtggtagggttcgggatttatgaaaatcaagtactaaaaaatgacttccttgtctctttgaattcaactctgattaatgtttgatcctatttattaacttaaaccatgaaattcccttaagtattttaaatggaattaatatacgtcatatatttgatttttattttcctatatcagttgtttggctagcaaacagaccttccaagcatttaaacagtgcttgtaaatctaataaattaagctaaaaatatgaagcacgtttaattctctggattttaatatactttgtgagcttagtaacatttttctattcctcttaaacttaaaaaaaaaattgaaaactaggccagtttcagtgggtcatgcctgtaatcccagcactttgggaggcctaggcaggtggaacacctgaggacaggagttcaagaccagcctggccaacatggtgaaaccctgtctctattaaaaatacaaaaattagccgggagtggtggcacatgtgtgcctgtaatcccagctactccggaggttgaggcgggagaattgctcccaggaggtggaggttgcagtgagccgagattgtgccactgcattctagcctgggcaacaagagcgaaagtctgtctcaaaaaaaaaaaaaaaaaattggagactaatattaaagagcacaatctaaagtgtagggctggaatgaatgaatgagctctctaggcgagcaaagcctttcagggctgatgtccctcggtcccacgagccaggcctccrcaggctgagcactgagcgctgtctgtctgaccagaacatcatccactcgggcagtgccctcctggccccggccaccagggcagcgtgggagcagatccagcggagcgagggtggcacggcacagctgctccggcgcctcgagggctacttcagcaaygtggcacgcaacgtgcagtggacgtacctgcagccctttgtcatcgtcaccaccaacatgagtaaggcactggctgcrttgggggtggaggcctgcaaccctcaggggtgcgcccaggagctgggtccccatgggtggagcaggtgggctcccggcccccacttggccatgctcttagaaaaatgattcagaggctgggygcagtggctcacgcctrtaatcccagaacttttggaggccgagacaggcagatcacatgcagtcaggagttggagaccagcctgggcaacatggtgaaaccctgtctctactaaaaatgcaaaaagtagccaggtgtgatggtgcatgcctgtaatcccagctacttgggaggctgaggcaggagaatcacttgaacctgggaggcagaggttgcagtgggccaagattgcactattgcattccagcctgggtgacggggagactctgtcaaaaaaaaaaaaaaaaagccgggtgcggtggctcatgcctgtaatcccagcactttgggaggccgaggaggggcagattacgaggtcaggtgatcgagaccatcctggctaacatggtgaaaccccgtctctactaaaaatacaaaaattagctgggcgtggtggcaggcgcctgtagtcccagctactcgggaggctgaggcaggagaatggcgtgaacatgggaggcggagcttgcagtgagctgagatggtgccactgcactccagcctgggcgatagagggaaattccatctcaaaaaaaaaaaaaaaaaaaaaaaaaaggttcagcagcaaggcctccatttcctcatctgtaaatggagcctttgggaagacagtctgcaatgayacacccatggctcccaggggacaggtcctgggcttgggagatgttaggccgtgatcttgggggtttggcaggccttccagaccctcaggtgtgagactctagaagagtgagtgtcgaggatcctgcctcacttcaggctcactgcagacaggtgtaggtacacatgggatgcaggaagttggaagtcgcttctgttctaaagatggttagtcaactggatatggcggttcacacctgtaatccctgcattgtgggaggctgaggtgggcagattgcttgagcccaggagttcgagaccagcctgggtgccatagtgagaccccatctctatttaaaaaaaaaattagccaggtgtggtggcatgctyctgtattcccagctactcaggaggctaaggtgggaggatcgcttgagcccaggaggttgaggctacagtgagctgagattgcaccactgtactccagcctgggtgacagagtgagaccctgtcttaaaaaatacatataaataagtaggctgggcacggtggctcatgcctgtaattccagcactttgggaggccgagggaggcagatcacttgagatcaagagtttgagaacagcctggccaacatggtgaaacccattctctaccaaaaatayaaaaaattagccrggcatggtggtgtgtgcctgtaatctcakctactcgggaggctgaggcaggggaactgcttgaacccaggaggcagaggttrcagtgagcagagattgcaccactgcactccagcctgagcgacactgtgagacaccgtttcaaaaaaattaataawaaaaaataaattaattaataaatatgtccagccagtgtcagtgtgacagttgtggtcattttgataacagcaagggttcaagaaagccctgggagtgatgtctgattaaatgaactgtccccccagttcttgctgtcgacatctttgacaagttcaacttcacgggagccagagtcccatggttcgacgccattcatgaagmattccccagggagctggagtcctccatctccttcccagccaacttcttcaaaccacctgaagaaaaaggtagaaccgcttagaaacctgctacttcccttsgagtccccagcgttcagggaggggagggctccccctgcgggcatcccaggaggatgamcacgccatactccctgcgcactgaagatccggggccggagtgttccgagtgttcgctggcaccaagtcctattggtgacagcrggttgttttgtccaagtgcttaggtagaggttgagcatcctaatcctgaaatctgaaatgctccagaatctgaaccttcttgagcaccaacctgacacttaaaggaagtgctcattggagggtaagtatgaaatgatactttaaaataaaaaaaaatcaaaatccaggccgagcacagtggctcatgcctgtaatcccagcactttgggagaccgaggcagggggatcacctgaagtcagcagttcgagaccaccctggccaatgtggttaaaccccgtctttactaaaaaattagccagctgtggtggtgggcacctgtaatcccagctactcaggaggctgaggcatgagaatcacttgagcccaggaggcagaggttgcagtgagccaagatgtgccagcctgggttacagagtgagactctgtctcaaaaaaaaaaagaatccagaatgttcccaaacatttcagttaagggatactcagccttgtaactgataacttgagaaagaaaagagaactgaaatttgtatgtgagctgattgtctttgatgggcagttgaacccgtgaagttgaacttgtcaaagatgttgacagcaagaactggggggacagttcctttaatcagacatcactcccagggctttcttgaacccttgctgttatcaaaatgaccacaactgtcacactgacactggctggacatatttatttattattattaatttttttgaaaaggtgtctcacagtgtcgctcaggctggagtgcagtggtgcgatctccgctcactgcaacctctgcctcctgggttcaaagctgcttctagctgggcatgatggctcacgcctgtaaccctaagactttgggaggccgatatggggaggatcgcttgagcccagaaattcaagaccaatctggacaacataggaaaaccccatctatactaaaaaagtttttttttaaattacctgggcatggtggcrcatgcctgtagtccaacctactcaggaggctgaggcgggaggattgctttagtccaggagatgaggctgcagtgagttgtgattatrcctctacagcccagcctgggcaacagagcaagaacctgtctgggtcgggggaggcaggggaagctgattctaaatagaaatagaaattttagactcaccttcccttccctgcaagaaacaaacaaacaaaaacaaacaagaatgctgtctgtgtatgtacaaatcttcactcctgggttgagattatgatacaaaacagtttgaacattctgaactttcttaaggtgctttttttacagatctgtgacaattactaaaaacttccccaaataaaaaggacatgaaaaggtaaactccataatggacagtttaaaattggaaaccttcttagtaaatggattttgtcaggtatatggtgttacctcatgtgtctttttttttttttttttttttgacagaatctcacgctatcgcccaggctggagtacagtggcgcgatctccgctcactgcaagctccgcctcccgggttcacgccattctcctgcctcagcctcccgagagtagctgggactacaggcgcccgccaccacgcccagctaattttttgtatttttagtagagacggggtttcaccgtgttagccagaatggtttcgatctcctcacctcgcgatccatccgcctcagcctcccaaagtgctgggattacaggcgtgagccaccgtgcctggccctcatgtgtcttaaaaagaggggtgactctgatgtggggtcatgcttgaaactgagaggacgaggtccccgaccctccattgcagccagctctctctggaactaacagagtgagaactcgctcattaccaaggggaggacaccaagccattcatgggggacccacccccatgacccaaacaaccccgaccacgcccacctccaacccttaagcagtccatctccagaactcttttcatcctgcagatctgaaactctagcccacaaaacaccaactccactccccagccactggtgcccaccgttgtttctgtctctgaatttgactcctctagggacctcccataagtggaatcatacaatatttgtccttttgtgcttggcttatttcactgagcgtaatgttctctaggttcacctgtgttgtagcaaacgtcagactttccctccttttgaaggctgagtaatattctgttgtgtggatggagcacgcattgtttatccactcacctgttgacgcatgcctgggtcgtttccacctttcggcctgtgtgaatggtgctgctctgaacaggggtgaagacgtatctgggcgtctgctttcagttcttttgggtgtatacccagaagtgggcttgctgggtcacgtggtaaatcctgtggttgattttttgaggacgcaccatactgttttcggtgggacatctgttgggttttgagaagcacctgctggcactgagagctgtcttggggaacacaggtgctcctgccggagtcctcacgctctgctcacgttgcagaaggccccctggtaaggccagccagccggaggaccaccccgcagaccacacgcccagggcctggcaccgakrgggaggccccgatcagcaggtgaaagcgacaccctgatgacactggctagttcaccttcactctggtcatcgtttactgtaccccgrggcagctcccrcctgagccctatgaycccaaccgccrcagcctctggtaaggcctgggtatggggcacatggagagggcccattccagaggctcctaagtcaaaagagattccacaagtcaaaatcctgatcctgatcaagcacaggccttcacagtgacatttcactgtgaccctggcccagagacagagaccactgtcctgcagtgtccctgggagggaggttctgggtctgccacaggacaccacaccctggaacattgcacaccctttgcctggccttttcccagygtttctgtcagaaatgccccctcccaagcatacaccccatcttgtgccccgagggactcgattctctccccacacacccgacccgaggctgtcatgggtagtgcctgctgctggccccagggttagggctgctcagccagtcctggctggaaaggatgaatgtcccacaagcagctttggggcctgcttggtgggagcagcccgaggatccgcccttcgtcctcctgccatttcccacttccctggctctggggtcctcatgttcacgtggttctcagtgactgggtgattgacccccatgagctgtcattattttggtgtcttttgctggacatttaagccattccttgtgtttctgccattagctattatgggctgtaacatctttgcacctgtgccttctttctttttaaatttctgaagtcctaatttgacccaaaggtgacacatctccctgtgtgccctgtcagtgatgaaacctgctctggggatgaagatgccgtggggcccacagatccaagctctcggagtgtgattctgtctcccctagaaacacatccatggcatgtcctcagggcatttgtgcrtgggattaagcaaatgtttcctaatcatgtttgtccctgtgctctggcttcttgacctcaggctgcctcactggcccatcattaatacgtcgatggtgagcgcactggtgtacagcgagggggctccacttccgagmcccctggagaggcccgtcctggtggagttcaccctgctggagatggagaagcgaaccaagcctgtctgtgtgttctggaaccattccctggcgtaaatgtgatgccgggagttctgcatcttcatgtgagggctttgccaagacacagagaacccgcagggttgttggctcagcggcagatcgtcccacggggacagtctcttgtggtctgtgtctcccccttcagccccctgtggggcagtgagcctcctgctctgcttctgtgggtgcatcagagcccccccagatgcccacacgcagacgcgcacaggcctgcacgtggaaacacagacatgcgcacacgcaggcccacacacagacgcacacagagctgcacgtggagacacgtgcgcacacgcaggcccacacgcaggcccacacacaggtgcacgcggacctgcacgtggagacacagatgtgtgcacatgcaggcccacacacaggtgagcgtggacctgtgtgaacagatgcgcgcagacctgcacgtggagacacagacatgcaggcgcacaaagagatccctcaaggctgacacccaggaaggggcctctcacttgtgggactcccgagatgcagtggccaacackagtgtagtgcccagttcactgctggataagacagaggcctgttctggtcacacatgggaggcagaacccagagactgggcccaggagcccttctgctgacagtgggaactcccagctacgtgtgggggtccccataccagacaaaggtccctgaccttagtcttgcccgagaggccgacacagcccagctttggggtctggctttacycacaagaggccacaccttgccacagcactgtttatctggcctgtttcagaagcaccgtcagagtggcgaaggcaggaggtggtgcacgagagtctacgttctagcatccattcaagtgagggaaaggcgtttcgtacttagaaaaatgcaaaattaatgattctcacccacacatgagactgtggattcacccatgtatgagayagtggattcagagccatgctgtggctctcatctgctgggagccagtagtgtttgtgctttggttttgcttttttagctacatggtttatgtgaggtgcggacttacttgagttgctctgtctttacagggagcttgctttttctctgctggtttgttttcacttttgctgtctctgtttagaagaaaacattagaactggggtgtggtggaaggatgggagcacaatctgggaggggaagacctgctctctctccacataccaggagggagtggcaggaaggggagacactgtgccggactcagggagtcaagagcgtgagcacccccaggcttcaatctgctgaacrttgtgcatctgggggcgcccgtgcagcaggaacactctccccatcacaattcctctgggcacagtggagagccatgagtgggggctgtcctgggggctgcgctatggtgagtgagcccacgccaggagccagttcagcccagcctcattcttctcctgcttctttgctttccaagttctagttcataagcaaccagcacagtacctggaatgtaagaggcgcttggcttataaaagagagaagaaaggaacccctttcaccacgagggacgtcaggcccagctctctgtcccgggcattcatcttttttccggcaattagcttcagctctaatgacctgctgtctgctttatgttgcacctatgatttccagattgtaaagtttgtggcaaatgtattaacgttcacatcccatttacagattagcaaactaaggatctgagaggttatgtgattttcccagtctggcggagggcagggccctgtcagaagccgagacacacctcgtaacagcttgttatttggggcttcccatcagtgaggcaggagtcataatggggccctggcttctgggcaattcccataaaacattgtgccacctgaagatggaagtgtcagaggaaggcgagatgttatttctgaaagcatctaccctcagaaagagacagaggagtgcatcgcagctgtgtgaacccggggtggtggtggttccagcagcggggcacgtggtggacgcaagacggccccgtttgagttttgctgctaggtgacaygtagaacttgaacttcagagggtgctccttggaggccctgatgagagagacacagaagggaagggagactgttcccatggtcctgcctctgcggcagcgagcctgctgctcttgcagctgggtggctgttcggtgcagggggccggtgaggaacacggtggggagcagcctgcgagggcgccgggctttcagcactcactatacctgctgtttggtttggccaggatggcctgggagtccccagggccgggcaaagactgcccccaacagacatgggcggagggaaccgtctcacccctgcctcttctcccttctctacgcagtgtcagtgggacgggagggtggtctgcccggggcttcaagctcctgtccaggaaccggacccatgtcgtacgccagtgcagccacacggccagcttcgaggtgctcatggacgtctccaggtgtgagatgggcatcttcttgtggccactatgcccgctgagcctacccccaaacctgcccctcctcaaactaaatcttccattytaagcrctttgaacgaagcaaatcaaccaattaaaaaaatatattccaggattggccagagtctgtgaagatttccataacaaatccccgttacaagggttttcagagagccctggttgtgcattaaaccccgcgatggcaaacccaaagctcaggctctgaggagctcttggagtctgcccctcgcttcagagatggtctgtgcgagggtgccgctctcctcccgctttgatcataaggaaggtgacagctgctggggacggtaggcactctccctcagggccacaagctgggctgcaggataaaagactgggcggctaatgtttaacctctggcattttaagcggcctgggagtgtgagccggccattgtgggcctgcagatgaactggggagtggcccgagtgctgtcctcggcaggacagtgctatccagccaggaagtgggtggcagccagcctgggagtggcctatgtgggaccctcctgtctaggagtcagagccagaggcctgggtggcctcccctggcccctccccagggctgcgctgtagctcaagggcccaggccaccatccttcccgagggctttctgatgtgaagtggccctggtttctgtcacagtcttggaagggtgagtcagccctggggcagggctggaggagggctgtggcttcctgtacaatgtgcrggggaagctgtcccacctgtgcccccatctcatgggcaaatggcaytccccagcaggacccagcctggagaggggttcagtgattagtggactttgttcatagaagggcagggttgggggttgtctcgtggccaggacgccgggcaacatgtgggccaaggaagctgaaattgaggcggaaggaaggaggctggagtgggagtccgaggctcccatggcctgggtgccccaaagttagcggtctctgaacagccctgaaccagtggagggagactggggtgctgctcctggccccagggatgtccagggcccgggcattgaagggacctcagaaggggcagttccaggcccagggctgtgagcactcggcctccccaacccagccaggtcttggcttcccagctcctagttccacatggtaagcaacgccttccagaagttaccagagaaccagagcttgttgttccccaaatgcagaaactccccagggacctgggtcctgggcaagtgtcctggtttgtaaaagcacaggaaacacagcaatgtgaacctacacactgctgaactgtacgcttcaaagtgtccaagatgatatgttttatgtcatgtatattttagcacaattttcctttttttgttttttgacacagttttgctcttttcgcccaggctggagtgcagtggtgaaaccttggctcactgcaacctctgcctcctgtattcaagtgattctcttgtcttagccttccaagcagctgggattacaggctgcaaccaccatgccgagctaatttttggatctttagtagagacggggtctcaccatgttggccaggctggtctcaaactcctgaactcaggtgattgacctgcttcggcctcacaaagtgctgggattacaggtgtgagccactgtgcccagcctgttttttaaagacatgttcactgcctgtaagaaatgcataataaggtkgggtgtggtggctcacacttgtaatcccggcactttgggaggccgaggtgggcagatcatttgagctcacaagttcgagaccagcctgggcaacatggcgaaaccctgtctctaccaaaaatacaaaacttagccaggcatggtggtgcatgcctgtagtgccagctacttggcaggctgaggtaggaggatgacttgagcctaggaggcagaggctgcagtgagccaagattgtgcctctgcaacagagccagaccctgtctcaaaaaaaaaaaaagcataataagggatctggaatttaaaaaataggtccatataacaagctataatagagacatgtgcagctggcacaggacatccatccactggtgataatgatagaacacgtcatattgcacgatagtaggaaaaacaggacagatgggaagggtgcggatgaccagcgccgtagcaatctgaagcatcgagcctgccagtccacataactgaaacctgaagctctgcccctgcccagctctgtgacttccagcaagttgtttagcttctttaagcattgattttctcacctggaagatgagggttgcattcacactctcttcatagctgtgacctaaggatgatatgaaacgacgcccttggcagatctatcagaacccctaccacataataagtgctcagtaaaaggttttgctgaacaaaggaaattacattcatgttgtattaccacaattacccactttctttataaagcggtagtaagtctttcagccaaaagaataagtccatgatgggattaagtgaaagtccaagaggtactgcatgcacctaaggtggagatgtgtttatcttttgcataagctggggatgtatttggaaggtttctgctagcccagaatttgggtggacaggctgagcccctcccaacagcaggattcacctatggggttggttttgggtagacaggctgagcctgccccatggaactgtaggggcttacgaaggcatttcgtttggggaaggagctcatccaggaggactgggatctctggttatatgtgacttctgacctctgggcatggaggtctctctccagaggcccrggcctggacacgaagggagagaggcctccattgtcccacaggggccgaaatgcagacggtgcatccccggtgccctggggaacccttctctgatcatcaggattctcttggactccggggtccttgtcctgctcaggcatccctgccctgctgtccttcagggccctcaacacgatcttctctggacacgagtctggggatagccgggtgttgtgggctccaaagggttgactccttgctcctgggccccacagagagtccttgtgctcagtgcactggctgtgctgcaagatatcctggaattcgaagcacacagtgctggcttgctgtggtacctgtgcaatcaaattgaaggcaagatcaccaggaaggaacacagggcttgcaagatcacggaaaaccttcttggagttgttttgacacaccactcatgtcaagtgtctgggtacttgtaggatggcccgccactccacccaggggcaggagcaacagggagatcccacaagcaaagtgaactgggggatggggtgagtgggctccaggcaacagagccctactggcaggtcctcaccccctgggccggaactggagtgaggggcacagagtgcccaggtaaccgctcctgggaacagtggggaactgtcagatgctcgaactttcgagagctgggctctgagcgtcctcgtggagctgccaactcggccaaaggagaagcgagcagtttcttctgttgccgggcaacacgccttttaaacctgagcgagtgggtgcgcatgcaaagaacgggcgcgagtgacagagcgaccttaacggattagcaccttaacggattagcaccttaacggattagcgtggcaaggtatgcaagcaagtcaccwgctggcaatttgggggtggggagggggaggtgcgcaatacatactggaaggagaggcacccacacaaaggacgcaggaagaacaggtgcgcacaaaggcacaatggcggcagatctgcccgtggatcactgaagattcctgctctcctgctgaggtggagattgcagtgaactaagatcacaccattgcgctagagcccgggcgacagagcaagacttggtctcaaaaaataaataaaataaaataagtacaataaaataacaaaacaaaacaaagtaagaggagatgatatctggtcgtgttttatggccatctggtaagctagattctttcctttggttttattgccaatcaatgattagaaagaagcagtttgctgttggcttgtttttcccctcaactaaatgtaagaaaaaaaaagagtcaaaaataccgaagctaattttaaaatgtatgtatagagagagacttggtcttaccttgtcatccaggctggagtgctgtggtgccatcacggctcagggcagcttcgacctcatgggctcaggcaatcctttcacatcagtcgaccagatagctgagattacaaatgtgggaaaccacaccctgctaatttcttgtattttttgtagagtcggggtttcaccttgttgccgaggctggtcttgaactcctgggctcaagcaatctttctgcttctgcctcccaaagtgttgggattataggcatgagccaccattcccgccgaaatatttttgagattcatagagatgagtaggtcataataagagtgcacaacttgtagttatatttaatatcttttgaaattactcggcacccccattgtaatttaaatgatttgttcctgacctggttttactttgttcctgagggttgcagatcccttgaacaatattccacgaatgaagcagtgataataaacctgcagctgccccgagggggcgctgtgcggaggttcacaaagggacctgggtctccctggtgcggatgcgggggccgcctccattctgctttctgacactgccaccgcggggccaggcttgatgtgaccccatcactgctcagttcactacacagtttcatcttttgatatggaagatttgactccatccacgttccttaggaggttactggaaatgacagcgctgtaaatttctgggtaaatgagcagccaacatttttgggagctgtcacacaaccacactgcccttccctctgcctgaaaacctttaggcctgattgactcggagaaagcccattaaactcagcccccactgacttgttcatttccactcaaacgtttgtgatagtcccaacacaaggcttgtcctccaagggacaacttgtaaacacttctaagagaaagggttgactgggcccggtgcctcacacctgtaatcccggcactttgggaggccgaggtgggcagatcacttgaggtcaagagtttgagaccagtccatgatcttggcttgaagaggcaagaccctatagtttattgaacattttaagcccactccttgatccatgagccgcagaatggatgttgtattagcaaaaatgaaaacaacattaatctccttgtatcatcattagagctcctggctgactggttacattgtcaatcaacagtaatattttgaaaggaacagtgggcttaaaatgttcaatatgctgtcaacagatgtgctgtcatccaggctttgttattccgtttatagagcacaggcagagtagatgtagcgtaactcttaagggccctaggattgtgggactggtgaatgagcactggcttccacttaaagtcaccagctgcttaggccctaatgagagagacagcctgtcctttgaagctttgaagccaggcattgacttctcctctgtagctatgaaagtcctagatgtcatcttttaatagaaggctgttctatccacattgaaaattgtcatttagtgtggccaccttcatcagtgatcttagctagatcttctgggtaacttgctgcagcttctgtatcagcacttgctagcttcgccttgcacttatatgttatggagatggcttctttccttcaatatcgtgagccaacctctgctagcttcaaacttttcttctgcagcttcatcaccaatctcagcattcatagaattgaagacagttagggccttgctgtggattcagctttggcttaagggaatgttgtagctggtttgatcttttattcaaggcaggaaaactttctccatatcagcaataaggctgttttgctatctatcatttgcgtattcactggtgtagcacttttaatttccttcaagaacttttcttctgcattcacaacttggctaactggcctagctttcagccttttggcttttgccgtgcctttctcaattcgcttaagcatttctagattttgatttaaagtgaaagatgtgggagtcttcgttttacttgaatacttagaggccattgtagggttactaattggcctaattttaatattgttatgtctcaaggaatagggaagcccaaggagagggagagagacagaatggctagtcagtggatctttcagaacacacacaactttatagattaagctcactgtcttatatgggcacagttcatggcaccccaaaacaattactatagtagcatcaaagaccactggtaatacatcaccataacagttataataataatgagaaagtttaaaatattgcaagaattaccaaacttgacctagagacattgaagtgagcacatgctattggcaaaatagtactaacagacttgtttgttacagggtagccacaaacccccaatttgtaaaaaacgcagtatctgtgaagcacaagaaggtgaagtacaatctgaggtgtatctgtattttcttccacgttgttaggtgtcttcttataacctaagttttagattttcctagacaataacttaaataattttagaacattataaattacttctcccttgaaggattgcttgtggtcaggagtttgagaccagcctggacaacatagtgagatcttctctctactaaaatttaaaaaaatatatagccaggcatggtggcgatcctcccacctcagcccagctacttggagggctgaagcagggggatgacttgagccaggaagttgaggctgctgtgagccattatcacgccactgcactcctgcctggacaacagagcaagaccctgtctccaaaaaaaaaaattacttcccctttgattatagaactttgtcacrtatcaagttgattaaatgaagataattcaagcattaagtaattatttaatgctttttgtgttcttctagtttgagttctatgattctatgatcttaagatatttaccttaatatatagagagacatatatattaattattatataacacaaatcaattatttcaattaataatttgamgtttttttccatttacttggtacttagaatgcagggggaaatatgatataggatggttagtcatacataaggaaaattctttttgtacacttgacagtcttggctacatacccaattctctgcttttttatttcctatggacacttctttgatgatatatatgtatggcttgggggaggcggttggcttttgtttcctgtgagacagatatctaagttccatagatatctgttccttccctttagaagcaaagaggatactggttcttttatttcaagatctgtaagttaaaattggacagtctgaaatgcataatctttttcttttttgagacggagtctcactgtcacccaggctggagtgcaatggtgcaatctcggctcactgcagcctccacctccctcccagtttcaagtgattctcctgcctcagcctccagagtaactgggattacaggtgcctaccatcatgcctggctaatttttgtatttttagtagagacggggtttctccatgttggccaggctggtctcgaactcctgacctcaagtgatccgcctgcctcagcctcccaaagtgctgggattacaggcgtgagccactgcacctggtctgaaatgcataatcttttaaaactgaaagccatttctaatagtgttcttaatttgtcaagaatcgtatgagaagtgccagtgccctttgcctgtctagctataagtggattatcatgcccaccctttggagccagcagttttggttcagtcctttggtctctgactactcacagtctgcaggaaagagcaggttgtgacacttgactagtttatgagagcagaagctgttacgtgacacttagcacatactgctctcagaggccccagatggatcattaatgctcggaacgtgcgtgctttatggagaaaccgcctaatcaacggaggtagattccctaatacccatatcatctttcgttaactctcttaagagtcaccctaaaattactgtgctgacgatcactgtatttcattaagtatccattacaaaacaagcccttatgagtttagcttttatttaacaaatacattgttctcttctaacttgtgccttttatcatccgttgaagctttagaatagtagaatgttcatgctgaaaacgtcttggcattctggtttattatcaggtttacagatctgggactgaaacccgcacaaggataaatggctgcctcaaggctatcttgtgagtccagggcgttatgtaaccagctttcagtactattgctttaagggttgcatcttcctttttttctatttttaaaaaatcagtgcctctgtttatacacaattatgtttttaatttaaatatgcagctaactgtaataatttttaagtgcttatcatgagaaggggtaatcgagttcccatttccttatctctaaaatttcgctgtccagagacaaccatttttaatttttttagctgttgtctttagggattgatggtactagattggtaatacaagaataaccaaccggaatagagaagatgtttatacattcagtaaacttttctttggttttagatttttctgtctatgagctttagttgcgttattgttttcttgctctggaaaaccctaactgaatgcaatcaagatgcctctaaaggttcaattgagagagctttattttgaatgaaaaatctcattgttttttgatgaaatgctagacttagaaatggattggttaaatctgaagaataatgaaaccacttaatctagtataaaatacttttaataaatgaacagaagattttagtgctgcctgaggtcatttaatctcagattgacattgagaatgcagctttattgggggatgtacttcatgaatgtgtgggccacagaagaaaagattggctgtttcttgctggagatgagtggaatcaaaagaattaatgggctggaatggtttagcaggcatatatttatgtgttatgctttgcttgcattctaagctttttttcctaatataaaagttaataatttgtcaactagtaacctctgtgtcaggtagtgtgctgagtgtttaaatagaagttagggaataaaaatagtttctattctcaggaagtttatggactagtcagtaaaaaatacatcagtaattaaaactcagtaaattaaaacttttgtttatggttataacagaatatcagaccaaatctctgatgagactactgtaaaaactgtttaaaatacaaaaacaaatatctttgatggcactggggactaaccaaggcagccaggtcaaatttggcaggagccaaaattgtagagaaaaatcctattgagttgagcccgtatgtacccctgcttttttcccttagggtggtggctaactctacacatggggtggagaccagacaaagcagtggtccagagtttgtttcataaccactgagtagtgggagtaaaacttgaattgagggattctaaggcagccaagatttgagggtccaagatcctaggaaaaagacaacctcaagagtaatgaactcagtcaacatggtggcacatgcctctagtcccagctactcaggaggctgaggcaggaggattgcttgagcctaacagttcaagattacagtgagctttgatcacaccactacactccagcctgggcaacacagtgagaccctatctctttgggaaaatagagagagagaaagagggtagtaaactcaatatttgacttagcttttgctgttaaggtatttttcaaagtcagaaggagaaattcagtagaaagctattacccaagcctaaaaaacgtaagcacagtttttgttctcacaggagtaggttgacaaaaaattagatttcaaggccagccaaagaggaatgacaatgggaaatactccaggccttcggctgagacctcagaagaattatgacctacaaataaaggttgaccagaagttatcagcttgaaatccagcttcaaaactttgattggatcagggtgatcagcccttattctagttacctgccagaagaaacttagcccctatactcttggaacatactatcctgcattccatcaaaataccaggcatggccaggcgcagtggctcatgcctgtaatcctggcactttgggaggccaaggtggtaggattaccggaggccaagagttcaagaccaacctgcccaacatagtgagaccctgtctctataattaattaattaattaaataccaggcatgccaataagcacgatcaagtgaatgaaaatcaagagaaagaatgagtaacagaaagaacttgaggtgatccagatattggaactcttagataggcttttaaaataaccgatttatgagtttaaggaaacagatgaagagatagagagttttaccagagaactggaatctataaaatagaatcaaatgaacattttattttattattttattttattttttattttttgagatggagtttcactcttgtcacccaggctggagtacaatggtgcaatcttggcttgctgcaacctccgcctcccaggttcaagcgattctcctacctcaggctcctgagtagctgggattacaggcacctgccaccaggcccagctaatttttttttttttttgtacttttagtagagacggggtttcgtcatgttggccaggctggtctcgaactcctgacctcaggtgatcctcccaaagtgctgggattataggcgtgagccatggcgcctggccaaatgaaaattttaggactaaaaatacattagcttgagttacaaactcccaagcatgtgtttcacaaccactcaacacggaaaagatttgtgaattagaggactgatcagtaagaaatatctacagtgaagcaccgagaaatgaaaggatgaaaaaaatacagtgtagtggagacacaggacataatagaggggttaagacacatacaattgggttatactaagagaaaagagagggctaggagtgtcataagtgctaaaagtcaaggacagcaaaaaaaatctttaattgctagagaaaaaagatactaggttaagaggaataataagattggcagccgatttctcaatagataacaaaaagaggatttgtcaccagcaggcccattctgaaagaaaaaggaagttctcgtcgcagaaagaaaataataccaaagggaaacaaaatttcaagaaggaataaagaacagtggaagagtaaatatgaaggtaaatatatatgaatattgactgcagtgtaataaaaatgtcttatttaaagatacatgcaggtttaaagtttaagataaaatggttcaaaagttaggagggggcagtaaatataattaaggtgttgcaaggtctttgaattgttcagaaggttaggaaattaatttgtcgtagactctgagtaagtgaagggctgcacattgtaaatctctagtcctacacgctgctacagttgacattcattgcacggagttactgagaactcaaatgtgactattctgaattgagatgtgctgtgattataaataaacaccagattttgaacacttagaagatttcatatagaaaaatagaatgtaaaatgcttcatttaaaaaatactgattacatgttgaaatgatctcttttttttgagacagagtctcgctctgtcacccaggctggagtgcagtggtgcatcacggcaggctccacctcccgggttcacgccattctcctgccccagcctcccaattagctgggactacaggtgcgtgccaccacccccggctaatttttttgtatttttmgtagagatggggttccaccgtgttagccaggatggtctcgatctcctgacctcgtgatccacccgccccggcctcccaaagtgctgggattacaggtgtgagccactgcgtctggctgaaatgatcatatttttaatatgtttgattaaataagatacattaatatatatttttaactttttcaatgtggctactataatatttaaaatcacatattgttaacaaagtaataaaagaatggaaaataagaggctaacagaagagaaatggaatattaatacttgattaatccaaaataaggcaggaaaggagagaaaaggaacaaagaactaagggtacagtaatagatgtaaacccaaatatgtaaaaatcacattataggtaaataggctgcatattccagttaaaagacaaagattttcagattaaaaacaatagacccaaccataattttgttcaaaagacccactttaaatagaaagactggaagtaaaagagttggaaaagatgtactatgcgagcactaaccaaaggactgctggaagagctatactaatttcaaagcgtcatttctcagaaagaaatattactagagatagagattgtccgtaatgataaaggattaaaacaattacaatagccaaggcacccttagaaaacaatgtgggaagacttcacgctgcccagtaagactttagaggcacgtagagcacatcataaattcatatgtatctagtaacgcagccccagagaatataaagggaaactgatagaactaaaaggcgaaataggcatatttggaaattttaacacattcctctcattaacgaatagaaaaagcaaatgaaatttagtagagctacagaacatgtaagtaatgctattaactactttgtcctgactgatccataaaacactgcaccagacaacagcaaattgcacattccctttgtgtgtgtgtgtgtgtgtgtgtgtgtgtgtgtgtgtgtgtgtgtgatggagtccctctctgtcacccagactggagggtagtggcgtgatctcgactcaccacaacctctgcctcccggattcaagcgattctcctgcctcagcctcccgagtagctgggattacaggcatgtgccaccatgcttggctaattttgtattttcagtagagacggggtttctccatgctggtcgggctggtctcaaactcccgacctcaggtgatccacccgcctcggcctcccaaagtgctgggattacaggtgtgggccaccgcgcctggcctgcacattccttttaattggccacagtatattcatcagaattggccacatgcactctcaaaaaatttcaatgaattaaaatccttcagagtaagttctcaaagtggagggaaaaatgtgatctaatcaaagtgatgaacaaaagcatttgataaaattcaacacctgtttattagtttccaaaaaaacccccacagaacaaatttctaacaaactgggaataaagggacttttaaaaagatgataaagggtatctacacaaaataatatttatagtggacattaagcctaatggtgacttattgaaagctttcttccagagatgaggaaagagacaagaccctgctctcatcacttctattcagtgttgtatgtaaagctctactgggagactgaggcaggaggatctcttgaggccaagagttcaagactcacctgggcaacatagttagatgcccatctctacaaaaaattaaaaaataaagttctagtcagggcagaaaggcagaaagagagataagaagtataatacttggaaagaaagaaataaaattctatttgcagacatgattatgatgtaggaaatactaacaaagatgcatgtaaaatatgagaattaatagcaagtgaaaaaaatttcaggatctaatttttattagcatttaaaaaataaagtacagtggccaggcacagtggctcacgcctgtaatcccagcactttgggaggccgaggcgggcggatcacaagatcaggagtttgagaccagcctggccaacatagtgaaaccctgtctctactaaaaatacaaaaattagccaggtgtggtggcatgtgcctgtagtcccagctacttgggaggctgaggcagaagaattgcttgaacccaggaggcggacgttgcagtgagctgagactgcaccgttgtacyccaaaatgggcgacagagcaagactctgtgtcaaaaataaataaataaataaataaaaattatagccaggctttgctgtgcctgcagcagattagacacagaatgcctcattttaaaagctcataataccaagtgttggcaaggaagcagagaaacaagaacacttgcaccctgctgatagggctctaaactgttctcgccagtttggaaaacattggcactatctgctgaagttgaatagtctccttaagagtcaaaagctggaaacaacccaaataatcatcaagacatgaatggacaaatgaattgtgatatataaggtatacaaaacaagcaaaaaaaaagaacaaactgttgcaacatgcagcagcgtggatgaatctcacacgcataatattgagcagaagcagccagatgcacgggagtctgaactatgattccatttaaatgaagccaaaacagtggtgggaattaatctattataatatgtcagaagagtggttatctttaggggaattgagggaggctttctgggattctgattacattctgtatcttgatttgggggaggtggctacatggtgtattcactttgtgaaaatgcttttagctgtacttatcatttgggtacttcatgtatattatacttcagcaaaaattaataaaaaatatttttggtattttcaggaatgttgttgccccaattatctgtggttctgaggtttttatgtcacatgtttctgatattttactcttcttcatttattccagatgatttattaagatccattagattcattttcttttctatataaaacaaattatttatagtatagtgtattcgttttctgttactattgaaattactacaaatgtagtggctaaaacaacacatagttttcagcttagagttgtgttggttagaagtccagcatggctcttactggactaaaatcaaggtgtcagcagagctgtgttcttttctcaaggctttaggggagaatctgtttccttgccttttccagcttatagaggcagccatgttttttggcttgtggccccttcctccatcttcaaagccaacagctggtcaagttgtcacattgcgtcactctgaccataggttatctgcttttaaggycttgtgtgatttgattgggtccacctggaccattcaggatcatcttcctgtccttaaaattcttaatcacatctgcaaactctcttgccatgtaagtgaacatgttcagaggttccagagagtaagacatcaatagcttatggggctaccacagataccttatacaattatctcctgaaagttgagtttctaggatttagttgtgttatttttttttataacttgcataccatacaactcaccaagttggacagttcagtggtttttaatgtatgcacagagttgtgtaaccatcatcacaataaattttaggatattctcaccacctcacagccctaggcagccaccatgggtttgcctgtcccagacatttcatgtaacaggaatcatttgtggtcttttgtcactggcatctttcaggtatcattttttttaggttcttccatgaggcatgtgttagtacttcacacctttctatggctgaatgattttttttttttgagacagagtttctctcttgtcacccaggctggagtgcaatggcgcgatctcagctcactgtaacctccgcctcccgggttcaagcgattctcaggcctcagcctcccaagtagctgggattacagacatgcaccaccacacccagttaatttttgtatttttttttttagtagagacagggtttcaccatattggccaggctggtctcgatctcctgtccttgcgatccgcccgcctccacctcccaaagtgctgggattacaggtgtgcaccctgataagtgacaagtgctgattaatttgcatttctctcattatgagttaggttgatcatcattttctgtatttgtgtgtgtgtgtgtgtaaattgattgtgtgattcattcattttgctcattcttctgtctttttttggtctttttcccttcaattttaaaccattttggatgtattagggaccttaagcatttacttgtgagatattgcaaatatactttcccagttttttatgtttttaaattctatttatgatggttttctcgtcatgcaataacattttcactttttttaattaaaaggattttttatttttaagattttaatttttatgtagtcacatcgatcaagtctttgttttacaatttcagatttaaaatcgtagttagaaaaccctggactttatatttgatatggtgtgaaataggtctcagcatttatctttgccccctttgtgtatacacttgacctagcactatttgctggaagactcttgttttctgcattgctgctttggttataaaacatgtgtctataaatatgcagcttcttcagagactgttttactagtttattcttgtgccagtgctgtattgtcttaattattataagtgcaaagtttgtgatttggtgcccttgtgtatatttaactttgtcattacccaaaggcaaattgtaaccagagaagtgtgatgagtaatccacgttgacatgacaatggagggtggttttcaatgtaattattatcaaatgaaagaatatttaacttacggaggaagaaagattagttcaaagacaattttacttttattagcaggatataaaagaagattgaaaatataagaatatgttgagtttatttactggctaataraggagggacaaattggcaggaaagtggtatgactttcattgtgtgactttttggcatcatagttgatggccagtttttgtgaacagaaacaagtcttaaagaatatgaacaggccaggcgtggtagctcacacctgtaatcccagcagtttgggaggccgaagcaggcggatcgcttgaggccaggagtttgagaccagcctggccaacatggcgataccctatctctactaaaaatacaaaagttagctgggcgtggtggcacacgcctgtagtccagctactcaggaggttgagtcagaagaatcgcttgaacccaggagggggagattgtggtgagccaagatcatgccactgcactccagcctcagtgatagagtgagactttgtctcaaaaaaaaaaaaaaaaagaaagaaagaaaaagaaaaaaggctaagcgcagtggctcatgcctgtaatcccaagcactttgggaggccaaggtgggtgggtcacctgaggtcaggagtttgagaccagactgaccaacatggtgaaaccccatctctactaaaaatacaaaatttagctgggcgtggtggcgcacgcctgtaatcccagctactcaggaggctgaggcaggaaaatagcttgaacctgggaggtggaggttgcagtgagccgagattgtgccactgcacttcagcctgggcgacaagagcgaaactctgtctcaaaaaaaaaaaaagaatatgaacagtccttgaaattaatgaaattagtgcagtgtctctctctctttttatgtattctagatttcataatgtgacagccctaaatcataaatcaccagagttaaattctgtttaattcattgaaaatattgatccctttttctgcctcttttttttgggggggcaggtggggacagggtctcactctgttgcctaggctggagtacagtggcgtgatcacggctcagtgcagctttgacctccttggctcatgcgatcctctcatttcaaccttcccaatagctgggactacagacatgtgccactttrcccagttaaatttttaaattttttgtacagacagattctccttatgttgcccatgatggtgttgaactgggctcaagtgatgcacctcggcctcccaaaatgctaagattacaggcatgagccactgtgcccagccttttctgcctgttcttaacctaatggtactgtattagaactttcataattgaataacagaaatacactccacatggagtcactgacatttagaactggaagagactttagagattagttacttataaactactttgatttgtacaaataaattcagtacaattatctgagagagggcatggttccagataggagatagtgtaaatcggttggctaactcatgccaaagagacaaaacttttgggttcttttgataaaaagtagtttttattttttttccccacagatctttaactcctctgtgttcccttcatttctagaggaagtgaaaacatttcttcactactttttagaataataaatttacagccaatttattatccatagtgttttttaaagctcatattttaaacattgtctttataaaatataaatattgcaaatggtctttatcaagtaatatgatcatttagacagcataacccttgctcaaactgtaaagtctctagttttttattaatatattatgcatgttttagaaaatacctcctttcaatggtgactaaaatttgactactacagaattataaagtaaaaaacataaatttcagaaaaaattctttttttctttttttttttttgtgacagagtctcactctgtcacccaggctggagtgcagtggcgtgatcttggctcactgcaagctccacctcccgggttcatgccattctcctgcctcagcctccctaagagctgggactacaggcacccgccaccacgcccaactaattttttgtatttttagtagagacagggtttcaccatgttagccaggattgtctcgatctccagacctcatgatccacccacctcggcctcccaaactgctgggattacaagtgtgagccaccgcgcccggcccagaataaattcctttagatactggcctcatcatggaatcactttagagcaatgaggattatttgactctcaatgatatttctttctggaaattgcaagatgacacttcctgtggcattataggattttcccaagatatcatgtgctatcccccatcatctgaatctggcatatgtggacacatctcaggcttccataaagtctttgattacatatatgattttattgttttaaaaagaagtacatgatttggccaggcacagtggctcacgcctgtaatcccagcactttgggaggccgaggtggctggatcacaaggtcaggagtttgagaccagcctggccaatatggtgaaaccccgtctccactaaaaaaaaatacaaaaattagctgggtgtggtgatgcatgtctgtagtcccagctacttgggaggctgaggcagaagaatcgcatgaactggggaggcggaggttgcagtgagccgagattgtgccactgcactccagcctgggcaacagagccagactctatatcaaaaaaaaaaaaaaaaaagaagtacgtgattgtttataaacctgtaaagttctatttctgtagcgcagtatggtgtgctgcttactacccgtcagaaagttttggtaatagggctcttgaactcagtataaaagtcatgagctttgttgagtctcaaaatatctaatcttgcttgatctactaaattcgttttcattttctgttgcttctagaccaagagcagtgatgaccttttagctggaatggccagaggggtaacggtgactaatggtgttaaagggaaggaaagctcctgcccatctgcagcaccttcggcatctgcccctgccatgaccactgtggagaacaaatccaagattagcacaggtatgggtgacattcagtctgagacttcaactgcttttttgtttgaataggcaggatgcattggtgtttacagtgttccatctcattataggaaattgtagacatacaaaagtagatggattgatatttcagcccaatacgctcatcacgctcatcaccattatcagctcacagccagttgtaactctgtgatacccaccctcccctcttattattttgaagcagattctggacatcatatcatttcatccataaatattttattatcttggaaagagaaggattcttttaaaaatataatcctaataccattatcagtccttaaaataattgataatcattccttaaatcataccttattcaatgagtatttaaatttctaacagtcttataaatatttttgttttatttactatctatttttatgtttggatcaggactcccataggtccatatataattggctgatgtgtctcttaaatcttcttttttaaatctatgggtttaacccaattcttgcagtttaatttttgtggaagctggtcacgtgacctatagagtttctgagcatgtggatttttatatcacaatatccccatgacgtttttgcccatcaccctttgttgtgtgtatttattgtaaatggcattggagacttatgggacagattcaggtcccctgtccccccaatttgaaaaaaaaaaaaaaaaacaaccaaaacaccatgttgaccaggctgatgtcgaacttctgacctcaggtgatccgcctgccttggcctcccaaagtgctgggattacaggcatgagccaccgcatcatttaaatgtactgaaagtccaggcatggtggttcagagctataaccctagtactttgagaggatgaggcaggcagatcacctgaggtcaggagttcaagaccagcctggccaacatggcaaaatcttgtctctacaaaaaaaaaaaaaaaaaaaaaattagccctgcgtggcggcgcacggctctagtcccagttacttgggaggttggggcatgagaatcctttgaaccccggaggcagaggctgcatgcagtgagttgagatggcaccactgcactccagcctgggcgacagagcaagaccctgtctctaaataagtaaatgttgccggtaatcctagcactttgggaggctgaggcgggtggatcacctgaagtcaggagttcgagaccagcctgactactatggtgaaaccccgtctctactaaaaatacaaaaattagctgggcattatggcatgtgtctgtagtcccagctactcaggaggctgagacaggagaatcgcttgaacccaggacgtggagggtgcagtgagccgagattgagccactgcacttcagcctgggtgacagagtgagactccatctcaaaaaaaattaaataaaataaaaaataaaaataacagctccctaacagctccggaaagataaacagaaaacagaaaatgacatgctcagcccttgaggccaaaatgcccttccccagagcagctgccagaagacagggagcaggatcgggttggaggtcacttctgggtgagggggagaatggtcagacccgtggcaggggtgttggagcctggtcggcctcactggaacagaagagagctgcttcatgatgctcaactgacaggcagagcctcgcataacccaagttctcatggttcagagaggccagccagtgcggggacaaagacaggcacgcactgaaatggtttcctggaagacggcccggttgcatctctcaaacgggaccagattggaagggagaccagctgctttgggcaaccgaggctgcttctgggtgaactcccaaactagatggtgccgagagccctggacctggcagctgggctggacatcacatggctctgtattccaggaaacggcatctcagtgcttgtctggccagttctccaaaagaaccatccacaggccatttttccattcccttcctatgcacagactgggctgggcctgatcagaaaactctcccttagggttttcagtcactggcgaaacttgagcccggcactgaggataggatgttaaaatgtgactctgggccaggcggcggctcatgcttgtcaacccagtgcttttgggaggctgagctgggagggtcacttgaggtcagcagttcaagaccaacctgaggaaaatagatctctacaaaaaaataaaaataaaaattagccagctctggtgacatgcacctgtagtcccagctacttgaaaggctgaggtggcttgagcccatgagttcaaagctacagctatgatggtgtcactgcactccagcatgaaaaacagagtgagaccatgtcttgaaaaaaggaacaaactaggcatagaagaaacatacctgaaaatggccaggcccagtggctcatgcgtgtaatcccagcactttgggaggctgaggtgagtggatcacctgaggtcaggagttcgagaccggcctggccaacatggtgaaaccccatctctaccaaaagtacaaaaattagccgggcgtggtggcgggcgcctcccagctactccggaggctgaggcaggagaatcacttgaacctgggaggcagagtttgctgtgagctgagattgcaccattgcactacagcctgggtgacaagagccagaatccatctcaaaaaaaaaaacctagaaataataaaagctgtatacgacaaagccatagctaacctactacagaatggggaaaagtgaaaagcgtttcctctgtaaacaggaacaagacgaggatgcccgttctcaccacttttattagacatcacacaaatatgcaagagaaaaaaataaaagccacccacactggaaaagaggacatcaaattatccttgtctgatgaagatgtgatcttggatttacaaacatgtaaagcctccaccagaaaactctagacttgataaataaattaatacagtcatttgcaggatacaaaatcaacatacaaaaatcagcagcattttatacaccaataatggtctaggaaagaaattaaggaggcaatcccatttacaatagcaacaaaatgaaaaatgatatgccacagaggaaattttaccaaggaggtgaacgatttctacaaggaaaactacaaaacactgatgacaaagtttaagaggacggaaagaaatggacagtcatttcatgctcatggaaggaattcatagcattaaaatgaccacactgcccagagcagtctagagattcaatacaacccctaccaaaataccagtgtcatctctcacagaactggaaaatcgtaaaactcatatgaaaccaaaaaagagctcaaagagccaaagtcatcctcagcaaaaacaacaaaactagaagcaccccatttcactgcaaattagaatgacaaaatttttgacaagtgcatggtaaccaaaacagcatggtcctagcataaaactagacacatagatcaatgggacggatgacagagcccagaaagacagccacatagtcttggggcttgtgtctctcctgctgtgcatccatgctgggtgctttacatacaacaggcagacaagaagtccctgttgcaagtgaggacaaagtgtgggaaggccgtgagggtctgcagtcccagatggccttggcctcaccccgcagtgcgcttttgcaccagagtgccaccttcttctccaggtccaggtcttcagcagtgaccccagaccccagctgtaagggaggtggcagcatcagaggctccccttgcctgagtggcagcagaggaaacttgcatctatggggcctagaggcctgggatgtgggggagccattcctgggggcaagtgtctgccctggtgctgcatctgctgccttttcacactgggtgagaccmcaagagacagcctgaggccrgtcctcactcactgtctttgaggacctgaggggcagctgacagtgggatgaggctggccccctcctctttggtgacaggaagcctcccatggaactgtaggagctcacgatggcattttgtttggtgcacgaactcatccaggaggtctgggatctctggttttatcygacttctgacctctgggcatggaggtctctctgcagaggcccaggcctgggcacgaagggagagaggcctccattgtcccrcaggggcckaaatgcagackgtgcatcccyggtgccctsrggaaccsttctctgatcatcaggattctcttggactctggggtccttgtcctgctcaggcatccctgcccccctcttcaggagggccctcaacacgatcttctctggacaggagtctggggcacaactggatgttgtgggccccaaaggggtgactccctgctcctgggccccacagagagtccttgtgctcagtgcactggctgagctgcaagacatcctggaattgggagcacacagcaccggcttgctgtggtacctgtgcattcaaattgaaggcaggatcgccagcaaggaacacagggcttgcaggatcacagaaaacccttggagttgttttgacacaccactgatgccaagtgtctgggtacttgtaggatggccctgccattccatccaggggcagtggcaacagggagattccacaaacaaagtgaactgggggatgggatgagcaggctccaggcaactgagccctactggcaggcccttggcccccggggccgggacaggggtgacagacacagagtgcccaggtaaccactcctgggagcagtggggaaccgtcggatgcttcaactcttgagagctgggctctaagcatccgccttagctgccaacttggccaaaggctatgcgagcagtttcccgttgacgggcaatgcatctttccaacytgagcgagtgggtgtgtgtgcaaagatggtgcgagtcacggatctgcgcaggaagggtgactttaagggattagcatggccaggtatgcacacaaggcacctgctggcaatgccttggtggggagcgggcagtgcacacaagaggtactggagggagaggcgcgcgggaagaacaggcgcgcacaatggctgcagatccacctgtggatcgctgaagattcctgctgagggttgaggctgctgggctggaggactgtatggtccatgcattgtaatgtccccttctctccctggcccggagccccargagctatccggactctctccaagacctggttctggcccagcaaagaggtctcsgcaggggagcaggattcccggcccagcagctggctcaggaggtgacagctttgggattygcatctgagcatcctcctactcttctcctgggaactctgttggggagggttgctcagaacagaagtgcctgggacgcccagatcctgctggagtggcagctggggtgatggccagggcaggctgggagggacatactttccataggacccagtgctttcatctccgtgcaactgaccaagagaaaccaaacccaaactccttcctttacacagacctatttgagggaggctgggtattgtttgtgtatttcaacctaacaagattttgagatagttggaatgcagaaggagacaggaggactcaagtgtcctgtcttttgcaaaaatgtcaaacgtagctactcagtctcttttttgtttttttgtttgttttgaagactatggttattttgcaaaatatatattatttgagtttctctaggtgctatttttagataaattaatatacttttttcatcagcacatgaaacgttcttcaaaacagatcctttgttagtccacaaaagctgtccctacacattttaggaaatcataatcataatcattccaaagatcagacaacagaggaataaacctagaaatggacatcaaggcaaactacagaacctatacgcatacatgaaaattaaaccccaccctcctgaatgagcactgattcaatgaagaaattaaaatgaaaatccgaaaatgttttcaaacaaatgaaaatggaaacatcatataccaaaagcctttggattcagcaaaatcagtgctgtgagggaagkttgtagcaataaatacctacatccaaaaagtagaaagatgaaaaattaataaactkatgatgcaccttaaagaactagaaaagcaagaacaaagcaaaaccaaaattagcccatgaaaaaaataataaagatcagaggagaactaaataaaatagggtctcaaaaacaacacagaaatcaagaaaaggaattactggttcttagcaagaaaaacacactttgggtatttcctttttttttttttttttttttttgagaaagcttttttttttgagaaagcgttttgctcttgttgcccaggctggagtgcagtggcaagatctccactcaatgcaagctccaccttccaggttcaagtgattctccttcctcagtctcctgagtagctgggttacaggtgctaaccaccatgcccagctaatttttgtatttttagtagagacggggtttcaccatgttggtcaggctagtctcaaactcctgacctcgtgatctgcccgtgtcgtctcccaaagtgctgggattataggtgtgagccaccgtgcctggcctcaaaatattcttttgagggactcttgcatacaagccccaagaggcaggtgcaaaaatgtccatagaaacacagtaatagaaaaaaagaaaatccagactgattcaaatgtccattaacaggagaatgaataaattagttggaatcttcttttcttttcttttcttttcttttttttttttttgagacggagtttcgctcttgttgcccaggctggagtgcaatggcacaatctcagtttgtggcaacctccgcctccggggttcaagccattctcctgcctcagcttcctgagcagcagggattacaggcatgcgccaccacacctggctaattttgtatttttagtagagacggggtttctccgtgtttgtcaggctggtctcaaactccggacctcaggtgatccgcccgcctcggcctcccaaagtgctgggattacaggcgtgagccaccactcctggccattagttggagtcttcttatacagtggtgagactgaatcagccacagttgcacaacagaatggatgaagcttagaagtaatgttgggtttaaatggccagtcccaggctgttacatttaccatttgcaataacaataggaactaaggtaactgaagaatctaacaaaaactatgcaagacctgtatagaaaaattataaaacttgattgaaagacatttaaaaaatctaaataagagagataatacataatctactctttgtggattgggagattcagtattataaagttgtcgattctccccaaattgttctacagatttaatgcaaatccagtaaaaaattcaacaagaggctgggcgcggtggctcaagcctgtaatcccagcactttgggaggctgaggcaggcagatcacaaggtcaggagatcgagaccatcctggctaacatggtgaaatcccgtctctactaaaaaaaaaaaaaaaaaaaaaaatgagccaggcgtggtggcgggtgcctgtagtcccagctactcaggaggctgaggcagggaatggtgtcaacccaggaggcagagcttgcagtgagccgagatcgagacactgcactccagcctgggcgacagagcgagactctgtctcaaaaaaaaaaaaaaattcagcaaggggtgtgtgtgtgtgcctgtgtgtgtgtgtgtgtgtgtgtgtatgcaagccatagacagaatactttttttttctttttgagacagagtctcactctgtcgcccaggctggagtgcagtggctcgatcttggctcactgcaacctccgcctcccaggttcaagtgattctcctgtccctgcctcctgtgtagctgggattacaggtgtgcaccaccacatctggctaatttttgtatttttagtagacacagggtctcaccatgttggccaggctagtctccaactcctggccgcaagtaatctgcccacttcagcctcccaaagtgttgggattataggcgtgagccaccgagcccagctagtacacagaataccattttttacttaagtatattaatctagaagagttttttttaaaatacagtataccatttttatctataacacttaaagacaatcaaagccaaattatgctgtttcaagataccatatacttagaaaaacatctataaaaagcaagagaaacatacaaatcaggcccatctggagagaagggagtgaagcattgcgctgatacggggataaatatgctggttgggtagacaggcagtccttatgcttttggctgacgtagatgttacgtactatttcatgtgttatcacactctccagtaaacacgtaacataagagaataattaaccactatcaagcgttctcatcttgagacaggaagatgtagaggaaagaccttgatgtgtgtgtcagttacaaggatgtacaccagtgactgacatgacttggtgcaaatcttgggtagagacctatacttaagctcctcacccccacctgccgaggcgtaagggctcagagggggttccatggggtgggcgggagtggtaagggtcgaggtgcagccacagcctggctctgtgcacaccccctccctccccctggtcccatgtgcacaccctctccctgccccctgccccttgtgcacaccctctgtaccccccttcccgccccagcctgtgtttgcagtgctacagggtggctgcagcctttgcctcccacagctcctcaaggtcagagggctgggaacccctgggatgtggctgggatgaggaccctgcccctcctcaggcatttccaggcaaggggcacagagacacagccagcccagcagctgagcccctcctatcaggccaggtgggaaactgaagcatgaacacaaccccagactggaaataaaaagccgtcatgtactgtgtgcctactgaatgccaagccctatgccctattctttaatgtcatctttaatgagatgtcttcactcagttcaccacatgatagtagacaggtatttatgatgcgcctactgcatgctgggcacttttctgggccatgaggactcagggaggtccctgctctggtagaagtcaaacccgacaggagacagagactagggccccacacaccaggaggaagaacccagtgcagagagtgccagcaggaagccacaggggcagggaaggcgctcctgggagggtgggtggctgcgtcctgaggctgagcagggggagccggcctagggacaggatgtgcgcaggcgtggagcaggaagttcctggaatgatgggcaagagggagcaggtcactgggggcaggtctaaatactgggggctgcattgggatagcagaggcctcggacaggcccgctcagcatgtagactcccctccctggccccttccctaggatgacagtggaggtccatccccaggtggtggtgaggacactcctgacacagagaccccagcccagctggcaggggaaggggagccctcaaggacccctgtaggttggggcatgtcccgccaggcggccctccatggtgcccagcagcagccctgcttgcggaccctctttagtccccactgttaaaaaaataattcagtgaaaattgacactagctgggcatggtggtaggtgcctataatcccagctactcgggaggctgagacgggagaatcgcttgaaccagggagtcggaggttgcagtgagccgagatggcgccactgcattccagcctggtgacagagtgagactccgtctcaaaaaaaaaaaaaaaaagaaaaaaaggaaaaatgacacttgccaaagcgctgtagggaagactgtccaggaccgtgtcactaggcataagggaccacggcgatgagattctgcagtgggtaagagactgggctcagcctcgaagacagcatgggcaagtgggatcggaccgtcaaggagcagggggaagactatccaggaccgtgtcactaggcataagggaccatggcgatgagattctgcagtgggtaagagactgggctcagcctcgaagacagcatgggcaagtgcgatcggacagtcaaggagcagggtggggggcagcgcatggaaagtgactaagaggaagcatcagcagccagggattctggcttaactcccctaacagaattcttgctgaaggccggccaggatggccagaccgcacctgggggacagagggggaacccgatcagatgtcaaggacggggggcttctcgctaaactgactttgcaggattcttgctaaaactagagtttataaggaagtgctcagatgtgcctaggagaaggctcaggagcctaaataaagcttgaccaagcagagaatctttgtcaccagctgtggtgagagtgaggcccagagtgggtcagggcttacctgctcaggttgtgcaattgggaggggtccatcaggagcccggagtcttcccactgggggctgagtctgggccctcagggcacatataggtagatgctgtcagacccgacaccccatgcagtgcagactgggatgctggtgcctgtggcacagactggtcagacccaccccaggctagacattccttgcagggagagctgaggctgctgacrccaggaacagacaaacaaggtcatcaccaggtaatgagcttgttacccacatcaggcaaggccattgctgggtaatgagttggcctcctgcagagccacctgcsctgggayggttcccagagatctggctagccagtgccacaggaggccggggcacagttccagggcctagtgggcaaggcaggggtattcagggacaaggtgcacctgagtccccacaggaagccccagaccctgcagtaagacctggaacaagtcattctcctctctaagctctcaaagaagaggtcagctcaggggtctgggaggcaaggtctcctagagtagactaagctggccgctgccatgctaacacacaccctcccagccagccgctggtcctgacagatgaggaaactgaggctaggtgttttcatgaggcctctgaacccagaacccagtacccagtgtcctgagcaaagcccaagccagacctgccagcttatgtgtacagaggccccactatgcagcctgcactcctggggcctaaaaggaccatcacctccccttctaagaggctgggcacaggggctgggtcccagccaggccacccttcctcctcctccaaaggcccagcagcagctgctcccagagcaagcagcacagtcgcagcaaaggctggacaagtgtcctgtgctctgtggtctgagcagagggccaggggccgtgacccacatggcccctccaggagcagctccaagatgagccttcctgtccccaccagtgtgtccgggacctcagggtggatcagccgcacctgccggctgctcctgttccttgctcttcctggggctccccaccacctttgggaggcagctccaagaccctgctgcctcccttgcttaccctcaggcccctgctgggtgtgccccctccccacacagacccctgagccagcttcgaggactctgcctgcatctccacgtccactctgatgactgtgaagctacagtcacactctccgcctccacccccgccctgccgggtccctgcagcagctctcagaggcccccacagcccctcccacacacagagctcgcctggccctgccgtctgagcgctcccctggctcccaaccgcccttgggctctgggacataaaacctccagccaaggtggctgccaagttttatttaatagccatagagcacaaaagggatgacaattaagtcacacggagagactgccccatcgggacccctggccaagctaagcagaggagccctggggtttcctctgaccccccactgtgaatgcattactgacgggcaaggtggccagttgcccacccagcctgcacgtctgcatgcacagagctacagcctgggcccagggacagccccgggagccggtggcttcccacaggcacagccagcctccccacccccaccatgcctggcccccggcccagggcacactgaggggaacaggaggggaaggagcaggccctgcactggagcctcagtcagctcctctgtgccaggggcagctggagctggctgaatttgaggaacttcccggaggaactggagagcagacctgtgtgcgcgccccgctctgccacgctccctgagggacacactgctttgaccagcccccaccccatctcctctccgccagtccccggtgtccaccccagccccgctaccgatgaagctcaagccagggtccccatcacctgcttcacggccatccctgcacttgagctcaggggctcagggttgtgctgacacgcctgcctgtccacccctcaccracacctctgcagtcctcytcagggcccaacaggryccccaggacyccgctcccattctgcccttgctcctgccaacctgtcttctctatgcccatgactttggaaccctctgccacaagtgccagcccccacatctgtagcccctgcaggaacaagccctaatctggactcattgcaatggctcagcttctcttccaacctgtccataaacctccaggcagagatcacaaaactaacagctctttctgcaaatctggactctctcctrcaccttcktcaccgtccaggcctccctgtcatccgtcctggggacctcagagatctcttcatttcacaggtgaagacttggctcagagagggcagagcccctgggtcacacagcccgtctccagtagggctggggaaaagaacccagggckctcttgttggcagtgttttaatgactggggggagggagagaatggctaatgaggctctagggatcagcacagccagctgctggaggtcccagaggacgggtgastcagcaggaatgggggagtctgaggggttgacagagtgcccaattctcacctcctcctgcaccttccagrgagacgggctgcagggagtgattgagtggatgaacatgactagagggacccagtcttctcctcagcagctgcttgaggacagtattagcggtcccctcaatcccccccccaacacatgcacacatgcactgayctgcaggggccagatcccggtggacccggggacacagcttccaggggctgtcttgccatgtcccttcccagayctgcctggattcatgccaggccamcctccacaatttgctgagggaggccccagrgtccagggcacccagagtgctaactagcccctgggggtacagggagaacagcatgctgtgtgggggatactactctctgcccatacctagggccctgtggcggccacaggcagcactgcttatgcagaggcactggggtgagaaggagtagggtgcagtagtgagggctccacagagggtggaagggctgcaggggaaggcagaccagcagggatgccatgagggcctcagatgccaggctgcagaggtggasgggctggccagctcctctccccagcctcctactgtaaaatgggagaggatcccagccctgctgattcatccactcactccatggcaagacagccactgacagctstgtcctggggcccacccgggcctggcctctgtgcaggctagcactcagyatgcttagtgccacactcggcccaggagaaatgacccagccctgggctcagagaccccacagtgggtggatggaaaacagagtcatttaaatacaactgtgaagggtgctgtggaggaggggctcgaggtccccagtgtgggatggggtggtcatggaacgtttccctatctaagtgggaaaagtgagagccaccaggaaaatggcgggggtggggggggagaggaactgtgcaaagacccagaaggatgaagaagactgttggattagaggaggttaaagacacagacaggcttggacatggtggctcatgcctgtaatcccagcactttgggaggccaagacaggaggatcacttgaggccaggagttcaagaccaacctgggaaacacagtgagaccctatctctacaaaaaaaaaaaaaattaaaaaaaattagccgggcatggtggtgcacagttgtagtcccatctactcaggagactgaggtgggaggatcgcttgagcccaggaggtggaggctgcagtgagctatgattgcaccactgcactccagcctgggcaacacagcaagatcctgtttgtaaaaacaaaacaaaacaaaacaaaaaacccagcttgagatggccagggatttccagaggccctaggcagaccgccttggagagtaagggagaccctgaagagctcgcatggaagggccagcagcttggggctggagatgccacctggatggattcctccagctgtgtggactaggggacagggtgaggagataatggcctggactacatggaaggacgtcgccctgagccattgaaaagggctgtggggtccatgaccactcctggcyttcccttkactatgatggagacagtagcttcyagtgtaaaatgtgagctcagttcctgactcgtgtctagcgggtggtgcctggtctttggctggcgatgctccatktcacctatgcccagaaactgggccatgccctttgtgaggacctgcccacaacgtcgtygttcccgcagggtcccckgggaaccgggctgcccgagacccggccctgccggggttccctgcgscccagaccggaacccycagggctttggtcgttcccacagccgtcccgcgggccccctccacggtgcgtcgcctgggccccagcggtcgctaggctgcagcctggggctcccggccatcccgggcgctggcggcggtggaggcagcagggcggatggcsacgyccggccgcccgtgggcccaggcgcgtagtgcgtacagagccagcgaggtgctgcggcgcgtcacgggccgccggcgggacccggggccgcaatccaatgggccgggccrggaagacgcccgagccccgggccggctggctcgcctgctcsgccagctccgggccgaagcggcttcgcggtccgaggtgccgcggctgctgaagctggtggagcgtgcgggggccggggcggcgggcgcgggcgagaggaccggcgcgcacagccgcggctccgtgtgctcagtatgcggggagccccgcggcagggccacctacccggcgggggtcctggaggtcagcgagcggcggctgcaggagggactcgcggcagtgcgcgaggagctgggcgccgagattgaggcgctgcgcgcggagcttcgagcggagctggacgctctgcgcgcgctgctgccgccgccgccgccgtccccgcctgcccgccgcgagccccgcgccgtcccccgcgccrcgccccgcggcccgaccctgctgcggacgctcggcaccgtgagcgccctggtcgccgcctccaggcccgcagacracgccccggacggcccagcagaatgcggagcgcaccgagccccggycaggaagaaccacaagaagatgccagtgccgcctggggccccgcaaggtggcggggactgagggcggccgcacaagggcagcctaggcgaggtgcggaaggcgtcgcgctggctactctggtacccccaggacggggcaagtgagcagatcggtccccctcgtgkagcgtggctctgagtcaraagggtgcccgggtgccgccagttagggctccggtactggagggagggggtgggcgcgggacgggcggagggtgggccacgtgcgtctggggagtgcggmtgggagccggggtccttgcgagagactgagtccggctagagaacagggtggagcccctttggaccttagagctgggcctttgggccttgggtctgggtcagcctttgggccagggctgggtcagcctccaggggaacagccgagactcctcttccttggggtgactgcabgttctttttctttcaaggtctcagtgacgaggcagggtctccacgcactggaatagtgtcaaaccacacacaagagcacagaacccagggacacagggcggctgagacactcagctggtgatggycctcaggayggtgtcaaccagtatgtaatcacattccacasggcaccaaytggacagmggcctccggtcagcctcactctgactgsaaccccctctcactggacagcatcacctggacacagagcctcacctagtctgtgtcccgtggacacaactttgctttggacagtgacaccaagaatactcacccctttacttagccagaccacaggcagccaccgggacacaaacatctctccagagtcascctccacacagactccacagcagaactcccagggaggcactggggcatggcttcagagcaccaggcagcsctccgcggtgcccagcacccgctcagccagggcagcctgcagcggagcctggagccagcagcttctcatctcttggcctcgggaaatgtagctggagtcatcatttagcagagcacggtgtccctgggttggccacccagcttagttttaaaataaaataatgtaatcttggcctaatggtggaatttctgactgctagatgttctccttccatctgaccaggggattcagacacaatgtataggatgagggtgggggcccttctccctctgagaggaacctggagaggcccgggttctgctgaggtaggagagggtcactcagagggctcccacggaacagacaggcacactgaggcctcagtgggattagggcaggaaatgcccctcttgcaatgggggaccacgccgggtcacgcacccaccccctccaggctacattaggctaaggtcactctgtgcattatttcattatttcacatggagggtcgcccacggttgacagaaccacaggctgagccccaggcccatcagagcgcagtgcacaactgctagggtgggggaagagcagggggctgctgcggggaccgaggctctcggagaggccaagactgcgtgccccttaagaggctgctgtgggccgggcacggtggctcaagcctgtaatcccagcactttgggagtccgaggcaggcggatcaggaggtcaggagatcgagaccatcctggccaacacggtgaaaccccgtctctactaaaaatacaaaaaattagccgggcctggtggcgggcacctgtagtcccagctattcaggaggctgcggcaggagaatggcatgaacctgggaggcagagcttgcagtgagctgagattccaccactgcactccagcctgggcgacagagtgagcctccgtctcaaaaaaaaaaaaaaaaaaaagaggctgctgggggcggaagttacccgtgagcggtatggggtgaaagtgggagggtccagcctggggcagggtgtagaacagggtcatctgagggtgcagggcaaagagatcaaaacggggtgggagaggggcagcgcctgcgggaggagccaggcaaggcccggggaggggtgtggggggcgaggggggacggtggctccacctgcacccaccggatgggtatggggtcctcgaagacggtccagagcaccgtgggctcgcagtcaggcggggtcagcgacccagcgaagcgacagtagctcgaggtgttgggccgcatcgacgccagcgggaaggtggacatcagattcactgagagccccgggcggcagagggagggggattggaaccagcctccctgtgccctgctggtgccatccccagcaaaccccccgcccctgagccggaaaacgacccggtggctcctcacctggctcaggcaccttcctcaagcccgacactatggcgcagaagttggtgttgctacagtcctgctcctgggaggggctccaagtgcgaggggttctgagtgagggagtctctgaagagggaactcagctggggtactctaagcaggaggctcccagtggcaggaggcatctggcatctgggaaatggggtggagggttctcgccgccactggccctgccgattcaggcattcccaccgccccatcctcccacagatcctatagaccctagagatccccccacggactccacaggcctggcctgtccacttccaggatccccatggaccccttttttggaaacatacatagaatcacagccctgccttcaccgccagcagcacctccagcagcagggcctgcactcgagcccatcaccgtggcgtggtgcctcctccatgctctggtactttgtgttactgtggaccacgtgcatctggggggaggcacagatgtgggagatacccagctgccctcaccttgctctctctcacctccgtgggagcactccggccaccccaccttgttcccgagtctacctccatagcctggcgctgcctgtccaggctgtgctccgagtctgctcgcctcgggcccccccaccgccggcagttgaagtgcagctgcagtgcgcggtagacaggcaacagcagcccagcctcccaaatctccaggtggttctgaggatcagtgtccattcagagtagcaatgaaggggaggaggcacacgacaccctctctacctcaccacctgtccatcttgtgccattagggcacagggtatgagcagaggcccttcctcaggccaggtttctccccagtgcggccccattgcctccatggaatggaacccatggtgtccatggctcctgctggtcagcagagcagagctccacagactgcaggggaaacccttcccccccccacacccagcatggcatggaagagggcagagggcagccctcctggtgtggggctctaagcccagctgtgtgtggtcagggatcctggccctgccagagaccctgactcctggtcctcaggggccatggctggttgtgatttgtaaggtgggacctggcacctacacagagggtgcatctggactgctgtgtgaggatgctcctttcctctgaagctagcccctgtggagggtttttggccctgtaggttgtctcagctcccgtgtgtagggggtcctggtccctgtgtacacgcaggagctctcatgccctgtgtggggctcctgcctctgcctaggaggggtcctgaccacagggtgctgacttgtgtggctgtcattctccagggtccaagggcctggaggtgctgagtcatagcctcggaagatgaagggccctagggtagagttccgccggaccctgtgaaagtcaatgttgatgagggactggcctgggcccccacaggcagggggccagcttcttccagtgggtggggactgctggaacaaggactggggcctttggggtggggggggggtcagggaggcagcctgggggtgcagcagagagtggcccccatacacccagaggatagcccagcctcaggaaacctagctccctgcttcccccacacctgaacaggtcacagcaccccccttctcttgtaccctgcatctgacctatccatctagtctcccagttggctgccccatggtgagatgaaggtggaagggtctccggcacacagttgcacacccacactgggacctctatcacctgcacacacttgggctggccacagtaacgggcacaccagccttgactgactcgggaccggcaatcacagcaggcccagactcacacacagggggacagtcacgcacttgcacctgatgcccagtcagtctactggggcagacgactacagacagaaacctgcaaaggccacagagtgcagggtgcagactgtctcttggccactcttgcaccactggcacatgctctggtggtcccaggacacagactgatctgacacagcctcacatgacactctgtcctcaccatacttgaggtcctgggagtcatagcaccaggcacctatagagacagtgggcaggaggctgagctgagaggccagtcatctgggccctctccaagccccatcccatcagctggggtccaagaatgaagtaggtcaggggtttaggccaggggaggccagtgaagaaccttctctcctgtcacccctacctcagtattttctctccccagtccctccccactcccagtggcaagacctaaggggtggtggagcatggcaagagggtagattggaggccagacaggaagagtcctggtgctcactctcagagtctgcgccacaccagctgcaccgcaaggcgagcatgatgccaggggcgtgcgtggctcagtggcagccgcagctaggaaggactagaaagtggctagaccacgcagccaggatgctggcctggctactacatatttattcattagctagctgggctaggggcgtggctactgaggagaggatgggaggggtcggtgcccaggcagggccaccaggaagagcgcgagcgctccaaactcacccaggtgtgctctggtcccagggctgcactgatgccagcaacaatcgctgaggttaatcctgcaggggaggggtgacctattattatccccacttacagtccaggaaacagaggctggggaccagaatgacacaccaaagccaccagcaagaaaggtcaaatagtgagggcaccttggaccccagtgcccatgactttcggggcaaggatgggaggaaggtgtaggatgtctcttgccccactgtgggcccggaactgccaccccatcccaagaccacagcctccctcctacccaggcccccctgcggatccaggccaagacggagccctgcaggaggtcagaggaggggacttctttgcaccctgcgcctctttccaatcgccagagggcagggccctacccacattggggatgggaagacagcccctacccagaggcagggctcggggctctgtccagagtgctgacagtgacctgtgtgctcgggactcaacaccaccactccactcctgccccagcagatgggataaaaaatgaggggccacatcctcgaggctcccatccctgccaagggacttaccagttcctttcctaaccctgactcctctcgtgtccggccgcaggacgtccccccagtatacacatctggagtgcccccagagcagggcatgcaatcacacttcctgggcccactaccctctgagacctagagatggcactgctggacatgagtgaagaggccccagaggacctaggctactttgtaacattaggtggcttggactggagggaggggctgtttccagccacccggatgatgaggggagcttagaggaaatggcgctgacggccaggttccaagccctgccctaccaccccgtcccatgctagctcccagatggtgtcaagcagccttgcctttatgtggatcctgtgcacgtcagcaacacctgccaaggcagcagccgatgccccaagcagggctgggtgctgcaggatagctgtaggcagctcagggctgctgctctccctgcacactccacctaggggctccaggctcagctctgcctggtcctcagggggtttgatggacgcctgcaagggctgcaaaccctaggtgcattctgctgaaaggtgggtacccagcctcttccaccttagcctgtggcagccgtgggggccacaccaaggactaaccatgcctcttccggaacacaagtttatttggcatttggatgaaatgattctcacagcatcttaagaaaagttagtgtcaacccaaccaaaaactaaaaacccttaatgaaaacataaaaaaacaggcatcaagacaatgtacagtatcaaatcccacctccgcatggcaggtcagagggcacctgggctctgagaaaccgtggcaagctggtcctagaggaggaggacccctggagcacaaggttcagcaagggtgaccccgggacttgctggtcagactggggactgcagcaggccttgcaaagggggcattctggatggtggtgcaagaacagatgagcgagtccagctctcctcatgctcccaagggcctcctggagccacagtggcagcggtgttccaggcagccctgccatgtggaccttctgcctggcccaacgtgccagtggcctgagtgcttgtggaggcccatggggaaggggccacccagcaaccccggccagcccaaggcccaccctctgcagcctgcatggtccactttaccccgtttcctcactgccccctacgtgtctgaccggcccctaatgttcctctggtccccaaaggaagcgtcccagtcccacacatctcgtgccagccaccctgtcccgcacacacagttctgaggcctggcaggaatcctctgagctctcaggctcaggcccgtgggggactctgctgcgtggtcctcgggccctcactggccacctggcacccataatgcacatgcctgctgctctggaacctggctgccctgccccagtgcatgtgggatccacggcatgcttcctgcttcgtcctctgcagccagtaggggactcctgtggccaggacttccttgttaagtagcagcccttctccaaggggagcacaagcctgcccgcacacagcctccagcatcatgctccagcagg

SEQ ID NO: 96398 - DNA, 98158 bp, Homo sapiens
tcaagtgatctgcctgcttcggcctcccaaagtgctgggattacaggcatgagccaccgtgccctggctgcatatctgccttcttcccagactctaccaatgccttctccctctttttgtgcattctacttcttcacctcctgagggtctctctggttcttgggggacatgccagaagaggcaggtgtcaacattgcagaggcagaactgcccgggcatggagcgggccgcttcatccaggatgcacacacagggccggcactcctggtatgtttgacagagagctttggattcgacttggagacctccagcgttgctcctagggttgcagtcctgtgagcaaggtacctgcacactctgagaaatccacttctctctgaaccttcctatcctttataaagtagacacctttttacctatttgtcccccaagcactgagggtctgccctggatgccgaggtacactgatgagctagaccacccatgccgtcctggagcccagaggcgagggaggctcaatcacaccaagtgtgtgtgcgcgatggtggctgtgccacgcatcagaaccatggtgctgtgaggacagggaactggggattggactttgggaagctggggaaggctgaggtctgaggaactagccaggtggagagggatgaggatagctattacatgtgacggtttgaagggatgtggcttggcaggagcacggacaggccatggagggccctgttgaggtcctggtcctagcacctttgagaatccttgaaggggtctgagccagggctgagccacctacaggagtcgcccggcatggcgaggccacctgtggaggcgtcacctgggactcctgccctgggcagtgtgatctcagacaggtggcccactccctctgagctgtttccagctgtaaagctcagagcaggaactcctcctgcagcccctcccacccgggcttacctggctgagctacagtgaggctcccagacctgcttgccagccactgccctgaggaccagcgcaggtccgtggggataattgaggaggaggccccaagagccatttctcaggatgtcccacccgggcccccatcccagcactctgggctccctctccaccatgagtttcttggtgggaaaaatagggtggctccttgaggcctgttggcagagtacacagtggcaggctgctgagaacccctagaaggctttatggaggcctcagcctctcagctgagcctggagagctggacagagtctgcaggggcgagttccctgtatgattatgggccgtgtgtgtgatgggggcgcagtggtgaggcctggtgcccagaggccaggggaggatgcactgggccacaggaggaccccagaggccagggtaggttcctccccactgggcagtgggagccaggctggtgggggatggctctggacactgtcggaggtggtgggagggttggggtggaggcctgaaattaaaccacgtggaagggggctgtgagaacatgaggaggcaggtggacttggggaagagcgcaaggagggccagtccaggctctcactagaccctacttctccaaggggactgaggttggggtcttcccgaggtagagaagtgaccataggtagactgtggacagtgatcatcgatgttgctggcagtggagctcctctgctctgacattctctgtgtccagcacctgcttcaggccccgccctgggggagtgggagtcgcatgacagtcctagccttgggtttgactttggccccatccacttagaggccatgggagaggtaattctgaaagcgcttgtcctttgtggttgcctgtcgtatcctacttgccagtgtcaacttctaatgcaggggtgtcgtcccttgggacaggctgggacggggacaacaagatgtggtcaagaccacacaagactgtgggacatgctcaggctggagtgtggctgggccatccagcagagcctcctatttctcccgggctagagaatgaccacagggtgcggcgaccccggcactgttgaaagctgggtgctggctggacacagggggcctctgatggacagagcacaatgaacgagttgcccagcagggtagggagctcaggagtggctgagaggctggccacctgccctctgcagcctcccacaacccccactggcagccttgtggggctggagaggtctgcccagaccctcagtcccaactgcagataaagcctgcgctcctctacaggggtacctcggcatgcttcttggtcctgtcctctccctgccctttcccgaccccagcaccgcacttgggggcgtcccttctgaggcagcggcttcctcactcacctttcagctctggcccctgcccctccaggtctctcccagccccagcccaagccccagccccagcctgggcctgaggtcatggtctggactgggcacgttgggatgtgttttcccaagcaaacgaggaatcattgcacaatctgagtgggaaaccagtggaggggagcccaggactagtcagttgaggcaaagacattcactttggcatctgcattaatatagtgatttattgctcctttagcaatgtcggttatgaagttcaaggggagagagaagaaattgatgaaaacagcggctcatccgggaccgtcttccttctctggtttgtgccttgacttcttcagagcttgggcctgaaggcgtgagctccatctcattcgccgctggcacactgggccacaaacggctcactaggtgcgcatctctggaggctgctggggggcccttcctctttctccctggtcgacggcttgctggggaagcctaggatgtccgactgcctggacatttgcattgccaacccctcaggttttgtctcaggctgtccctcgggctgtgtctgttccccaggctccagcttggtggcagacctcttggcagagccaggttcaggggtccacaagagttcagttccctgggagctttccccctccttgttgaagaccatagagggcagtccctgtgccttgggctgcacccagcattggctgagggtgtcatggatgtgcagccgctggctgacgtcgggctgcagcatgcagtagatgaggtccttgcactcgtctgtcaggttcttggagtgtgggaagtccacgcggtgctccttctggatacgcagcatcttcctgatgttggagtcgtaaggcatggagctgcagaccatgatgtagaggatcatgcccaggctccagatgtcatacaccatgggctggtaggggatgccctgcagcagctcgggggctgcatatgccaccaacccgcagaagttcttgcttaatctctgttggccactgtcatcccgcaggcagagcttggagaacctgaagtagaacagcttgatgttgaagtccttgtcgaggagaaggttctaacacttgaggttctggtgcatgatgtccaggtcgtggcagtatttaatggctgaggagagttggtggaacatcttgcacgccatgtccttgggcagggctccctggcactcaatgaactagttttttttctgcccctggctgggctcccagggcagatctggggctgggggctaaaggcggggcctggatgccaccctgagcactggtggctgctctgaggacagtacaagcagcaggggcagcactggagagtgtggccattgttttttctggcagtggagcccctctgctgtgccaggctctgtgtccagcacttgttccgggctatgccctaggggagtaggagtcacatgactatcctagccttggatttgactttggcctcatccacctagagggagtgagcacccctttctcacaggagccaagtggaaccctgggcccctcaggatgacttggtagggcgggctggttgtcactcatgttgggttgggtccccacctgccgtggcccttcccccttttctctgctccttcaccttcttccctaacgctgactgcccactgccaggcctttgtgcattcttggttctcctccttccagacagcctccttctccttcccgctggggacaccccaactactgtctcctggaaaccaaaaataaaactctaaccccccagccatctgaatggacccctcctctccaccaagggcattccaaacttaacctgaaaaactatttcaggccgtgataggaagtgggagtcaggcctcattatccctcctcccttcaggtttcaggcacagctaagcagtgtaacatcgacacagagacttgaagactgacaacagactctgtggcagtaagataccagcatgacagcaggcccggaaggaaacacatattttactgcaaaacaggtttctttcacatattttgaagtcgctctgcaaagctgttttttgtggggaaaatctacattctgtagagaatccctatccctttcaaggtcttttctcctgagagaattaactagagtctggcaccttttatttatttttccttttttttttccttttttttttttttttttttgagacagagtcttactctgttgcccaggctggagtgcagtggcatgatcttggctcactgcaacctctgcctccccggttcaagcgattctcctgccatcagcctcctgagtagctgggattacaggcgtgtgccaccacgcctgggtaacttttgtatttttagtagagatgtggtttcaccatgttggccaggctgatcttgaactcctgacctcaggtgatccgcccgccttggcctcccaaagtgctgggatgacaggcgtgagccaccacacccggcagagtctggcactttttaataagaaacattaacagtcttttctctgtgaagcctgatacctggaggcttcatttgcctaagaaacttggtctccacaaccccttaatgtagacagtcccttttattgattccaggtctttagataaactctttgaaccaactgccaatccgcatgacctagaagcccccctccaccccccactttcaagttgtcccgccttttccgactgaaccaatgtatatcttacatgtgctgattgatgtcttgtctccctaaaatgtataaaaccaagctgtggccctacccccttgggcacttgtcaggatctcctggggctgtgtcccaggctattggtcacatattggctcagaagaaatgtcttcaaatattttacagagttggactcttcgccgacactgccctccaaggttcaccctgttggtgatgacgggagaagtggcacttggagcactgttcgcaggggcgctgagcctcctctctgcctagctttctttcctgcacatgtggccttcccctagccattgtgtaggcaggtcctccagggagccggcttcgctgcagtctccaggacctggccttcccggtctctctttgcctgacactctcttaggccattcctgttcctctttccccaccctcagaaccggcaggccctccctcctccacagcggttcggccttaaaaagacccctttggggcgcacttttgggctgctcacgggacctgagcttgcaggtgtgaagacccttggagtcccagccaggttcccacttcgttctctccgctccccacccgcgcgacccctcggcgccccgccccatgccccgcgcctttcgatgtccatccttgccgtcccgcgcccgccgtccctaaccggcgtccagagaccctactcccttcggtggccccgccgctcaggccccggccccggccctgcctctctgcttaaccaatggcacgcctcactccgtatggtcccgcccttcccttagagcccgcccctcagtccccgcccttaggtccccgccctccgccgtcgcgaccttaggcctcaccctcttcggagggctttggctctggccccgccccccatcttgacggtcattggcccgcgcctgcgtcgcgggcgggaggcggggcggggcggcgcggcgcggagccgagcaggacggccgccatcttgcgcgcagctggagtcggtgcctgaggttgcagccgagagtgtgcgccagcccgcggcccagccgaagctctttcccgccgcctctccgcgcctcgcccaggttcagctccgcctgaccctccgcttggcacggtcccctgaccctcagtccggcctggtccggccttccagccgccccggggacgatgaacggaggataaatggtgcccaaggcagacagcggcgccttcctgctgctcttcctgctcgtgctcactgtcaccgagccgctgcggccaggtgcgccgcgcgatgggggcggtgtgggggctgggcggcgagcggggccggggtcgccccgggacctcctttcacccgcggcgccctcctgcaggggccgcgcctggggcaggggcgggcggggcctggctcgcgggccgcctggcactctctgcggacgcctgctggagcttacctgggctcgcggcgcctcggacttcgtgcagctctgctgtccaggatgttgcctctgggcccttcccgggagcggcggcggccaggagctacgccacgggcgcaccctctcgccagtccagcgtcggagtcgggctggggacagtggctctcaggggcacctggtttcacagacgtcctcccagcagtggcctagtgccagcctctcagtcctggaaactcctcgcctggacagcggtggttgtggctgtcattcagtgagacgttgcgctaaggaagtcctcaggtcccaccgggcctagaggaggcaccaggagtcagcctagcgttgtgtggccggcgcgagcgtcccgggagcagagacctcgccactgtgcggggcccttagccgtgctgcgtgtatgtgatgaatgagtccgtgctttggaactcccctcggagctagtgtgttcttaagtctgtggtggggaatcagaaccgtggcaaccaggagacccttttctacctatttcggtgtacctccccttgaactgcaccaaaaaatcaaactccctaaatgcagggccgatgtatccatcaggcacaggaatcctggtatcacttgcccacggtacttttagtagccttcgaatgttattttatttttttttaaagtcagcagaaaaaaaatgaacttttaggtcaaataaaatgttttcgtatgtatattaatacagtcatctttatactaatacagtgaaaaagcatgactcttaatatttcttaatggaggaaaggtcccatgaaggcagaagtgccagggccatcttctctgatgacctgggtgtgggagcacggggtgtgtggccctctcctgtgccctagccaggctcccagcccagatacaccgcacctcttggctctgcgcttgtgtcatctrtgtggaatgtctgcctcctccctagtgcctgcctggtggccaaggccctgaccggtgctcaacctggacagattcagtgatgcttctctggtctccccatgtagagctagttgctcactgcttttggctgctctctgggcagcgggatgactagttgtggggtggccttggtaagaacagaagccaggaaaagggctacctgtggaggagggtatcatataggctcttggaggtcagaaccaatgggtttgtggattcttgtgattaacttctttagaaaacatatatgtacgtgtagagaggtagaaggtcaccgttttctgattcttgagtcccagttttgcagatgaggtcaccgggctcaggtgaggccatattatgcctggcttctttggggtgcctctggttccaggcccagcatctcctgcctgggtgatagaggtgactgamgtccccgactcctttttccttgccagccttttcacatagcctgccaactggccagcagcaactgagaaagtgcctgtgggtgcttgccccctgcccatccctagggaatccaagtgacaagaacaagcccctccttttaggagtgcctgatgtggaacagaggccaggtgtaagtcacttgtcacactcctgtgtgttgaataccctggagtgtggggtcccagaggtgggtggaggtggccatctttttgtacctgtgaagcagtgagggcgtcacaggagacctcacactgaggtcggagtagggcatgggtggggtggatctggtagagggagcaaacttattctttcgattccatgactctccagatgagaacattgcagctaccyctggaggcgtcttgagttgccctgcagaacccgggagctgcagctggcttcctggctttggctgggcagggagggcaggcctctgggcctgatgtgttccttgtatgcccgygtgtgcctcttcacacattcaccatgtgtccttcctgagagtgctgcagggatctgcctggctggtgcttgcaagaggctggggcttctctggtcttagtctgcgttctttctgtggggattccggccttaaaagcatacttgagtatgaggaaggtaycagtcagagcccacttctcaggagggtgttttctgactcctgcctggtggggtccctgaagatgatgccaagccacctgggcttcctctctggtacagggcagggtggaaggcctttcatggagttatggggcagcaagtgcttgctgtacttgacctttcaccaattttttttttttttttttttttgagacagagtcctgctctgttgctcaggctggagtgcagtagcgtgatcttggcccactgcaacctccacctccttggttcaagcgattctcctgcctcagcctcccgagtagctgggattacaggcatacgcctccacgctcggctaatttttgtatttttagtagagatggggttttgccatgttggccgggctggtctggaactcctgacctctggtgagccacctgccttggcctcccaaagtgctggaattacaggcctgaggtaccatgcccagcaatttttttttaagtgcacatttgaacttgatttaagatgtgtcatgtgccggacactgttctaagcactaacatatgttaactctcaagaggtccctgctagatgctgtttttagcctcatttaaagatggggaagctgaaatccagagcactcatgaagctaaggctgagatgagatttcatcgtaggagtctggccttccccccatcatgcacccgtgactggggtctgtgcactccaactgtgtgtctccagcccagccacaggagtacctcatattatgctctgaacagcttccttaaccccaggtggagccacagactgcctctgtcccctgttaggtcccagggtcctctaggtgagggtgcagaatctttttccatgtggatactccagtctgagggacagaaccactcaccctctgccaaatcccttctgtgtttggccatgtgaccactgatgatgtgtgttatgatcactgggggtgtgatgaggaagaacggttggagactactgctgaggtaactgacagcgagatggtggggggatttggggaccactgattgtgatactgtctcattggccctttctccatctgtgtagagaaggcagcatcgactgctgattctaaaactgtttttctttctagctttaattgtgaaacaaaattatatcatgagccacagctctatccaggttgaacccaccatacatagctgagaaaaaattgccttytgaatgctggtgcaccctggtcccttcctgctggttgttggtcctgtacagggcctgtgctcagctaggccccttggtaaggtagagractagaaggtcgtcttccttctaktgttggtacagctagctgggagaggcaagtgacttgtctaaggtcacacagctggtgagcagcagagcgtgggttcagacccaggtggagctggctgctagctcagggttctttctcttttgctttcagtaggcagctgtgctgagctgatcamatctcagggagctgagaagtgaacacagcaccttggctctggagtccagagttgttttttttttttttttttttttttgtttgcgatggagtttctgtctgtcacccaggctggagtgcagttgcgggatctcagctcactgtaacctccacctcctgggttcaagtaattctcctgtgtcagcctscagagtaactttgattacggcgcacgccaccatgctgggataattttgtatttttagtagagacggggtttcaccatgttggccatgtaggctggtctcaaactcctgggctcaagtgatccacctgctttggcctcccaaagttacgggattgcaggtgtgagccacctctccccggctggagtccagagttttctttcatgtgaagtagcacaggggtttggtgcatagggagagagtgcatattttcatcacaaggaaaagtgaccgaggttcagaagtagctggagaggtgagcttgcacctagccttgccaaatcctcctgagtttggagtgctttcctctgtagccagtactgtgacactttgtagagtttgtccactggtagatttggcttttgggttaacaggttcattttttttagttggaaagtgatgtaatatactttctaccttcactagctaatgaattttccttttttttcttgacaaaaagaaaacttttatttggaaataatttcaaactcccggaaaagttgcaagagtaaagtgagtgcagagaacacctgcatatcctttgctgaggcttccctactgttggcattttaccttatttgccttatccctcatcttccatgtgtatgtgcatatctgtgtactcacacacattgcttttttctgaaccatttgagaataagttgtatgcgccatggccgtttatccttgtacatgttaaccattgcagagagtagaggctgctcccacttaaccccaccccatcgttctcactaacacctgctatgtgccaagccctgtgtcacgtgggaaggtctcatgggtgcaggaagccctstagttaaagcccaggttggcccaggtggaggcaagctggcatcactgcmtgtcagggttattgttttagttggcggttctgggtttaggaatgaagactgctgttgtggaagatttgtgctgtgttaggctgcgccttygctgctccacttcccaagctagcttgtgggcactttccccaccccttccttcccacttcccagagtactgagtgattatatcctcttagcagcggtggccggtgatttgtttgtgcaggtgtccttctagcagtgacggcaggtaatcttgttacgcacagatcctcttagcagtaatgggaggtgagtgatctgtgtgtgtcctcttagcagtaagggcaggtgatctagctgtgcacgtgtcctcttagmcatggtgggaggtgatctggttgtgcaggtgtcctcttagcagtgatgggaggtgatgggaggtgatctcattatgcatgtttcctcttagcagtagtggcaggtgatccggttgtgtgcatgtcctctcagcagtgatgacaggtgatctagtagtgcatgcatcctctcaacactgatggcaggtgatctagttattgactctctcctrctggacctgagcctttgacaggcagggagttcctctgcctctcttggttgttggcataaggacgacccgattggcatttagtagtttcttgactctaagtggaatgcatcagtgacaacatttaaggaccccgtagawagctcttgactgattagatgtcttttccttggtatgctattagattttctcttatgtgctgttatgtttgggtgctgaggttttgatgaccgtcctctttcctttctttcactgccagtctgcagagtgggctcggtaatcccgagagaccagttttgggccaacagttcattgagcagagtgatgcatgggcttgggtatggttattatgtgatagctgtgtaacacctgtatttgtgtttctgacatgatttaccagttgtcctgggaagtttagtcaaagccagtccatctcatcctgccattccaagctgtgtgtcctgtcagtgtggacatggcgggcttggcagggcaagtctaggttggagggtgaatagcctgtggacccagatgccctggaccttctgggcatcctcctgggagatggggaagctcaggtctggttttgcctcaaatgagctgtctgtaaaagtagcagctgggattagatcaagccttctcatcctggcccatggcaggcagttgggtatggtggcttaagagcatgggctctagagccacactgcctaggctcaatctgttctactsctcactcttcagtttcctcatttggaacatggacatcgtaacagagctttatagagatgttgtgaggattaaaatgggtaagtataaaattctaaaaagtgtctgacataaagcaaactcttcatcaggcaaaatgttagtgttaatcacagatagagttcaggaaccctgaactgaaatgtgaaatgtgaggtggtttgtgcacagggcttattggtcgggagagagctccctcaggaggtggcagagtrcagtggctctgaggagtgtctgccacacagagagtgctctttgctgttmtgatgggatcagagggactgcgtatgacttgctgagagcccccgaaacagccatggtgctttggacagggctgggattgttcatacacgttttgctctttgtcacattcatgctctgtcacctgggcctggtcaggcacagactgggcactcagaaatcagttattgaacaaatgcacaaatgcctatttatattttgacataaagagcaacagctactttagccagcaggccttgcagctgcctctggtgggggtggcgaggaggatgagagccttgtggcagtcctgcaaaaatgccttgggaggatgggatccgggggtaggggacatggctgtggagccagctggcctgggccccaccctggtaggagcttgcttctgtratgggagctgagctgagaggtgagagcaagtgtggcttctcattaatgtggatcctcactgaagctcaccagctgcccagcctggggtggagggttgaggggctcccagagggagggaccccagcaagccggtgctgagggagctgcctctctgatggacttgctggcacctggctttgagaactggactgccctgtgtgaggatgtggctggaccttccctgggttgtttgcacagtgcagggcttgtttctggtcaagagctggctgggtgcatgggctgcatgggctgcacatgcttgcctcttggccttctcctcctcctctgcctgsggtagctgttgcttcagtcactctgagctggtcattgttcttagtgcccttgtcccctacaggtccctccctgtaggctgacttctggctgacctctggcaaaatggcagacagctatcagtttggttagcttgtcttccttggttagtctgtcatccttcagctgttggctgctactgttggacaggacagtactgaggacagtattctggtgggtatggtggactaagggtcccccaggtagaccctgccctcttccttgcctgggaagtctcattttctgggaaaccttccttaggagttcatagttgtggagaggattgtttgtggctggccagggcactggatgaggggcaggagtcacagcagagggacccagaaggtcaacacagggatgatcagcaggagactgaccacaggaccgggccagatgctccattgaaactaggtctgctgatgcagaggtctctccggtgccactggctgcttcttagggcctccaggtagattagtttacctacagaactctgyctatggtcttagaataagaggacctggaagagttagaggcttgttgggggccatggcaggcctttgctgcagytcttggaggtttcttggccactcctgacagtgggagcagctcttcggatttccccatctaccctatttgcgaaggatgcctgctagaccagcatggtaagccatggggcatggagagagcccaagggtgtagaagatcttgtctggacaatctagaaaaaataaagttgatatttcttcacatttgctaacattcatacatagaatattttacataaatggaattatattttttatttaatttttgtatttaacttattttgagatctttgtagatcagtgcatatataacttcattcttttttttttttttyctttggtaacaaaagatggagaggaaaggtgggaatgggtcggggcaagattgtcttaactcgttctttttttttttttttttttttttcctcaaatggaatcttgcttttgttgcccaggctggagtgcagtggtgcaatctcagctcactgcaacctccacttcctgggttcaagtgattatgctgcctcaacctcccaagtagctgggatgacaggcgtctgccaccatgcccggctaatttttgtatttttagtagagatgggattttgccatgttggctgggctggtctcaaactcccaacctcaggtgatccgtctgccttggcctcccaaagtgctgagattacaggcatgagccactgtgcctggcctaactcattcttttttaraaatctttttactttggaaatatttcaaacctacataacagtaggttgacttggcaagtggaamccccttcacctggccttttcaggatgggagcgtgtcgccttctgacatgtttccatcaacttgaaattcctttttaccaggcacatcttgtaccttacctgccccacactggaatggggcattttcccacagagcgctggttccttttggtgggagatggtatttagaaagcaggattttggtggtagatgtgtttattgctagctactagagtatgctgcgactccatcttttcagtctagcccaagaggtgtgtgcatacgtgcatgtgtctgtgcctgtgtaagttcatactgttatttttttttttttatttttatttttttgagacggagtctcgctctgttgccaggctggagtgcagtggggtgatctcggctcactgcaacctccgcctcccgggttcaagcgattcttctgcctcagcctcycaagtagctggaactacaggcatgcgccaccacrcctggctaatttttgtatttttagtaaagatggggtttcaccatgttggccaggatggtctcgatctcttgacctcatgatctgcctacctccacctcccaaagtgctggtattacagccgtgagccactgtgcctggcccatactgtttctttagttctaatccagcgttccaggttcttgcttgctttctctgytgcatgtttgtttctctctttttctacagtgagaaccctggctcccaacagcatcagtaggtttactcatttgcttagtcttacactgcacccagaatagtttcagaagtactgcattcgcaccactagtaacagcagacctattaagtagaatttaatttaatttwattttttttagctctttgtgttttcagattgatggtgtatactcaaggttcttgggttcaaaagctacttggattaattctcttctctcttccatgtgattgttacacagttaggttcaaaactgtgttgaggcagggccgggtggttcacacctgaaattccagcactttgggaggctgaggtgggtggattgcttgagcccagaagttctaaaccagcctgggcaatatggcatctctgcaaaaactacaaaawttagctgggcatgatggcacacgcctgtagtcccagctacttggaggggactgaggtgggaggatcgtttgagcccagtgagcagaggttatggtgagctgagatcatgcctctgcactccagcctaggcaacagagcaagacctgcctcaaaaaccaaaaccaaaaaaaaaacctgttttgatttgaaaccatgtttattaaataatattgagagtggtatttactgtaacctcagtatttataacaagcccctctttcattacactaattggtaaggaagcatctcaawtttgaacggttttattattktcctaggttttttttttttttttttaaaagatggagtcttgctgtgtcacctaggctggagtgcagtggtgcgacctcggctcactgtaacctctgcctcccgggttcaagcgattctcctgcctcagcctccccagtagctgggactacaggtgcgtgccaccacgcccagataatttttgtatttttagtggagatggggtttcgccatgatggccaggctggtcttgaactcctgacctcaggtgatccacccgcctgcatctctgaaagtgctgggattataggcatgagccatcatgctcagccaataaatagatattttaaaaataattatttttcatttctgacagtcctgagccttcgttgatgtacttttgtcaaaactcttggtaaatcactttttaagtttcagtttcttcctggagacaaaaaaaaawaaataaataaaaaataaaaacaaaaaagagtttagatgttcaagggctatttgggcccaagtgctgacattgtgagcttgttggtttaacagsgtctcattccaccagccatcaccctttgtgtttcctctccatccgatagcttgggttcgtgctctgatagtctttgggtatgcagtggtatgggggagctgtctgaagcaggggctgaggttggcctgggagtttgggtatagttctacacaccctttacctgacaagactcattgtggaggggtgatcagtsaggcaggtggtaggtctgttttggagattaggatgctaagacccagagaggttaattagcttgcttggtggcatcacttagcttttaagtagaagcaagaacaggaaactcaggactgctrtcctgagccacatgctttgcctcctgcaccatgattccaaaagctgatgaaagagctgtatggcagagggagctaagtggagcgccaccacctggggcctcctgcctaagaaccgggcaccttttcactgagttgggcatcgctagtgttcacagttctgactgcaccagcatcttgtgtggacactgatgctgtgatgtctctttgggcttgggtgatcaattcaggccagctggtgaccaccctctgtgatctcaccacacagtgattgcaatcaaatctacctgtgtgtttccagaagcttgggaggcttattagagtgtyaccttcttttgtatggacggactttgtgggttttcaaccgtgtggatgtattacttcttaacaaacattcatgaaagtaaaagatgaggaaaaggtattttaaaaggaaaaaaatgtgtataactgaatataaaacatactacttaacagaaaaaatagatctaaaatgcttagaacccacaaaaaagttaaatgaaattttagcttaatgctgttgcatatttctgctttataattgcagcatgagatgtgatgtctttttataggaagtaggtttactcatattaacctcattttacagatagagaaacagagcttgggagactaagtgacttagccaaagtcacacagcttttaaagtcatggagtgggtatttgaaacmtgggcagcatagagttcatgctgtgatatygcacagcttcaagagaagtctctggctctttttccatctactccttgtctttctccttctgccttttctttttttttttaatttaattttattttactttaagttccaggatgcatgtgcagaacatgcaggtttgttacataggcatacatgtgccatggtggtttgctgcacctaacaacctgtcatctaggttttaagccccgcatgcattaggtatttgtcctaatgctctcctcccgccttttcaatgtgaaccttcccacccaccctgcttttcttgtcttcttcccatagcttcagcaggctccaggtgccgcagccctgactcctcagggcccacccctgctgtgtccacacaaatgcccccaggaagctgacacttccccrcwgcctgttcctgcagtccctgccttggttcttagctgatgctgtcttatcactgccaccccatccccatttctgagcatcaggcaccctcatcagcacttggcatgtaatagctccattaaccttaactgtaaccccrttttttggatagagtttttsgtgtgttaaatcttgtgttcaacttaggttttgaaataagagcaggaaatgaagctttcagactgcaaatgtttcctttgaatgttctttaaagaccccatatgataggacatgtgctttttgtgagtgtaactccctgtggtgatcacactaaagtttggacccactctgttagacaagggaggaactgggcagaactgcctgcccatggctgggctgtaggctcagtctccttttagatgygtcagatttctagtcttgctttcttgcaggagttacttcattcagttgtaatattatccttaggactttaaatccctccgtattttatatgtgcttttcagggttaggcggctccactgctaccgcagtttttttttaataacgtaaaatatgccatcataaccactcaattcagtgttcagttcattcagtgttcagtagtgccagagtatgtaycttgttatgcaacagatctctagaatgttttcatcttgcaaaactgaaactcagtacctattgagtaactacccctcccttttatctctctctccagcctggcaaccaccgtcctacttcctgtttctaagagtttgactgctttagatactccatataagtagaatcatgcagtatttgtctttttatgtttggcttattttacctcaaggttcatccatgttgtagcatgtgtcagaacttctttttaaggctgagttgtattccactgtatgcatatactgcattttgtttatttagtgtacacctgggtcgcttccacctcttagttattgtgagtagtacttctgtgagcataggtatatgaatatatctttgagaccttgccttcaattaattttgggtatgtacccagaagtggaattggaattgctggatcatatggtaattctatttttaattttttaaggaaactccatgctgtcttccatagtgactgtaccattttacattcctaccaacgatgtacatgagttctgatttcttcacatcattgccaacacttgtttgtttgtttgtttttgacagtggctatcctaatgggtgaggtgatagcctattgtggttttggcttacatttccctgatgattaaggaggttttttttttcttttccttttgagacagtttcgctctgtcatccaggctgaggtgcagtggtgtaatcgtaactccctgaaaccttgacctcctgggttcaagtgatcctcctgcctcagcctcccatgtagttggcactacaaatgcatgccaccacacccagctaattttttgatttttttttttttttgtaaagatgagatctcactttgttgctcaggctggtcttgagctcctgggctcaagcaatcctcccacctccgcctcccaaagtgtgaggttcattttctgatatgtggagtccaactgtctagtaccatttgttgaaaggttataccttctccattgaattgtctttgtacctttgtcagaatccattgactacatttgtgtaggtctatttctgagatctgtattctattctgttctgttggcctgtgcatcttttttttttttttttttttttttttttttttagataaattctctgttgcccaggctggagtacagtggtgggatcacagctcactgcagccttgacctccctggctcaagtgatcctgccacctcaccctcaccgagtagctgggaccacaggtgttcaccatcatatgtggctaatatttttattttaatttttgtagagactggatccctgtgttgcccaagctggtctccaactcctgggctcaagtgatcctcctgtctcagctttccaaagtgttgggattacaagtgagagctactgtgctcagtgtggtctgtgtatctttactaagcttttgatcaaagacttttttaattttaaagaagtctgatttatcattttttcttgttatggtcatgctttctgtttttgtctaataaatcyttgcctaccccaaggttacgaagwtcttctccttccctagtaaaatctgagcttcgtgggggcagacaccttatggttctcctcctgctcttctcacttgtgtcctgtacaacacctggcccctaggaggtacacggcggtgttcatggaaggagcaaatgagttgtcttaaggattcataataatgtattctaagcacttgatatactgcctggcacatgcaaaatgagcattcaggaatctgatttgactacagctgttctttctcttagagaaattggctgcgctatcctgtggctatgatcgaaatgtggtgcgagtgttggatgaaactgctggctgatgtttacatcagatgcgagatagctctcgctccagttctgtcccaccctcctgccctggtcttattcccaagtatgtagcccctcctgcccgaacccccatgaaataaggactgattgcaagttgctgttcttttcttgaaagtgtcactcatggaataggtatgcttggtggacctgcctttctcttctttcatcttatatgatcccttcctttttcttaggaccttcccttcttttctaggataacttattttaaacagggccttctttcccaaacatctgcctaaggagaagccacagggcagagcagctgagccagtgttttggttggacagcatctacagatagatggtagcaggtggtgatcacttcttctcctggaggtagaaaatgcttgttatttatgagaaataaatgctgaagcataggccttgtccctttgttcttgtgtggtgttccccagtgtcagtgttgtgaccccttgggctgtgggagaaagtggctggcactcccctagcgcttggcaaccctactccctctccactgttgcaggagagctggccacctgtctccagtggtggtgatggggagtcaggagctccagggtccaggggaggagtgactgagggtggagccttcactcagagattccacttgccccgggggctgtttggaaatgggtttggtggttatgtgtttggggagctactgccatttagggagccatatcaaagaagttgcaggcatatttcaaaaccacagcaggagtgtttgcaggtgtaaaatattttgttctagtaactggccactggtagggaaaaaaagtacaatatgttggtacatccttggctctgcaccagactggtggtggggctctggtatccctgggctttgtgcagtgagcccccagaggctctgctgactgctgtctcggtgaaggaaatggctcagaactggaaagtttggacctggtcctctagggagtcagaatgcagagccccacccaggggctctgcwggcttcagggatggggatttgggtcaaagagcccacagcctgacctctgatgcccattctgctgctgccaacttgatgtgggacactgagtaggcgggtcagcccctctgagaagctagctggctggactagttgggggtttcaatacatagaacagcttcrggccttccttcacattttgctaatgaaacttccaatctcatcattttccatgagccacacatgtcttgttcccgtttgaactctgggccctcatgggtgaggagccggctggcctctgggctccttgtggcttgaggttcagatgctggcatcgttggtgctgtagcctggtggctgccagtacagaggatgctcaggcctccaggtatcagcagtcttcactgccccctgctgctgagacgcagtggcaggtcaaactgcacagaacccctggccatggttcctgcctcccatcctctctttgcccttgtgggtccctctcagagcatttatctctgcagaggacctcccaggattgttcctaagggtggcatatgtgaaacttcagcagctgagcattgttggagtaattttctcttttgggcctcatcacctccgtggaagtcaggagggataggcagggcaggatggtcacctccatgctttacagatggaggaagcagcctggcgaggctgagcagggttgcacgggccaggagctgaagcctgctgtttgtctcgcaacggatctctggggcgtctttccaagccagtctccctgcgtggttccaggaagctacaggggtggggaggttgtgtgctggcctgctggtgctacggggcagtggcagcgatggggaaggggctagacgggcttcaggggagagctgcagggactggtgagccgggacccccaagaacctggatgtggggctttgcgggaaggttagaggtggcccttggactccataaaagggcagatggcatttgagcactgtagagaaggcagggagtttgtgatgtgatcacagttggttctgggatggtctgtgcactgtttggaatgccaggtcctgcctttcctcacttcctagctctgccctcccaggtctgctctctgtgctgacgcaggttggtgttctgatgatgcactcctccatcgccagccgcgtccctttctggagttatagcacatcccatgaagctatctggtcccgaagtccctctggggccccggagtacagtgtgccttccagagcgygcatcgctcccttccccactgggcagcacctgttcagratgggtgcttgccrgaggcctgcccatggcccctggtggctcagatgctggccatctctgaggccccattcaaggcccttattattcactcttgcctcaggacagaggtgacccctccatttagaaggtcaccgagcaatatgccctctgttttgtcttttagttgtgctatcaacagtggtctctgtcctccctatttttttagtttttgagatggagtctcatgctgtcacccaggctggagtgcagttgtatgatcttggctcactgcaacctctgcctcccaggttcaagcaattctccccacctcagcctcccaagtagctgagactacaggtgtgcgccaccacgcccagctaatttttgtatttttagtagagatggggctttgccatgctgtccaggctggtcttgaattcctggcctccggtgatccacccgccttagcctctcaaagtgctgggattacaggcatgagccaccgtgcccggccctctgtcccttcttgagggcatctggagaagagatggctggcccagggcagaacccagcatccacacctctggtctcctggagatgcgtggtcgcctgttacaatagcccagccagcccttggcttccaaaccttctcccctctgctgctgctgctgctttgaagtgtgctggacaaatctccctttcctagtagcaacttgtatggaaggtgaaatgacctgtgggaaagccccactgggaagcagctgccagctctttccaagacagaatgtgcagtaaggctttactgccaggtgtgagcaggcctgccagggatgctggaaccttctsttctgggcactccagcagggcatgggtgtcccctaccccgggtgtgggagtctgtgtctgatgggtctcagactgctctggtggagacctatcttagtgggctgtgagtagtgcgagcagatgggctggaatttctcctgcatttctttgctggaaatgttttgattttcttagtgatgtaactgtggacatgtgtgcttctgctagtactctgtctccctcttgttctttgtgggcaaatgttgaagagaaatcaattctaaacaatttatgcagcatactaaatttcacacagtaatttgagacagctcagtttgagacagccttgaaacaaggctaaggcttgctgacaaaggagaaattgaatctagagaaagaatttgtattgcagagactcgtgggtttctacagggcatgaatccactaattcctgggcgttgcatagcccaaagcagtagctctccaagtgtgcccaggggtctctgggggttccctgacccttctaggggctccgtgaggtcaaaactgttttcatgataatactgaggtgtcatttgcctttctctcatcctcacaagcataaggtagcatttccagacactatttgatatgtgatgacatcattgctctgacagctaatgggatgtatgcttgggattctctctttttttctctctctcttttgaaagaacagtgcctcactgtgttgcccaggatggattgcagtggctgggtcatagctcactgtaaccttgaactcctgggttcaagaggtactctcacctcataataaaataaaaaataaaatttttattttattttatttgtagagtcagggtctggctatgttgcccaggctggtcttgaattcttggactcaagtgaccctcccaccttggcttctcaaagtgctgggattataggcatgagccaccgcacctggccttttttttttttttttttttttttaagaatttttttggccgggcacggtggctcacgcctgtaatcccaacactttaggaggccgaggcaggtggatcacgaggtcaggagatcaagaccatcctggctaacacagtgaaaccctgtctccactaaaaatacaaaaaattagccgggcgtgatggtgcgcgcctaatctcagctactcgggaggctgaggcaggagaagggcatgaacccgggaggcggagcttgcagtaagccgagatcttgccactgcactccagcctgggtgacagagcgagactccggctcaaaaaaaaaaaaaaaaaaaaaaaaaaaaaaaagaactttttttattgtggtaaaatacacatacaatttaccagttttaagtacacaattcagtggcattaagaacattcagaatgttgtgcagccagcaccactacccatttccagaacttttttttttttttatcatcccaaacggtaactctatactttttaaacagtaactccccaattcccctgcccacagcctttggcaatttctgtctgtatagatttgcccattctagatatttcatactaatggaatcatacaatatgttgtcctttgtgtctggcttctttcacttagcattatgttttcgcagttcatccatgttatagcatgtgttagtatttcatttcttttttaaattgtggtaagatatatgtaacataaaatttaccatattatcttttttagagacagggtctcactctgttgtcaaggctagagtgcagtggtgcaatcaaatcataactcactgcagccctgacctcctgggctcaagtgatcctcctatctcagcctccggagtagctaggaccataggtgcatgccaccgtgtctggcaamtttttctattttttgtggagatgaggtctcactatgttgtctggggtggtctcaaactcctggcttcaagcgatcttcctgtctcagcctcccaaagttctgsgattacaggcattagccrccatgcccagccccattttaacctttttttttttgagacggagtctcgctctgtcacccaggctggagtacagtggtgcagtcttggctcactgcaagctccacctcccaggttcacgccattctcctgcctcagcctcctgagtagctgggactacaggtgcccgccaccatgcccggctaattttttgtatttttagtagagatgggatttcaccgtgttagccaggatggtcttgatcgcctgacctcatgatccacccacctcagcctcccaaagtgctgggattacaggcgtgagccaccacgcccggccccattttaaccatttttaagtgtacggttaattcagcagtgctaagaacatgcagaatgttatggaacgagcaccattacccacttccagaacttttttgtcaatccaaacagaaactatacccattagacaatactccctattctcctcacccctagtccttggcaaccaccattctactttscatccttattaaattgactactgtaggtacttcttatgagtgaaatcatatactatttgcctcttttgtgtctgtcttctttcacttagcataatgttgtccaggttcattcatgttgtagcatgtgtcagaattttcttccyttttatggctgatggctgatcacattcacttttgttttttattttttgtctcactctttcacccaggctggagtatagtgatgcgatctcggctcactgcaacctctgcttcccaggttcaaacaattcttgtgcctcagcctcccaagtagctgggattacaggcgtgtgccaccatacccagctaatttttgtatttttagtagacacggagtttcactatgttggctaggctgaccttgagctcctggcctcaagtaatccacctgcctcggcctcccaaagttctaggattactgacgagtgtggtgagccaccatgcctggcccacattcactttttttttttttttttttaacagttttgctcctgttgcccaggctggagtgcaatggcgtgaccttggctcactgcaacctccatctccctggttcaagtgattcttgtgcctcagcctcccaagtagttggaactacaggtgtgcgccaccacgcccagctaacttttgtacttttggtagagacggggtttcaccgtgttggccagggtggtcttgaactcttgacctcaggtgatccgcccacctcggcctcccaaagtgctgggattacaggcatgagccaccatgccaggccccacatttacttttgaagcgacacaatacaccattacttggttgcccatggggtactacatgcctcctgtttttatggtggaataatattcttttgtagagctataccacatttatttatcctcccatctgtcatggccacttgggttgtctctgcctcttggctagtatgaataatgctgttgggaacagtggtgtgccagcatctgtttgagtctctgcttttaattctcttgagtacatgcctatgagtggaatcgtgagcatttgataattctattaaaaggttaaaacctttgagcaggtgcttcagattcttgtgttcaaaaaattctcaagtgttttttttgagacagggtttcgctstgatgcccaggctggagtacaatggcgcagtctcggctcactgcaaaggaccatccacctccgaggttcaagtggttctcccacttcagcctcccgagtagctgggactacaggagcgtgccaccacgcccggctgatttttgtattttttggtagatacagggtttcatcatgttggccaggctggtcttgaactcctgacctcaagtgttccgaccaccttggcctcccaaagtgctggggttacagacgtgaaccactatgtctggccaaatttctcagttttaatttctgatacagtaaatattgacagatataacccacataaataaaagctctttggggtcttcaataattttaagtgtattaaggtgtcttagaatgaagaagtctaggaactgctgatgtggcaggtttttttttttttttaaacggagtctcgctctgtcgcccaggctggagtgcagtggcacgatcttggctcactgcaacctccgtctcccggattcaagcgattctcctgcctcagcctcccgagtagctgggaccacaggcacccaccaccacgtccggctaatttttttgtgtttttagtagagacggggtttcaccatgttagccaggatggggctgtccttatgttggtactgtggctggtatgttgtggrcatggattgtttcataaagtgtcaacaatccattggctaagaggagctggcctgcctctgccatgctacagcaaggtgacagtcatcaccagaaggcctgggacaggaccttgtaaagccatcagtgaaaaggggtgactttctttttcttttttttgagacagagtcttgttctgttgtacaggctggagtgcagtagcgtgatcttggctcactgcaacctcgcctccccggttcaagcgattcttgtgtctcagccttccgagtagctgggattacaggtgtgtgccaccacgtccagctaatgtttgtattttagtagggacagggtttcgccttgtccaggctggtctcaaactcctagcctcaagtgatcctcctaccttggcctcccaaagtgctgggattataggcatgagccaccatactgggtcaagggtgacttttttttttttaaagacagaatcttgctctgtcgtccaggctggagtgcagtggtacaatctcggctcactgcaacctctgcctcctgggtttaagaaattctctgcctcagcctccagagtagctgggattacagacatgtgccaccatgcccagctaatttttttgtatttttagtagagtcaaggtttcaccatcttggccaggctggtcttgaactcctgaccttgtgatccacgtgccttggcctcccaaagtgctgggattacaggcgtgagccaccacgcctggccaagggtgactgtttttaagcaactttgtatgtggcagaagttgcacttactgctttacagagagactgtggaggatattgagaaaggacaggcaattttttgttggtggtggtgttttgtttttttgagacaggttggagtacagtggtgtgatcgtgactcactgcagtcttgacttctcaggctgaggtgattctcccacctcagcctcctgagtagctgggactacaggcatgcacaccaccacatctggcttatgttttgtatttttagtagagctgggatttcaccatgttgsccaggctggtctcgaactcctgggcttaagtaatctacctgccttggcctcccaaagtgttggggtaacaggcgtgagtcaccacgcgtagtcagtggaaacgcagtgttgatgtccagctaaagcaatgccagtttgacctgttggagtcaccatctggtgtgctgtgctggatgcaagctctgtcatgtcctggaattgactttctttgttcattaccacagccctgtcacctggagaactgcctggcacagagtaggtgccagtgttaatgagtgatccacatcttcagttgcttccagaatagacccggcttgacagatggatcaagaagggagaaaaaccttccctattggagaacttctgacacttcattgtctgctrgcagaatatgggaagattttgagctgtgcagttcattaggcatttagtgcatgcctccatgtgtggggtgttggtgacatggagtatggggcagcaataaagatgtgtccctcagccagacacagtggctcatgcctgtaatcccaaaactttgagagcataaggtgagaagattgcttgagctcaggagttcgagaccagcctgggcaacatagcaagaccttgtctttactaaaaataaaaaataaaaaattagctgagtatggtggtatgtgcctgtagtcccagctacttgggagtctggggcaagaggatcactggagcccagggtgtctaygctgcagtaatctgtggtcatgccgctgcattccagcctgggtgacagagcgagaccctgtctcaaaaaacaaaacatttacatgtatgtaaaatgtccctatatgtatactcgagaacagggtttggcaaactatacctgcaactggccactgtttttttttgtttttcgctaaagctttattggacatgcctatgcccacgcattcccatattatctgcagctgctttagctccacggcagcagggttgagcagctgtggcagagagagggtggcctgtgaagctggccacctggaaatacttatcatctggcccttgaaggaaaagtgtgctgaccctactcagggtgtgaagaaaagaacagagaagggctgcttaggaaaacagggctaggccaagaaggccgactcagttaggggagtttggggaggggttcctggagagtggtgtgtcttgagacctggggagaggggatgccatggactaaggcccagcagtggggagcccagctgtgttcaggatgtagcaagacagtcattctgctgatagcttatttttcctcttttgataactattttttttttaaaagtctggagaaagaaagaaaaggacagaaaatccgtgtgggggctattttagccagagctgtctggttgtaaggagtagctgtaggaggaacttttccctgagcccagggaggaagcwcagccatccttggggtcatgggactgtgaagggtgttgctcccctttctcagcccttctggtcttagcccttacctctttctgcctcagggtgcacagaacttcaagtgactgtctcagtctggctagcctggatcttcccactcccatcaccttacagactcttctcattggcccagcctggggcagggcaggtggcactcatggagtggccagatgggcacttctcaaagaggaaggctgtttgggcctttggagcctttcccagacatgcatagagtatggagagaagaagtattcttcaagtgtgtttgagttatggacactaagtgtggtcggctatgccctgggaacacaggagtgaacagtgcagacatgacctgtgccctcaggaagctttactttttttttcgagacagagccttgctctgtcgcccaggctggagtgcagtggtgcaatctcagcttactgcagcttccgcctcccggattcgagcagttctctgcctcagcctccagagtagctgggattacaggcacccgcaccacacctggctaatttttgtgtttttagtagagacgaggtttcaacatcttggccaggctggtcttgaactcctgaccttgtgatccacccgcctcggcttcccaaagtgctgggattacaggcgtgagccactgcacctggctgtttcacttacatatctatatatgtatatatatatataggtttactatatactgatatataggaagccaggagtgacaagtactacttagaagcagcyaaggcaaggcaaggtggatgtggtgcatgggggaaggggccttgtttgccagagaagacttggctgacgtttgcttttggaggatataggggtatggagaaagaaaacccccagtgttgttacttattacttcttactcaactatttccaaaaataatttaaggtagtgcattgaagtttttctgggcctagggtatgatatgttagggcgtagatttggagggctgtgacatgagctatgaatttactttgaacaacaccatagggtgttttttttttttgtttttttttttaatagaatggacactgttaaaatattctgctgggcggggtagctcaggcctgtagtctgaggtgggagagtcatttgactttgaggcaccatgattgtgcctgtgaatagccaccactgcactctggcctgggcaacatagtaagaccccatctctaaaaaataaaaaagaatgttctgttgctaaatctctattcagtgaatgaactctttctcagtatagtttgggaaattagaaggcttttttttyctttttyctgcattagtctttaaaaaaawtttttkttaactttatggacacagtagttacatgtgtggggtatatatgatattttgatacaagcatagaatgtgtaatgatcaaatcatggtaattggggtatctgtcacttcaagcatttgtaacttttcttgtgttaggaacattctgattctactcatttagttattttgaagtatagaataaaccattattaactatagttaactgtgtttttgtacctattaaccaacctctttttctcacctctgcctttcccagcctctggtaaccactactccactctctagctccatgagtttaactttttttaagctcccacatatgaatgagaacatgtgaagtttgtctttctgtgcctggcttatttcacttaacataatgtcctccagttccattcatgttccatttttatggcaaaataataagaagttagaratttttaataaaactgaagacctagaatacactgaggaggaatggagggttccaggttcttggtctaatggttaattgtggctgaggaagacagacattaggccagaagagcatgtcccaattgcwgatttactcatcaaatagtgcttcagtaccagtcatggggcaagccctggatttataattatgaaaaggacctagctcctgtatggatggcgggggtgagatctggtaggccaaggctgtcttttccagagaagcaagcacgttaggtgggccatgattcaatttagttcttcagttccaggcatatctagtcctagaacacagggtgcctggatttttagccttgtggtcagtatcttttgatctcaaaattgtttcctgattttttaaacagaaatctatttcatgatagttaaaaaaagccttattgaggtataattgacttataataaatgatacataaagtgtaaaatttgagttgtttttttttttttttttgagacggagtcttgcgctgttgcccaggctggagggcagtggcgcgatctgggctcactgccagctctgcttcctgggttcacgccattcttctgcctcagcctcccgagtagctgggactacaggcgcccgccaccacgcccggctaattttttgtattttcagtagagacggggtttcaccgtgttagccaggatggtcttcatctcctgacttcatgatttgcctgcctcggtctcccaaagtgctgggattacaggtgtgagccaccgcgcctggccaagttttttgtttttttgagacagaattttgctcttgttgcctaggctgaagagcagtggcgtgatttcgactcactgcaacctctgcctcccaagttcaagcgattctcctgcctcagcctcctgaatagctgggattataggcatgcaccaccacgcctggctaattttgtatttttagtagagatggggtttttccatgttggtcaggctggtctcgaactcccgacctcaggtgatccattcacctcagcctcccaaagtgctgggattataggcgtgagcctctgcacacggccaaatttgagttttcatatatgtataaatctgtgaaaccgtcaccacagtcaagataacraacacagcgtatcgtcaccccaaacattttctcgtgctcctttgtaatccctcccacccccatccctttctgtcttgatagctgcaagtgcattttttagatttttatataaatgttgtcatacagtaggtattcttttgagtacatactggcttcttcactcaatataattattttgagattcatccrtgctgcggaatgtgttaatagcttattcctttttattgctgagtagtattccattgtatggctgtacacaacttaccaatttgcttcttgatagacactgtttgtttccagcttttggatattacaaataaaagtactatgaacaagtctttgtgtggacatatgctttcatttctcttggttaaatacctaggaatggaatggtcagattatatggtaggtatacattcagtttttaaagaaactgtcaaattgttttccaaagaagttgtaccatttacattttcactgggagagttccagttgcttcacacacttgccaccacttggtatggtcattctttttcattttagccattctagtaagtggtttctcttcatggttttttgtttttgtttttgtttgttgagacggagtctcattctgtcgcccagactggagtgcagtggtgcaatcttggctcactgcaacctctgtctcctgggttcaagcaattctgcctcagcctcctgaatagctgggattacaggcgccygccaccgcacccatctaatttttgcgtttttggtagagatggggtttcatcatgttggccaggctggtctcaaactcttaacctcaggtgatccacccacctcagcctcccaaagtgttgggatcacaggcatgggccgccgtgccccaccttttcatgctttaatttgcatttccttaatgactagacgttgagcatcttttcatgtgcttgctagccatctgtatatatcttccttggttaagtgaccattaagatcttttgcctattttatttattatttttttttagagttggggaggtcttgctgttgcctaagctggagtgcagcattgcaatcctagttcaccacagcctccaactcctaggcttaggcagtcctcttgcctcagcctcctgagtagctgggactacaggcatgtgtcaccaagcccagctaatttttttgttttttttttgtaatgtagagatgaggtcytgttatgttgcacaggctggttttgaactcctgggctcaagtgttgctcccaccttggcctcctaaagtgttgggattacaggtataagccaytgcacttggcccatgcccatttaaaaaattgggttgttttcttattgaaatttgagcatgctttatatattctggttacaagcaagccctttatcagatacatgatttgcaaatgttttctctctgtgtgtggtttgtctatgcattatcttaacatgtcttttgaaaaacaaaagttctcaattttgatgaagtccaatttatcaattttttttatagattgtgtttttggtagatatattaaaggtatttgcttaaaccaagggtgcgaagattttcttcttgtgttttcttctcttgagttttatagttttaggcttcacctgtaggcctatgatckattttgatttttttttttttttttcgaggtggagtttcactcttgttgcccaggctggagtgcaatggcactatctcggctcaccacaacctccgcctcccagattcaagcgattctcctgcctcagcctcccgagtagctgggattacaggcatgcaccaccatgcctggctaattttgtatttttagtagagacagggtttcaccttgttggtcaggctggtycggagctcccgacctcaggtgatctacccgcctcaggctccgaaagtgctgggattacaggcatgagccactgggcctggctattctgaattttttatgcggttcaaggaatggatcaaagtagttgttctttgttcctctttcttcctcctcctcctccttcttctcttctttcttcctcctcttcctcctcctttttttaacttcattttgtagatgaactccttccttccttcttcctttctttcctcctcctcctcctcttcatttttctttcttccgtgtttcgcagtaccattctgttgaaaggcctgttctttcttcagggagctgcctttgcacctaggtctttaaaaaatgttttttctcagcartgttgaaaatttttcagtgtacaggacttcacatcttttgttagatttatacctaagtatttcttattttttgatactattgttaatggtaatttttaaatacctgaacttacagtagagtttgtatagaattgacatcaattcttcctyaaatatttggaggaattttccattgaagctatttgtgcctggagtttcctttgaagatttttaactaaaaattcaattccttttagggctgttcagattgtttatttattttggagtgaactttgcatttcatctttcaaagaatttgtgtatttcatccaaattgtcagatttattgacataaagtttttcatactattaccttattcttcactcctctgttagcctttatactttctctggaatccacagtgatgacatctctcttctgatagtagtatttttttttttttaagatggagtctcgttctgtcgcccaggctgcagtgcagttgtgtaatcttggcttcctgtaacctctgcctcccaggttcaagcgattctcctgccttagcctcctgagtagctgggaccacaggcatgtgccaccacacctggctaatttttgtatttttagtagacagggtttcgccatgttggccaggctggtctcgaactcctgacctcagatgatctgctggatcatctcccaaagtgttgggattacaggtgtgagccaccatgcctggcctggtattttgtattctttatttttttttgctgatcagactgtctagaggtttattaatattactgatctcaaaaaaacaacttttgtttttcttattttctctatttttctgttttcaatttcagtaatgtccactctcatctttattatttcttactgctgggtttcatttgctcttcttttgtaatttccttttttttcaggttcaagcgattctcctgcctcagcctcccacgttgctgggattacaggcgtgcatcaccacacccaactaatttttgtattttagtattcaccatgttggccaggctggtctcgaactcctgtccattcaccaygttggccaggctggtctcgaactcctgacctcaagtgatctgcctgcctcagcctcccagaatgctgggattacaggcatgagccaccacgcccagcccttgctggttttctatctgcttgktctatcaagagggttattaaaagctctgactttaattgtggattcgtctattagcagttayagtagtttctgtttcatgaattttgaagtttcttttgtaaattttaatagatacataaacatttaggattatgtcctcttgaatcaatccctttatcattattaaatgaccttctttattcctggtaatatttgcactgaagtctactttgtgtgatattaatacactccagctagcctttttttgagacagagtctcactcctgttgcccaggctgtagtgcagtagcacgattatagctcactgcagccttaactttccaggctcaggtgatcctcccacctcagcctctcgagtagctgggactataggcgtttgtcccaatacccggctaattttttgtatttttagagagatggcattttgccatgttgctcaggctggtcctgaactcctgggctcaagtgatccttctgcatcagcctcccaaaatgctgggattatggagatkacaggaatgagccatgtacctgcccttccagctatcctttgattagtgttaacatggtatatctttttttattcttttattttctcytatttatgcctatataaagtgagtttgttttaggtaatatgtagttgtatcttgattttttccctacatgacaaattctgcctttcagttggagtgtttagatcgttctgcrtatttattgattaggcaagtttaattaaaatctaccatattaccctttgttttcatttgtaccatctgtytgtcttttttttttccttcttttggattattttttattctcttctatgttggcttacttgccacaactcttgtgttattttagtcgggttcatcattaacttatcatagactaccttcaagtgatggaccactttacctgtagtttgagagccttaaaacagtgtgcttctgtttctctcttcccacctttggtgctactattgtcaaaattttacttctgtgtatgytataaactgcacaatacagtatctgtgtgtttgctttaaataattgtaggtcaacagctttttctttcagaactttaacatgtcacatcactgtcttctaggctgtatcgtttctaatgagaaatctgctgtcatctagatctttgtttttctgtgcatgtcttctttttctgcctgcttttargattttatcgctgattttaagcaawtcaattccaatgtgacttggaattgtattgtttgtatttctggtgcttgtggttcattgagctacctggatttgtgggtttatagttttcatcaaattgggaaattttccccattgtttcttcagatgttgtgtctgttcccccatgtattagggtgtgtgaggttgttccacagcttactgatgatttgcacattttttcctggtattttttcattctgtgttttagttcagagtgtttctattattatatcttcaagtcactaatcttttctactacaaaatctaacctgttaatgttctgcagcrtacttttcatcttaagtgttacagtttttatctctaggtaataggttcgtaaagggccaggcattaaatgttttcagctttgcaggccatatagtcttttctgcagctactcagctcggctgctgtagcttgaaagcagccatagacaatacatatttgtggctgtgttctgataaaacctgattttaaaaacagatgggggccaggcacagtggtacatgcctgtaatcctggcacttcgggaggccgaggcaggcagatcacttgaggccaggagttcaagaccagcctggccaacatggcaaaaccccgtctctactaaaaatataaaaattagctaggcatgatgacacatgcttgtaattccagctactcaggaggctgagggacaagaattgcttgaacacggaaggtgaaggttgcagtgagctgagactgcaccactggcactccagcctgggtgacagaatgagactctgtctcaaaaacaaacaaacaaacaaatgggaagagattgatccagcccatgggctatggtttgctgrcctactgccayttcctcaatggcctctcaccctttggtcccacagagctgcggtgcaaccctgggcagtttgcgtgtcgcagcggcaccatccagtgcatccccctcccctggcagtgtgacggctgggcgacttgcgaggatgagagcgacgaagccaactgtccaggtgagtgtgttgagtaggcggggtacacaccaccttgtctctttgttgtagctgggtgactgtgcctcttgtgaggggtggagktgtgtgctgtcttaacacattggaaagttagtttgagccgaccccttcctytctctctgtctttctgtctttttaaaaaataagtgcccaacctaggcagatcccagaacttgcaagatggcagggctgtggggaggcccgtgagatgcccaggaggctccacttaaggaggcgctgcactccctggacttggatgatcttgagtgtgaacccctcctgaggggtggcaccttggccacctctctgaccttatccccatcctggctctggatgtgggtgcctcttgatcctgaatgtgctcttttagactggccttggcacgccctcccctcctgctcactcattcacctggaactttgcactcacaggttctctcctggccattatgtagtctcctaaagatgtatggaaaggccacaaaaaggctaaatcggagaaccaggttcttcacctggtttctgcctcagcaccctcaaggaatacagggcaccccatgaataacaatgttcactggatccgttgttctcaactttggttgggtgggaggtgtagtgagtacttgtgcatgtgtgtgtgaatgtgtgagacatacatatacatgtatccatgaattcgtttttaagactaggtggtgctgataaagccactaaggggaaagtgtgtcttaccccagcttgagaatcacaggcttaaatgctttggccagacatgcagactccttcacaagctggtttaggtctgctttgccaacctgatttatcactacttccccttcagtggctcagctgggctgtttcttgtgcccaccccattaataatcttgtagatgtgtgcttcctttatgttttcctggaattctcttgttctgtttctgcatagacaagccttaccatccttcaaggtgtagctcagatgttaccccagtgggagaatgtctgtggtccctcattttatagattggcttcttccagtcccccattcgtccctctcttatagcatcagaaccattggtaattctcaccattcctggtgcccaggcttgatttttccatccagaccatgagttcccagggggcagagacctttctccttccttagtgggacttggcctaggacatgaaaggtgtgctgtaattcctataggcttagtactgaaggaamaccaattcattccaaccagggtattaggtaggggattaggtgacatttgaacttgtggtagttctttgagggggggttccaaaataagaagcagagatggtctggtcagattgtatttgcctgtaaagaatgctgtttaggcagggtgcgaaggctcacacctgtaacccaacactttgggaggctgaggtgggtggatcgctttaggccaggagtttgagatcagcttggccaacatagtgaaaccccgtttytaataaaaatacaaaaattggccaggtgtggtgctgcacacctataatcccagctactcaggaggctgaggcacaagaattgcttgaacctgggaggaggagattgcagtgagtcaagattgtgccactgcactttatcctgggctgcagaacaagactctgtctcaaaggcaaaaaaaaaaaaaaaaaagccaggtgcagtggctcatgccttataatcccaacacttttggaggccgaggcaggcaggatcacttaaggtcaggagtttcagaccagtctggctgacatcgtgaaatctcatctctactaaaaatacaaaaattagctgggcgtggtggcgagcacctgtaatcccagctgaggcaggagaatcacttgaatccaggaggtagaggttgcagtgagctgagatcatgccagtgcgctccagcctgggcgacagagtgagattctgtttcaaaaaaaaagaaaagaatgctgtttagagggggcccctcctgatcatctctggagcccattcttcatcagattatgcgtgtctctggtagaggtgtttgcctttccaaatgagggtttggatggtgttggcccggtcaggagcctctgggacagtcctttgtctgggrgcctctctggtgggtctttggggtcaaagcccagagaaagtggattcccagtgggcttcccagtgcttgggctgctgaagttccctggttggtcagcctggggacgaccatgtggttatgagtgggagcctccccttgtctgactcatagagtgagaccttatatccagcctcttggagaattcctgaagagagaaccagatgattcttggtttgctttcaaatggaagcagagtttatttgttgttctcaaagtgccatttggctttgcttttgtagttgtttgtaataactgtcctgttacacacgctgaacatagtggtatccacactcatagttgccaccttgttcatctttccacgctctgaagacttgttgaaggcaaggagtaggttttatttctcttgaccacatggcctggcatggagcaggcatcaactttgcacttgagtattggcttgaagttacattggttgccatwtgttttccctagacagaaaaataaaatctctcatagaagccgaaagttacgagtggtggcctgcaccagggctgagcagtgaaggcwtgacaatgaggacccgtgtgtgcaagccccctgaggcttggtagggcctaggagtgttctgggtgggctgaggaggccactgccctgacaaggctcaccctgcttctccttgactcacggtcctatgattgtccttgtatagtgctgtgtcacagtctggagggtgagcagattgatttcttttttttttatttgagatggagtctcgctttgttgcccaggctggagtgcagtggcgccatctgggctcactgcaagctcygcctcccgggttcatgccattctcctgcctcagcctcctgagtagctgggattacaggcgcctgctaccacacccggctaattttttttgtatttttagtagagacagggtttcaccgtgctagtcaggatcgtctcgatctcctgaccttgtgatccgcyctcctcggcctcccaaagtgctgggattacaggcgtgagtcactgtgcccggccaagcaggttgatttctaattgttcttaaagttgagattctgagcaaattaagtcataaaaatgtacaaagaatgtgtaatacgtattttcttacttycttgaattaatgactgctaaatcttgtgattttttttctagtttattttaaaagaaatttttaaaaaatcatagatatagagtcaagtcctcattgacactctcccttcccccaacctcctcccctctcaaaaaaggaaactctttgtgtttgtgggggaagtagagagttagctaataaccacccttgctcaaaagctgtgaccttcctttgtatgaggagagtttcagtaacccctagggaagccctgggccattctcagtcaagttgcttttgaactagacttcaggacttctggagttaccttatggggttacttcattgccctgctaaaagcctgctaaaaaggagtataaaaaatgtaaaaccaaagggacaaaaaaaggggaaagatgtaacagtagatcagtaatttctgcatgtttttgaaaagagggaaatgacatgctaggtacagcctgggcattcagtaccttcccactcactcccttctgggcttgtccgtgggtttcagaggctggaatgctggagcagtagcactcagaaccacctggcagcaggcttctgtgtgtcatttgccctatgacatgtgtcttgggaaatgtggcaagtggaagggaggtggaacctttcttcctcaggccatagtgtatgttgggggtgtgcatgggcttagatttttgaggtgactttttgcagtggcttctgccttcccccactggccagctgtctcagggctgcagagcagctgcagtattggcagcagatttttgcagtttcctaacctatagatggcagtagtagcttcctgactcttgacaatgactgtgggaattagatggggagttagcccactttacttttgctcacactatatagccttgccagttgttttgaaagcacctattttctgtattaaacccttcgtgttagaaatcccttagcatggtttctgttttcccagtggaaccatctttgtttttttttttttttccaaggcagaagaatttttcttagtacagaacaaaatgaaaagtctcccatgtctacttctttctgcacagacacagcaaccatccgatttctcaatcttttccccacgtttcccccttttctattccacaaaaccaccattgtcatcatggcccgttctcaatgagctgttgggtacacctcccagatggggtggtggccgggcagaggggctcctcacttcccagaaggggcggctgggcagaggcgccccccacctcccggacggggcggctggccgggcggaggcgcccccccacctccttcccggacggggcggctggccgggcgggggctgaccccccacctccctcccggacggggcggctggccgggcgggggctgaccccccacctccctcccggacggggcagctggccgggcgggggctgacccccacctccctcccggatggggtggctgccgggcggagacgctcctcacttcccagacggggcggctgccgggcggaggggctcctcacttctcagacggggtggctgccgggcggaggggctcctcacttctcagacggggcggctgccgggcggaggggctcctcacttctcagacggggcggctcccgggcaraggggcccctcacttctcagacggggcggctgccgggcggaggggctcctcacttctcagacggggtggcccggcggagacgctcctcacctcccagacggggtcgtggccgggcagaggtgctcttcacatcccagacggggcggcggggcagaggcgctccccatatctcagatgatgggcggccgggcagagacactcctcacttcctagatgggatggcgacagggaagaggcgctcctcacttcccagactgggcggccggtcagaggggctcctcacatcccagatgacgggcggccaggcagagacactcctcacttcccagacggggtggtggccgggcagaggctgcaatctcggcactttgggaggccaaggcaggcggctgggaggtggaggttgtagcgagccgagatcacgccactgcactccggcctgggcaacattgagcactgagtgaacgagactccgtctgcaatcccggcacctcgggaggccgaggctggcggatcactcaaggttaggagctggagactagcccggccaacacagcaaaaccccgtctccaccaaaaaaaatatgaaaaccagtcaggcatggcggcgcgcgcctgcaatcgcaggcactcggcaggctgaggcaggagaatcaggcagggaggttgcagtgagccgagatggcagcagtacagtccagcttcagctcggcatcagagggagaccgtggaaagagagggagagggagaccgtggggagagggagagggggagggggaggggggagagggagagggagaggggaaccatctttgatataaacgagaattaacaaaagatgtgtaaaatttttgagggagaaaaatttgcagttttattaagagacattaaagaagacaagtaaatagtggcagaatgttcttgcctaggaagaccgaatcttttaaaaactcatattgttctgtggattcagtgcatctttaaagctccgtgagttttatgtgaaatgcgataagtcgattctaaaatgttgagaagaattaagtcgtagtattgagaggtcgttgtgaagaagaggaatgaggagggagcacttgccttgcccgtatcaagatttacttcaaaattggctcagggaaatccaaattggccagtgagacagaagctgtcagaaacagacctaagaagcttgaattccagaggtggaattacatatcgctgtgcaaagggcagactcttcaaacacagtgctgtgacagtcggagaaggatgcagttggatccctaactcacaacatacaggaaattcagttttggataaattataggagactatctttaagaccttgatagggaagtgtgcctttttctttttctttttttttttttttgagacaaggtctggctctgtcacccaggctggagtgcagtgacacgttcttgtatcactgcaacctccgcctcctgggctcaagccatcctcctacctcagtctccggagtagctaggactacaagcgtgcaccaccatgcccggctaattgcatgttttcgtagaatcggtgtttcgccacgttgcccaggctggtctctaactcacgagtttaagcagtctgcctgcttcggcttcccagagtgcctggattacgggggcatgagccactgcgcccagccacctttttcttttctttctttctttctttttttttctgtttttttttggagatggagtttcgctctgtcacccaggctggaggctggagtgcagtggtgcgatctcagctcactgcaacctccacctcctgggttcaagtgattctcctgcctcagcctcccgagtagctgggattacaggcatctgccaccacgctcgtctaatttttgtatttttagtagagacggggttttgccatgttggccgggctgggctcgaacccctgatctcaggcgatctgcctgcctcggcttcccaaagtgctgggattacaggtgcatgagccaccatacctagcctctggccacctttttyttaatcacataaaatattcactctaaaataaaaatgactgaatttgctagattaaaattaagatctctcgtttattgaaagacaccaataggccaggtgcttatgccaggaatcccagcactttgggagaccaaggtgggcagattgccagagcccaagagttccagaccagccagggcaacgtggtgaaatcctgtctctatgaaaaaaaaaaaaaaaaaaaaaaagaaataattagccagatgtggtggtacacacttgtagtcccagcttctcagtaggctaaggtgggaagawtcacctgrgtccctgaggtcaaggstgcagtgagccgagattacaccactggacatcagagtgagaccctgtttcaaaaaaaaaaaaacaaaaaaaaccccaaaaaacaccagtaaagactgtgaaaagacaagctagagtagagagaagatatttgcaacacttacagcctgtaaaggataaggattctaattcagtgtatataaagaactcctataaagcatttcgtagatggtgattaaacatagaaaaagacatttaaatttaacctcgttagtattctaagactacatacagtgagataccactttacagatgcttagactggcaaaaattaaaatgttggagaagatatggatagtgtggaaattttatgtgcttctttacacccactctggaatagagacattatcttgcaaagctgaacattcttatttyctgtgatccaggatttctatttagggaaactctggaaaaatccttgcagaattgtttgtacagtttttccagagtgggtgtaaaggagcagataaaattccaagccatccacatcctctccaactcttggttttgtcagacatcttaatttttgccattgatacatgtcttggaaacaacccaaatgtctgtgctcacatgatggwatgttatacaccagcaacagtaagtgaatgttaggtttatgcagcaacatggatgaatcttgaaaacagaacgtcagctaaaagcaagttgctaaaaacgacatatggcacaatatagagaagcaaaacagatcgttatattacttatagatacatacacatgtggtaaactaaaagaaaaaaataagcgcagtgatacacaaaattctagttcctggtggagagacagagggatataagactgggagaagcaaaatratgcttgakttcctaaatggggtgtggggaggtcgctcacaactatattattaggcttatgaatcttacatgtgtgctacatacattctttgaaatgtttcacatattatacagcttttttyctttccaaagaaaagccaatgggagagttaaactgacctggtgtagcagagcagctgcaaccatgggcctgcttgagtgagaacaacaagaaataagcagtttgcccagcagcctcccagaaaggctcagcgcttgaaggctctgagtgccaagggtggcaggcatcaggcataggcatgggagtgggatagggattggtggaattctcttggcactcgcattcccttcttcactttccatcactgggtgactctttctgctaccataagatgtggggtttcatttcttttttttgagacagagtcttgctctgttgcccattggagtacagtggtgaaaccacagctgaatgcaacctcaaacccctggactcaagcgatcctcccacctcagcctcctgagtagctgagactacaggcgtgtaccaccatgcccagctaatttttaaattttttgtagagacgaggtctcgccctgttgctgaggctggtcttgaactccggggctctagcaatcctgcccccagcctcccaaagtgctgggattacaggcatgagccactgtgccccgcaggagttgattttctagaccaacactgtccagtgtagtagccatgagtcacatgtggctgttttgaaggaagatgtgcagcaggtgtaaaatacacaccaaataggaaagacctagtacaaaaaaagaatgtaaaacatcccatgaatacttctttatattgtttccatgttgcagtaatagtattttgaatatattgggttagataaagtattaaaattaatttcatgtttgtttctacttgttgaaatgtggtttgcattgtgtttctattagacagcacttaaagtctgcaaaataagtgacaccaggtacaacagaggggagtcgtggaggttgaaaatagaggaattaagagaaattctctgtagtgacaagtaggtaataagtaggatgctcaggcctgtcttctgccctgctctccagatgtcagcagccaggtgttttcccagacaggagattggaggagtcttttctagagacactggcacttcatacaagaggtagaaaagtgtcaacataatggaaggtttccaactgaaagactagctctcccaccgtggtccctgacaagcgtctagcccactaggctcactagagcctctggctagctgggtcaccttcctcttatgatgaaagacaaccagtgctgaccagatctagaagaaaacatccactgtggatattcgccagagtctgaacaaagcacaccagaccagaagggccacagcaaagtggcctgaggcagccagctctgctgtatgtcatatcgtggttaaatgtgggggcttgagccagggactggggctgctcccctgctttcaccacttactggctgtgatcctttgggcaaattgcatccataaaatggagaaaataatagtgcctgtcacttggggttgttgtgaggattacattacatgctacatataaagggattagacaagaatgtagcacacagtaatccctcaattagcagttactttattcatgtaataaaacttaaaaaaatgtattctgacattggtaaaatggcagtccaggaagctccaggttctcgttccaccatagaaaacattaataagcaactagggactagatggaataactttatagaagctctggaaaacagtcagaggtttcttagcccagctaagaaaatgcctaatcaagaaaaagccacattcaaaatacagattgagtatcccttaactgaaatgtttgggaccagaagtgttttggattttggatttttttctgattttggaatatttacattatacttaccagttgaacactccagtgagcatttcctttgagtacaacgttggcactcaagagttttggattttgggctgggctcatatctgtcatctcagtgctttgggagttcaaggtgggaggattacttgatgccaggattataagagaatactgttaagaattgtacattaacaaattgcttaacctaaatgaagcggacacattcctagaaacatacaacctgccaagactgaatcatgaggaaatagaaaatctgaataggactataattaataaggagattgaatcagtaatcaaaaacctctcaacaaagaaaagtcctgaaccacatggcttcactgatgaattctccaaacgtttaaagaagaattaacatcagtccttctcaagtgaattcattctgtgactctaacatgccctgataccaaagccagacagtaatactactagaaaattacagaccaatatcctttgtgaatattgatacaaaatcctcaacaaaatactagcaaaaccaagttaaccaagtttagcagtctgtcaaaaggcttggaccaaatgtaatgcaaggatgtctcagcaaactaaaatcagtcagtggtcaaagactgaaagcttttcctctaagatcagagacaagacaaggatgtctgctttcaccacttattcaccatagtattgaagttaattgcccacagtaattaatcaagaagagaaagccatcaaaattggaaagggagaagtaaagttatccctgtttgtatgtgtgacgacatgattttatatataaaaaccttaaagatttcacagaaacatggttagaactaataaatgaattcagcaaaattgcagggcacaaagtcaaaacacaaaatcagttgtatttatatttatgtacactaactcagctatctgaagaggaaattaagaaaataattccatttacagtaatagtacaaagaataaaatacagatattcctcaacttataacagatttatgtcttaaacctattgtaaagtcgaaaaattttttagtcaaactatcataagttgggggtctgtctgtactaaagaatattcttaagtacacatgaaagactgaaaacactgacaactacaaaatgttaaaagaaattaaagaagacactgggtgtggtagctcacacctgtaatcccagcattttgggaggccaaggcgggtggatcacttgaggtcaggagttcaggaccagcctggccaacatggcaaaaccttgtcttggtgaaaaatacaaaacttagctgggtgtggtgaggtgcacctgtagtcccagctactcaggaggctgaggcaggagaattgcttgaacccagaacgtgaagattgcagtaagctgagatcgcaccactgcactccagcctgggtgacagagtgagacactgtctcaaaaaaaaaaaaaagacaaaaataaattgagagatgttccatgctcatggactgtaaaacgtaagatgtgactattacctaaagcaatctacagattcaatccctattaaaatgccaacaagttttttttgctgaagtagaaaaatttatcctaatgttcatagaatctcagcagactccaaagagccagaacagtcttgaaaaagaagaagaaatatgaaatcctcataattcctgactttaaaccttattacaaagctgcagtaatccaaacattgtagtattggtataaagacagacatatagaccaatggaatagaatacagagccttagcaataagtccttgcatacartggtcaaattattttccacaaggatgccattaccattcagtgagggaaaaagtgtcttttcagaatgaatggtgctaggaaaactggacatacaaatcaaaagaataaagttagacccttagctaatgatatacaaaacttaacccaaaatggatcaggcttaaayttaagaccttaaactataaaattcttagaaaaacataataaagtcttcgtgacactggatttggcaatgatttcttacataagacacttaaatcacaggcaacaaaagaaacaatagataaattaagctacgtcaaaatttaaaacttctattaattaaaagaagcactcaacagagtgaaaaggcagcctacagaatggaaaacatttgaaactcatatctggtaagggttaatatttaaaatataaaaagaattcccacagctcaataataataaatatcctggttaaaaaatgtgcaaaggactgggtgcggcggctcacgcctgtaatcacagcactttgggaggccggcggatcacaaggtcaggagatcgagaccatcctggctaacacggtgaaaccccgtctctactaaaaaacacaaaaaattagccaggtgtggtggcgggcgccttagttccagctactcgggaggctgaggcaggagaatggcatgaatcctggaggtggagcttgcagtgagccgagatcacaccactgcactccagactgggagagagagcgagactccatctcaaaaaaaaaaaaaaaaaaaaaaaatgtgcaaaggacttgagtagacatttctccaaagaagataaacaaatgactgataagcacattaatgattagagaaatgcaaatcaaaacagcagtgaaatagctcacagccattagatgtttgctgttgaacaggaaatgacaagtgttgacgaggatttagaaaaagtggaatccctctgcggtgttgttaggaatgggaactggtgcagctactaaaacagtatgacagtgccacccaaattaaaagtagaattacctgccgggcgcggtggctcacgcctgtaatcccagcactttgggaggccgaggcgggcggatcacttgaggtcaggagttctagagcagcctggccaacatggtgaaaccccgtctctaccaaaaatataaaaaaaaattagccgagtatggtgatgcatgcctgtaatcccagctacttgggaggctgaggcaggagaatcacttgaacccaggaggcgaaagttgcagtgagctgagatcatgccactgcactccagtctgggtgacaggacragactccttccccccmaaaaaataaagtgaactttaaaaaawaaataaaataaaaatacaaaaattagcygggcgtcatggcgcacgcctgttaatttcagctactggggagactgaggcaggagagttgcttgagcctgggagacggaggttgcagtgagctgagatcatgccactgcactccagcttgggcgacagagcaagactctgtctcaaaaaataaaagtagaattatcatacaacttagcagttcgactccaaagaattggaagcagagacttgaagagagatttgtacacccaagttcatagcagcattactcatagtagycaaaaggtggaagcaacccaagtgtccatcacagatgaatggatcaacaacaaggtagtctatccatccrgtggaatatggtttaccttaaaaaggaaggaattctgacacatgctacagcatggatggactttgaggatatgctcagtgaaataagcctgtcacaaaataacaaatactgtatgtttccatttagatgtgctatcaagatactcaaatgcatagatacrggaagtagaattgtggttgccaggggctgggaggagagaaaaattgggaggtaatgtttaatggatayggagtttgtttggtaagatgaaaagttctggagatggatggtggtgatggttgttatggaactaatgtgaaggtacttaataatgccacttaactgtacactctttttttttttttgagacagagtcttgctctgtggcccaggctggagtgcagtggcacgatctcggctcactgcaagctctgcctccygggttcacgccattgtcctgcctcagcctcccaagtagctgggactacaggcgtccaccaccacgcccggctaattttcaccatgcccgactaattttttgtatttttagtagagatggggtttcactgtgttagccaggatggtctcgatctcctgaccttgtgatctgcctgcctcagcctcccaaagtgctgggattacaggcgtgagccactgcacccagcccaactgtacactcttaagtggttaaaaatgagttcagaaaatccaatatctgattaatacaaattccttaaaagaaaatagaggagatgggggaggagggaattagcaaagaagttatataagaaaatttcccagaaatgaaagattgtatccttggattggaagggactggcacaataattttaaaaaggcctgtataaattacctccttgtgcagctgcagcacgttggtaatgcagaggacatcaacccctgtagcgggaaacctgggtcacaataaaaggatcaggaatcagagcagtagaygcctcagcggcagctccgatgtaaaaaaaaggtggggcggggcatcccagatctgtagaggaactgattttgattgtctacttcaaatttttagttttatctttattcaagttacttatgcatacaatttgaatattcaaatgattctgtaagtcttttttttaatagcaaaccctatgaacccctctaattttcaaggcaaacattgttttagctgtttcatttggtatttatctgtgtgtctttaaattccgtggttttaggcattctctgctgattcttccctaagcctggtgggtgagtctgggccctgtgctctgtgaggtcttgcctgctttcagtgctgctcctagctgggccatgcaggagcactccgtttcctttttgttggcacaacattgtgttttcactttttttttttttttttcatcttgctctgtggcccaggctggagtggagtggcgcgatctcggctcactgcaacctcctaggctcaatcgattcttctgcctcagcctcctgagtagccgggattacaggtgcatgccaccacacccagctaatttttgtattttttagtagagacagggtttcaccatgttggccaggctagtctcgaactcttgaccttaagcgatcgcctgcctcggtctcccaaagttctgggattacagrcgtgagccaccgtgccgagccatgtttaattttttaagaaattgccaagccgttttccaatttggtgtgaatcctgtagattcatatatatcttttctttttaagtacctagaagtctctttcctgatgtcccctcagttacagatctctatcagtcagagttctttggcccctcctttcccagacgcccctggtggtcctcacctgtcagtgctgctgggccagcttccccgttcaccatcagtgtgggagaatcagtcactctcacctgtgtctccttgcgttggaacctctggtgtttggtttttatatctttcctgttttgttttattccttcattttagtcgagtactgccccacttatgtggaaaaggaacataggagacaaaggtttgtgtttccttgtttgcatgtctgaagtgtccttattttacctttgcacataagtttggctggttttagaatcataagctagaaataagtttttcccataattttgaaggttaagcttactccatttttactccaacaccagtgttgctggtgacataatttttgattctttgaacataacttgttttcttcctggaaattttgcgtatcttttgaaccattgcactgcctcctcagtgggtcttttcatcttagactcatgccttacagcttagggaaaggggtcactttcctgttctctgttctattctgttttcttctctgttccctttttctggaactctttattattgggaattggagctcttggattgattcccagttttcgttttctcctctgcagttttccatctctttgattattttacttttagtaggtttctataacttctgccaaatcttttatgagttttcatgtttgctgtcatgtattcagtttttttttgtgtgtgtgacaggtctcactgtcactcaggctggagtgcactagtgtggtcatagctcattgtagcctcaaacagctaggctcaaacagtcctcttgtgtcatcctcctgagtagctgggactataggcatatgccactatgcccagctaattatttttatttttatttttcatagagacagggtcttgctgtgttgcccaggctggtctccaactcctggcctcaagcaatcctcctgcctcagcctcccaaagtgttgggattacaggtgtgagccactgcacctggcctcctgttcatttgtacaagatcattttcagaggcaagtaatgatggatagtgttgtctgcattttccttttttttaaaaaaaaattttatttatttattttttagacagagtcttgctctgttgccaggctggaatgcagtggtgcgatctccactcactgcaacctctgcctcccgggttcaagtgattctcctgcttcagcctcccgagtagttgggactacaggtgtgtgccaccacgcccagctaattttttgcatttttattagagacggggtttcaccatgttggccaggatggtcttgatctctttaccttgtgatctgcccacctcgggcctcccaaagtgctgggattacaggcgtgaggcaccgtgcccggtccatgctccttcttaatagcacccttttcttgtttcatgagtacagtagaacctctcactttgaggatgttaatggcctgtttttggttttaactttttgtctctgtacttgtttcttctgtgctattttcctctgtggtttgggtctctgcctcagaggtttggtggtccttccctatctgctgtatgtggctgagggacttgaagttctgtgcacgtgggcttccctggagggtgaaccagctggatatgtttcgttgggaatctcctcctgttggggactttcttcttgacctggtcagattttttccataaaggaccatttcctatctgcctggagcctggggttctgagagcttagtggaagaaaaatggcgatggggaatctgtcctctcttccctgagtaaagaaccctgattttcagctgaactggtgtcccctaacccagacaccacctgttttatcttcttaccagttaactcttgatttgtttactgcttgagttgtgggaggaatctgggtgtgtccacctgccttgtccctgcgcccaccttttaatatgaataatttcagatctataraaaactcataatcatagtgcaataaacactcctgcagcctttacccgggttcaccagctgatagtgtcctgccgcacctttacccgggttcacctgccgcagttgctctttgtgtttttcttctgaaccctttgagaggttacagatattatgatattctacccctaaatactatgatcaaaaaataagaacaatcctctacagaagccttttcacatgcaagaaatttactgtagtactattctgtgtaatccatattcagattcttttcattatccccagaacatcctttacaggtttctttccccttttaattcaagatttattcaaggattaatgtaagtatgttattgccgtattgctttgttctttaatctagaagtattcccagccctcttttgcagggggctttgggcgtctttcatgacattgccatatttgaagagtccaggtcagttctgtagaatggcrttcaatttggacttgtctctttcttcaggattagcttcaggtgagactttttttttttaggtagcaatactatgtaagtcataaattatcaaatcacgaggcccaaggtcattttgtctcattattggtgatgttaagtttgatcactattgtgaatatttctttccctttttgtgacgaaaagtaatttgtgaataaatagtctgtggagtggtattctaggtattctccctgattctgtttccttgttgaacttgctctccagtgtgttcctgtgctggggaagcagcagcgtggcactctagtggtgctggaggcaggaggggcacatgtgctccgagctgcacaggtcatggagcccagagtcggagcagatgtggctctgggtgctacagtgacccctgcaccaggtccccagctgggctgtgaggcagggctgctcgggccccatggccctggtggaggtggaagaggccccccagcttaccaaaggctggccctccgcgggaagagggacattctctactgtcagaggcaggcctgagaggtctgtaagggttctgtcctgtgctatgcgcattccccagcctggcccccagactctcccccaggacactgtctgacatcagcatcatcttgacagccaagcccttccccttcttgctggcaaaggcctgtgtctgtgctggcaggtttccatggtgggcccagaatgggcattgaataaacgtgggggtgaggggatgaatgtgagcatttggatatggagatgcatgatggaaaaaagaaagggctcacaattgccacctaaacccagagaagcctgctcaacagagtggtgtcctttatcaccatttggctttctggttatgtttctgaaatatttcacctggtctcccaccccagrgggcagatgacttcactcagtcaacatgtaacaacctggtctttggtgcccatgtgacctggcagcactgtccctctgttatctcttctttctcttccctttcctctgccctcagttcatcttgtctttctgtgagcaattttaccaggtactgtgcttggcttggggaagaggccaggatacaaagtggagccacaggtcttgcccatttgagcagagggagatgttgaatttaagttcagtgacattctccagccacrctcaggcctggcctcaggtttatcccrgatatgtctgcctttgccctttgccaaagctgctccatctgccagaaagcccctctgttctttctcagyttccagtctcaggcccagaagctcaggtggctcttcccttctccaccaagtgctgatgccccatccyagtggctgcatccctgcatcagagctaccagcgagtctgtgggtcgagtctcctacccagagtgtcgggtgctgcaggtagcatggcttaggacatgggaccagtcctaaagagctgatggtccccaagtactgcgtgtttacagcatcaggcctgtcgtggtgccagttactgtcccacactgaggtccttaggttgtattttggggtggtaaagtaccccaaagacacctctaccaaaaaacacaagccttgaagatgcttctccctttgaggtcttcactttctgttgaaagtgtctcggacacaggtagcatatttwatatttwagtgattcccagtcgaatagcaacccatccccatcacatgcctgacaggagctatggaactatgcttattgagtactgagtgagtatccagagtctcagaaatgagactacatacgcacttgtgtacaaggtgtttaaggcagccttttctagaataatgaaaaaaatgcaaacagcctaacctcaaaccatagagattatggggatgaaagaaatccatttgtggaatactatgcagccatcaaaagtcatgttcctaagcccatttaaaaatatagaaagctgtttatagtcttaagcttacaaagcaagtcgtgaaatggagtgtctgatgtgatcccagtattcttaaagatttgtgtagaaaagagacttggtgagggggcagatgctcgcatagttaaatatggcctttgttgtttattgtcttttcaaacttttgtatttttcaagcatttcacattgaatgtttgttactttatcatgagcaaaaaagcatgtggattttttattaaataaaaaccattgcaaagtctatgacactagcagaaccaacctgctggagaggggctcgtcaggtggcgctgactgccggttcaggttcagggaaggaggctttgcaggaggcctcctaaccctccctgtgacctcccttggggagccgaggccccactcgccatctgcagccagagtgcacttgctggcaggcgtctgtctgtgtgcagccttgcagaccaagtttgtttcccatctgacctgaccttgtacccgatgcccttcatgacacatcagggtacacctgtacagagtgggaggtgagcgggcccatgagggccctctcccctgcaccatggccttgggtaagtcactccccttctctgagtctgcccttcaccttgtgagatgggaggagtgtggttctcctttttcacaagggggttggaggacaaaagagagtgtgtgggtggaagcactggtgtgcaaattactattagatcatgctgtataaaactatagttatttcctcatcttcagctgcctgttgacaccttctagccatgcactgagacctgctgcacaccagggcctgtgccaagcaccaaagagccagacaggaacatactgaggtcctggcctggaggccttcacagccatgggggaccagcaggcagggggacagataggcagctcaggccccaggacaagggctgcagaggaaggttgcacacgtgggtctccttcatactgggagagaaggccctcaaggaaggggtaggggcagcctgggctctggagagaactctttcatgggccatccccatggggctggaactgctgagggattttaatttatgcaggaccctttgctgtgctakcaatgacctgttagaaaatgcaatgaagagggcctccatttcacaatagtaacttaaaaaacaaaaactgccacggcataattttaataagaagcacacgggacccatttgatgcgagcggcagtgtttcatagggctctaaagaaagcctgcattgccggactctgtgctacaggccccccctccggccttgcagccctgagtggtctgaaccatgctggccagggagactgcgactgcacaggcaggactcacagcacacatctccttttgctttcagaagtgaccggggaggtgcgtcctcatcatgggaaggaggctgtggatccgcggcaggggcgggccagaggaggcgacccttcgcacttccacgcggtgaacgtggcgcagcccgttcgcttcagcagtaagttgcagacctgccctgactgggacactggggagtgcaagcctgacatgacccctgcctttccagcrctactgtgctgcgtgaggggtttctcaaagcagcccttggaggccagtgaggggaatgaatgaggctgcatgatgacccaccygcagtcayccagcgctggagtggtggtatgtgactcaaggccctaggaagtcaaccggctctgaggccaggctgcttgttctcacaaagtgactgcttttcagggccagaaggcactggcccttggaaattccaaagttgtattattcccttttataaatgaggaaaccagctctgagtttagatacagcaataaaatgggaaggctcgactccttatttatttatttatttatttatttatttatttatttagagacggagtctcacgcttgtcacccaggctggagtgcagtggcataatctcagcttactgaaacctctgccttccaggttaagtgattctcctgtcttagcctcccgagtagctgggattacaggcacgtgccatcacgcccggctaatttttgtatttttagtagagaccgggtttcaccaccttgaccaggctggtctcgaactcctgacctgaggtgatccacccacctcagcctcccaaagtgctaggattacaggcatgagccactgtgtccagccattttaagraaaatttttaaggtgattagttatttaataaattacctatgacattgaaattttaaaggggcatgagatcatcaaggaaggttgaggggaggaaaagccaccactgaaatggccctgagcagaccctctcaggcgcgaggtacccamgtacgctgagcagcggctgtggaccaggcaggactgatactggatgggcctgctgccctgccttgggcctgtctgcttgtgttactcctcagcccccagactttcagcactggggagcacctcagaggtgaccaggtctgcttctggcagaacccccaccaaccctgggtggccagagtggggccaggtgtttccaggtggtcacgcatgttggtgcggctgaagcagggctggacatgtcctggtgatgcactttgtctccggcctgtgcccacagcccgaacgggtccccacagtgcaagtgtggtgcacaggcttggtgtgtgaagacactgaggctgagaggccacctgtagggaaggggcagttcacagtgcagccccagggggtcctgatgctcagctccatgttcttccttccccttgcctgtctgttcagttttgaacaggcagcacttctgcctgggtagtaagcaactccaccaagttcagaacataaagaagatgagtcagtgcacaggagtgcttcctccctccatgccccagccagctggctcccatcctgggatgtctccttccctccatgcctcagccagcttccctccctacagggcttcctctcaccttgcctgagataggggcctggcctctgcctgcctcagtgtcctcacctcttcatggagacggtgcagagccacctgcggggcatgtggtcaggctgcatgcattggtgtggcacccaggaaacacgcaatgaatgtgcaacacaccttctcgagagctgatgccttgacattttttattgttgttttgtttttttttgtttgtttgttttttgtttgttttttttcagacagggtctcactctgtcacccaggctggagtgcagtggcgcacttttggctcactgcaggcagtctctgcctttktgagctcaagtgatcctccaacctcagcctcccaggtagctgggactacaggtgtgccccaccacacctggctaattctttgtattttcggtagatagggggtttcgccatgttgcccaggctggtctcaagctcctgagctcaagcaatctgcccacctcggcctcccaaagtgctggaattacaggcgtgagccactgttgccagccctctgattccttgtctgcacctaaagagcttccttgcacactcaggtgtacccttcacggtgagcagatggtgctgtccagctgtggccatgcttaggggctaggggtgcccctctttttctgtaatctatgtgcctttatgaagaagtcacacacacacatgcttacataataaatacatggggatacgtgtctagaagttttactagtgccacaagacatagmtgcactttaaaaatggcatttttaattttacaactggctttgctaaaaattgtcactcttctccagtgtactaatatgaggtacccaacatttgaaggttaaagattctataaaasaggtcactggtgttacctaaggtgagctgtaaattaccaggcattcccgtgtgtgggtgtaggagtcggaagtgatgggtggaggaagtgagaggacgctggccagactcattgatactcaagtgctggctggctccttagctttgccacctgtggcatcgcccacaccttatttttttcggctgtgggaggcaggggcgggtcacacagtgtcatggctctcccagctgttatcctttgagctgctgttttagtggagggttggccagccccyactgcaaatgctcatgtaagtagaaaagggagagaggggagtgrgctagctggcagcggaggccaggagagctgggcattggaagcagggcccaaagtgaactgcatgggagttgtgctgtgttgttaacccagagaatgaaatccactttacaagacttaattcagcagccgttcttgactagtgaataaattaaaagatcttatagaaatgggaagagtcaccgaatgtacttgtatcattgaatctgtgttttagagaaacttgagcatttctgcaatgtggtttcagaagcagaccttgtcctcttgagcctcagtttccccacttctctagggtgatttacaaggtgtgcctgtccctgatggagtacatataatttccattttggagctggatcctaacttgggggacaactccccttctgtcctttatgtttcctagggaagtgcccgacagggtggcaccactacgaaggcacggccagctgctaccgggtctacctgagcrgggagaactactgggatgcygcgcagacctgccagcgcctgaatggctctctcgccaccttctycactgaccaggagctgcgctttgtcctggcccaggaatgggaccagcccgagcggagctttggttggaaggaccagcgcaagtgagtcctggattggggacctgaggggctggagtcagagtctgatgactactgagcacatggcctctgaccactcagtaaactcctggagcacagctggcagacagcagsttgggaagaccagyctcgcccactggaagcccaggagatccatgggtaggagtgtgcatcragatagstggaggstcctgggagcaggggcaggctggactctgctgctactttgtgggactgtggggcagcccctktcattggtacccctctccttgtacaagtgcagttgctgagcgcaggcagggggctgggggtgctggcttgtgtggggagaactgcttggtgtggggcttcgtgggccttgtgcaaggggtgtgcagtgtaggtgggggttccccccaagaaagcaagggggccttcgcttcaagacccaagctgggttttgactccacagttatgccctgtgagagtttggcaaatcacaagacggagttgtttttccttctgcagctacaaagggaggaaactaactcttagctcacaggttgttgtactaaccccatgaggacaggcctgtgagtccagtggagaagcaagagggtatagcccggagggcagggcagccccatctctgaggacagccttgtggttgcacagcatagggcagagtgtgccatccctgggctcctgccatgcggggagacctgctgatgggcatctctaggcttggggctggaaagctgggccaagggacatggactaggcaggagcttatggcggtcagccagatgccagtgcaaggtcctttcagtgctaggcctgyatgctcaggagcaggctgcaggcctgaggtgggctggctctgagtgggaagccgtgcaagtgttttcagcccccatggtagtggatatttgcagggacttatgtctttattgagatgcagttcacatgccatgaaaatctcccctgtggagtgccctgtcctrtggttttagcatagtcaccgagttgtattcatggggtttcatgtctaccaagaataagattgtycttgcttaaattgtgaaagctttaccggtttagctcatagaaacagtcttggcaagagttccctgagataaaacttttcctgccctgtgaactttcttgttttgaattttaatgcattctaacatgagtgtctcatgttagaagctcagtgttgtggaggtcagtatagctattaaaaaacaatcccagcactttgggaagccgaggcgggtgggtcatgaggtcaggagatcgagaccatcctggccaatatggtgaaaccccgtctctactaaaaaaaaaaaaaaaaatacaaaaattagctgggcktggtggcctgtgcctgtaatcccacctactcgggaggctgaggcaggagaattgcttgaaccaggaagtcaagttgcagtgagccgagatcgcaccactgcactccatcctggtgayagagcgagactcygtctcaaaaaacaaaaaacacacagtcattgatggttgcatccctcctgccgctgagatctctgtctctgtctctgtgccctgcaggttgtgggttggctatcagtatgttatcactggccggaaccgctccttggaaggtcgctgggaggtggcattcaaaggtgagcccttctggtgkgtgggagtgtttgaagctgggcagagtcaccctgattcggggcctcccctcctccctcttacccagtgctgcctggcccgtaggggtgctgtgcagggagtgggtgagccccagttgcagggagggctgcggtcatggggccagtgcagcctgcagatcaggccctgcattgggcggtggctgtctctggaaccctctgttgcatctcactttggccagctttctagattgtyccccgcctccttttgaagttaaagaccttggagtataaaaatgagcatgcagagtgtgcccctggcaggctggaggggaggacaagcttgccaggacaaaggtcagacgtagaatccagacctgaaggaaactatcaggcagatagagagagagagagagagagagagagagtgagcatgcatgtgtgtgtgtgcgcaaagattttatgcggagctgcttggaaataccaagacgacgtaaaggaaacatggctgctgtttcctttacattccctgggctcggacttggcttgcccttcctgtcccattgccctggcactggcgagctcctcctggacatactccagcagtgccytctccagctgccgccagggtcacactcccttgccctgccccttccctgtctgttgggctgtactttgtgcctgtggcttgagctaggatttgggktcttytcrtaaacacatcccagtcctgctgttgatgtcttaagtatctctaagaaggataaatgaggagtgatgggcctggggacagggttgaaaagggtcaaggcctgggtggccggcttccctggagaaaagagggccccayagaggcggggccatgcctggctgctgggacagggcaggagcagaggtgggggctgcagagcccagcagactggggccacacctgctgtcccgatcctgctcaggacagatgccaccctgttctcatgaccaccagtgccctcctgagagccccagccacatttgcattccctggctttatgagtgcattgtttagattgctattgactaatcaatggcttctgggtttccaggccccagagtcaaagtttgcctcatagagcataattmtcctggtagcttgtcctcctgacactggtggttgaagagaagacatgattctgagtgggatgacagcacattcagagttggggactgggggcctcatgcttggtgtgagaatggcaagggtcctgggtgggctttaatggccaagtgcagctcagtgactccattggagcctcaggcaggagagtgaacctaaaatttagaaaaagattgaacacgtatgttggtgctggcagctgcagctggcatagagctccctatttgtgtggctcaacgtgcaaggggccccacagcatcccggagctccacggaggtgaccatgtgccrctgcctgcttgtgcccagttaaatggattcgggaactctgttagcggatttaaatagtggtcacaaaacaaatagtaacaataacaataattcttctgctgcaggataactggcccttgatgcagctcagcatcatgagtggttctgggcttaaagagattaaagaaacataaaaccaaatgtggcacaagaacccttatggtgtcctaggttgggaggcttataaaatcttccacaggacaattcaagaaatgagtggggacttgtggaagattcattttcttaggtgcagcaataggactgtggttgtgtggttttaggagccagtatcctggagtctgcaggggaggggctcccagggtggtagggcagagaggagccaagcagcagggtgcggtcagcaccgaggtggctcgggtgcacgcactcctctctccatagtggaatcgttttaaaaattcctgtaccaaaagcaagctgcagagtgaagacagtactgagtataaaacaagctagcaagagcacgtctagcccagcccagcccaccccagcctttctcctgcctggggacatggtgcaaagcagagggstcattggggtctgaggtgttggcccccccaaaaatacccaaaaaaccatgggaaatggatgtaagtcatttgttactcattctgaacccttccctaagaaaatattgtacctgagaatatcagctaatgatggtggaagggcctcacattaagatgttgaaaaatgtttctttcatctacatgttgtccatcttttctgtgttgtataatatgttccagattggggtgtgagtgatacyatggtacatagacgcttactatgcccatgtgtcggyaccctgcacacacatttgaagttgggagctcgtttccgcagggttcctgtgcgccttggtggagcgctctccaggcgctcccccaggcccacaccagcctgtgagccccgcctgggggccaagaccctgcaggtttgacagcaccaggtcatgatgtgccctggagacagaactgccgctgctgctgccagaagacatgaggccaggatttctgtaacatttgtgcagaaaggttgaaaaagtacagatccttgtgtagggagaatcatccacaccgycccacgtgctgctcccagggccttyccgtcagcaccagcagtgtagcttctgtctggtgagtcatacttgatatttaccttaaaatataaaagtgaaaacagcgtgtgtttcatgtgtccacatgttgtgtcacttgctcatttaagattactcagtgcctggccctcatttgtcccccgtggtgtctcagcacgcacattgcaggttggctgaggtcaggaggtgtgtgacttagtagaagccttcttttctcccccaaaatcttgtgcccagtcctttatggtctccgtcttcttctttctctggtgctgtacctgagggattgtatggtgttgcccgctgaggccagcagtcaggkctgtggtcctgggccagcctgtgggacctagcgtttagaagcctcagtcagcagtgagggaggggccaggctggcctagcagccactggaaggtgcattgtagagaccctgccctctgggtgagctgaccattggtctaggatggggtcagctggggtcaggccacagttcttggaggggagacagaccctgagtgrggcagctgccaccgtggtggggcattcgggagcatctggacagcccctggtgggcccgagtggaggctcattctgtggctgtggaggtggcgagacaggaaggggaggttctttgagggctcagaaaagtgagtgaaggtctccccaccactcgaacaatgggggactcgggggccggggagggttctccaggctcggcgagcagcggtggacatggaggtggcagtggctgctcgcacatgtgggagaggatgtggtggcagaggtaatcaggttcagatgccctcgtgtatcagtctggggagcagggtgtyctccggtggctggtgacggcccagcccaaggctcccgtcagagtcctgcgcacacctsatgtgtggacatatgggaggggcacctggaaacttgccgccaccctgtcgaggtgaggactggatctgctggggtggcagggggtgaggagtagtgtcttggagggaggcttgagaggagggctctgcacgaggaactgctcccagtcactctggtagccagggcagctctgctcacagggcctttctctaggatgagggtccttcaggaagagcgggatgtttgaggtaagggggtgtccaggaggaagtgggaggccctggwggaaaatctgcaggagtcatccccagtgcagtatcgggaagcctccaggctcctctcacacctttggaatatgtccaggatctcatcacctggcaccagtcttgcagcccccaccgggatctaacacccaatcatccgtcacccgattgtgctcgtggcctctgtctggtctcctggccccagccccaccgctcctcacacagctgcygggggtccttttcacctctgctcccttgttcacagctctcgtttctcatagaaatcacagttccatcaaggccagcagccccttccttcactaccctcatcacctaccactccccagcctcttctccagccccacaggctgccttgttcatggctgccactgtgacctcttccagggatgctccaaagacgaacacctgcccgctctgcaaggctgcacctcgggtaggcatgcagtgcccgcatgaccagcccccattcagcacctggatgcagagccaccagcagctcccctgggcaggggcgctacacaggtgcccatgcagcttgctgccaggagggagcactgtgtggctctctgggccctggcctagagtgccacacgaaccctgttttgctggttgcctgactcactctgacttgctgtgccccggtccaggcagctttcgtgggcaaatgctgggtcccaggactctgcccggagaggtcatttgtgtccttggtctcagtctgctgtcatgtactgtagttgtgggcaggagctcttagctggcaactagcttcagcgctgaagattttttgtttgttaaagattggaaggaacctgtttggttttcttgccacgggacaagaaggcaaatagtgaagaaaacagtgtttaaaaggggaggggctctacttaggtgagaaggcatctgtgggagatgaggagggtgtgcaggggctcgggggcctggaggaaaggtggggtggtgcacagcgtgatggtggtggcacccactgtcagcagtggagaccagccctccaggtggtatggggaggtgactccagacagtgggcccctttcctgctctgctgtgggtctgatagatgcagatgaggcaggcgagatgctgggcctgtatgtccctgggaagggggcacagctgttgctgtggctgcctgctggccyggcacaggtcttgcaggtctcagagcttcctgagagctgtcctcctgcccatggcagggcaccatgtgtccacaggcccacagcataggcctgcctccagactcactggcttttttgaggcagagccccatgtttcgtgctgggtataaacagagctccaaaagacgcaggtgagaatgctggaggcttataaatggggtgagctgcactgctgctgtcttaggagggggagagcaccaggtgtgccttcattattctgcttcttggaaaggttgctttgtgtttccattgatcctggtcgggtaagcctcaaggaatcttggcagcccagactggaagggccgtgcaggggagagagtggggcctagggctggctgtgccatgccctgggcatggccagagcccacctggaaccttgcaaaagagaggcttggaggttagcagtccccaaccctcacgctctctgcggcaggggtacacggtttctgactgccttgtgcctggcttaggcaggagctgagtgggtgacagtttcccttgagctgagagaggtccccgggagccagtgcttcctaagtgttccctgcagccagctgctggcagtgccggccagtgccaatgctgcctgacggcgcctttctcctgggtgttgggtggactttgtaagtcttctgtttatctgagtgtgctgtcctaagggagagcttccctgcctgtttcccttgcccattcccctgtttgcattttaatccagtgtgccacaatccattactttgttattatgctgttgctctaactttaaatgccacccactaaccgtgatccagcaccctcttctggtgctcaggctggcacttactgctacccagggtttgtggcctgtgtgcttgcaggctccaaggagtggctcccgctaggcccagcacctggggtgactcccagkaggttggggagtcccgagtgaacacctggccacagtgaccaccagtacttggcggtccaggccctgtggttgatgawcctgtctgacgccatggtccccttgaggactgcacagcttgkcctctgatgtgatgttgtccagccccaccttttgtctccccaacaggctcttcagaggtgttcctgcccccagaccccatctttgccycggccatgtctgagaacgacaacgtgttctgtgcccagcttcagtgcttccatttccccaccctgcggcaccacgacctccacagctggcacgccgagagctgctacgagaagtcttcatttctgtgtaaaagaagtaagcccccttgagctggcgttcttggggaatgtctgggcccttgtgtcactttgttggaccctgagttcaaggtttcggaggcagaacctgatttgcagtgttgcggtggacgccccttaccagctcacaccttgttcttggggcccatttgcagctctgtgaccagggcagctggtcagcatcttagagcccacggaagcatcttagagcccagcttcttttcccacggaagagacaatcatccctgtcctccctgttgcagtgttgttaagagagtaaatgggaatgaggacccaaggacttggcatctctggagcatctaaggctgtttgtcacctccccaccccccatttctgccatccttctctctgcttstctgcttctctgtttaccttgccagkctatggtgtgtgtgtttttttttttttattaaagccagctaactctattgcttttgggggacaggggtctcaggagctcttggtggggcaggtccccttcctcttcaccatcacaggcttctggcttcgcaggatggcgctggctctgggatggcagctgtgcgcaggttggggagaggctttgttcttgcggatcatgtgtgtgatgttgccgagcatggtgcaggcgttcttgttgacggtggtcctctttttctttttttttttgggacagagtctcgctctgttgcccaggctggagtgcagtggcgtgatctcggctcactgcaagctccgcctcccaggttgaagcgattctcctgcctcagcttcctgagtagctgggactacaggtgcctgccaccacgcccggctaattttttgtgtttttagtagagrcgggtttcacagtgttaggatggtgtcgatctcctgacctcgtgatccgcccacctcgccctcccaaagtggtgggattacaggtgtgagccaccgtgtccacccgacggtggtcccctcataggaggtggctggcttctgctggccggatctccactccatgaccaccaccacacctttgccatcagctgccgggtccacacccacagtcctgcagtgaatcagctcgttgtagtggaaggagctgcagcctttaagttctcaggctcagtgctgtgggtctgcttattccccttgatcaggccggatgattcctcgcgaccatccattgcagatgtgcggccggggcggcagctcctcccaggtggctggcaacagagagagcttcatgataaatcttgactgctggtgttacgacttcctctgccttgttcttgcctgttatgttgcctatttttgacccttttctatgtgaattttaggatatgttttctaaactcctttattggttctcttagtttgtggattttgttgattttctatttagatgggtttgtttcttctttcaaatctttgacatttatttatttatttacatttattagagatgtggtttcactatgttgcccagtcaactcttcttgctacagtctccaggacagtgatgattagaaatggtggtagtgagcattcttgtcttctcaacttagaatgctattttaatgtatcaatattctacagaatgccttctataggattttagaatgtacctgtatgaagtcaaagaagtacctattcctaggttgctgggaatatttgtgttacaaaagtgtactgatttttattaaatgcttttagtggattttattggggttatgtagtttttcttcagtctgttcagtcattatttcatataaatggattttcttatgttaaaccatcctcatggtttatatatatataatatattatattggtggatttggtttgctgatatttagaatttttgaaactctttgttgttttttgagacagagtcttgccccgtcacccaggctggagtgcagtgacgtgatttcagctcactgtaacctctgcctcccgggttcaggcagttctcttgtctcagcctcctgagtagctgggattacagacatgtgccaccacgcctggctaatttttgtatttttagtagagatggcgtttcaccatgttggtcaggctggtcttgaacgctggtcttgaactcctgacctcaagtgatccacctgcctcagcctcccaaagtgctgggattataggtgtgagccaccgtgcctggcctgaaactcttttaagaagtgaggttggcctgttacatttttttctatactctccttgactctctcttttttttttttttaaggtggggcatcactgtgttgcccaggcaagaatgcagtggctaatcacaggcacgatcatagcacagtacagtcttgaactcctaggctcaagtgagcctcctgcctcagcctcccaagtagctgggactacattgactcatttctgtattatactatattagttttctaaaatgagttggcaaacattttattttactgttctctaaatccatttgtccaagttggagataaacttgtctttgagtgtttgatagaaccaccttataggaccatctgggtcaggcgagggagacttctgtaacttgttaatttaggtataatttcaagcttatggaaaaggcagaataatacaaggaacttcctttcatacaccatttacacagactcaccagttacagtatttcagttttactgcatttgctttatcattcactttctctacatgtttcttctgaatcatttgggagtaaactgaagatactgtggaccttaattaagcgttttatacttcagtgtgtatttcctaagaacaaggacactttcttatgtacccacactatatggatcaaaatcagaacacttagcatggatacagtaccatacagtaatccacaatccattattccagttttatcagtcgttccaataatatcctttatagctatttttttcattgtccagaatcatgcattgcatctagtcatcatgtctcttggattcttttagtccttcagtttgagtaatttctgttgacctgtcctcaggtttactaattctttccttggctatgtcaagtctgcttatgagcccattgaaggtattcttcatctgtttcattgattttgtctgtttttttatttataggatttccatttgattcttatagattccatctctcatctgaatttcccatctaaccttgtatattgtccagcttttccactggagcctttaacaaattaatcgtagttattttaaattccctgtggggaagttccttcatctgtgtcatatttgagtctggttttttgattgttttgtctctggagcatggtacttttttctaggcttttcattggaactctgacatcttgtgtgggacaatagagactgagttcagtagttttgtgcttgcagtggctatgcctttacttccactaggcctttcttgtggggaggtctttagtacagtgcagggcgttgatctgggcgagagttgggctgggcttggggtttgttggcactgtagttgccctcagtgcacctcaggctttcgtatttagcagcattgttgttctgggtggaggctggtttgccagagggtttttcttaatgtctgctccaccctctacttgaggtcatccctttgggctacatctctagagtctgtcttttgcagcccgcctagcagtagtccactgtgtgactcaaggcttgttagcatgctgatagtagggtctgatgttctaactgtatctgagccttaagcaggcccagtgccctgaggatccagggtggagccttcacaagtgcttctgaccctcctgcagctggagttgggtccagcacagtggcttttcaccagggccctaaaggctccaggtatgctctgattagaggcagcctgactagaagcagggcagtggaggtgattggtttggggaacatatttgactttccctggtgggtttccagttggaagtatggactcaaaatagagaagctggtggccactggccagatcctgactgccctagactggttgctacagaagtggtaggtcagaggcctttggtcatatgtggtctggcctttgtcaggtatcatcatgaggcagaaatgttctataaatggaatcatatagttgcaaccttttggggttggcttttttcactcataattccctggagagtcatccaaattgttacttttattaatgatttgttccttttttttttctttttggcgacaaggtctctgtcaccctagagtacagtggtgtgatcactgctcactgcagcctcaacctcccaggctcaggtgaacctcccacctcagcctcccgagtaactgggaccacaggtgcatgccactgtgcccaacttatttttgtattttttttttttttgtagaggcgggatttcgctatgttgcccaagctggtctcaaactataggcctcaagtgttgaaggacatctgggctgtttccagtctttggctattacaatgaaaactgccgtgaacatccgcatacaggtttttgtgcaaacgtgttttctttttttcttttttcttttktgtgtgtgtgtgtgtgtgtgtgtgagacagagtctttctctgttgcccaggctggagtgcagtggcacagtcttggctcactgcagcttccgcctcttgggttcaagcgattcgcatgtctcagcctcccgagtagctgggattacaggcatgtgccactacgcccagctaatttttgtctttttagtagagatgggtttcaccatgttgaccaggctggtcttgaactcccagtctcagatgatccacctgcatcggcctcccaaagtgctgggattacaggcatgagccaccacgcctggctgcaaatgtgttttcacttctgtgtgatagatgcccaggattacagttgcttgattgtatcgtagttgcaggtttagtttttaaagaaacaagcaaattgttttccagagtggctgtactattttatagtcccactatcaacgtaggagtgattcaacgtaggagtgatttaatttctccatatcctccccagcgcttactgttttcactatttttcatcttagcccttctgttaggtatgcagatatgtatgtagacctgtggctccttatggtttcaatttgcatttccctgaggctactgatgttaaaacctcttcatgtttcatgtgcttatttgccatctgtatattctctgttgttcacattattcttccgttttctctttgcatcgtttgttcgttttgttttgagaaagggtcttgctctgtcacccaggctcaaacgcagtggtgcaatcatagttcactgtaacctccagctcccgggctcaggcagtcctcccacttcagtctcctgagtagctggaactgtaggtgtgcaccgtcatgcctggctaagttttttattttctatagagataggatctcactatgttgcctaggctggcttcaaacgcaactcctaggctcaagtgatcctcctgtattgagattacaggtgtgaactaatgatctgttttgttcttttttaaactgtggagttttgagagttctttatgtattctagataccagtcctttgtcagatatgtggtttgcaaatattttttctagtctgtagcttgccttcatcctcttcaggtgagctttcaggaacaaaagttttgttgttgctgttttttcctggcagtataagtttacccaaagaacaaaagttcttaattttaatgaagtcctagttatttctctctcctttcgtggatttttttttttttttttttttttttgtgacagaatttcactctgttgcccaggctggagtgaagtggtgcaatcttggctcactgcaacctccacctcctgggttcaagtgattcttgtgcctcaccttcccaagtagctgggattaccaacatgagccaccacgcctggctaatttttctatttttagtagagacagggtttcacagtgttggccaggctggtctcaaactcctgacctcaggtgatccacctacctcggcctcacaaagtgctgggattacaggtgcgagccactgaaaccagcttccttttatggattawtcttttggtgtcaagtccaagtactctttgcctagccttacatttcttctgtgtttttttcctaaaattttaatcattttccgttttacatttaagtctaggacatgtttcgaatgagtgttttaataagatgtgagacttaggtgaagttctttagtccagtatagctttgctcccacacaccacctttgtgccattcttggcaaatctaagtgtgttatatttttgtatgtcatagacccaatactacattccatacatattattttatacaattgctttttaaatcagctaagagaataaaggaggaaaactatgcatgtaggctataatttataatcacgattgcctttactgttgctcttcagtttcttatttgtattcaaattactatctggggattgcatacttttggcctgaaaaacttcctttagtgtttcttataaggtggatctgcaaacaacttctctcacttgttgtttgtctgggaaagtttattttactttcawttttcagaagatatctttgctggatatggatcttggttgatggttttctgtgagcagttatcccactgccccagcctctgttgtttctgctgagaagtcagttgtttgtcttattggggttcccttagaagtaacaagtcacgtcccatttgctgcttttygtattttcgccttgtctttcactttcagcattttcactctgatgtgtcagtttgtggctcctttgcatttatcctaggaatgtggaatttgttgagcttcctggatgtataggttattgtttttcaatgaatttgagtagtttgcagctgttagttcttcgactaatttttttttgcctctttctctctctcctctccrtttgtwactcctgtttcacatatgtkggtgtacttaakggtgtttcacatttctctgggagctctgttcatttctgtycattcttttttctctattttagccagggaataattgtatgtgagtatcttgccctgggagttcctgaccacatgggtgacctagatttgatcccaatctttttttttttttttttttgagacagagtctcatgctgtcgcccaggctggagtgcagtggcacaatctctgctcactgcaacctacacctctggggttcaagagattctcatgcctcagcctcctgagtagctgggattacaggcacatgccaccacgcttggctaatttttgtatttttagtggagacagggttttgccatgttggccaggctggtcttgaactcctgacctcaggcaatctgcctgcctcggcctcccaaagtgctgggattacaggtgtgagccaccgcgcccagctgactacaatcttaagtgaggcatagacctgtgattgtgaaatttcggaagagtcttttttctagacatccttaccccatttggagactgtaagaagctaccttctcatgtctctttgcctttcactgagggtggctctcttggaggctccttcattccttgtctctcctccaggcatttgcaacgtctgcctaccagttgaagactctgggtttttagccatggccattcctcttactctcatcctaggtcagctctgtgcagagtgtgcctcaggtccagtggactgccttcccaagcagaactggcagcttccttasacacattctgattttgaaatggttaatactcatagcagctgcatcttagaattgagaaaatctcataagtaatctacttcagcaacttccaggcaaacacttctgcagtgaccctggagtctggcattgtgctccatcctggctctccggcctccatttgccctggctagatgtactttgttctaacagtgttgtagtgactgctcttggacagccactccctgtgccatgggccagagatccatggcattccagccctrggaagactctcagcacaatctggccaagtcttcagttgccttgttcgttccccaggcccaggtggggaaggtcagctcatgtcaagtggtgcagcagtgatggcagtgtttgctcacagagctgtcttagaggctttgatgccattactctagtgggcatgtctcacatgccccctccagctgcctccttcccattctaaggtaacaggtagcattcacaggcccacacggggaggctacctttttyggcagtgtggcccacacggggaggctaccttttttggcattgtatacatctgtacacaatgtatgctcattgcaggtcaaacatgtgttgacatcaaggacaacgtggtggatgaagggttctacttcacccctaagggggacgacccrtgcctgagctgcacctgccatggaggggagcctgagatgtgtgtggctgctctctgtgagaggccccagggctgccaacagtaccgcaaggaccccaaagagtgctgcaagttcatgtgtctggacccaggtgagactcttgataggacgtcccaagtcagcctccctatttggggctggaggctgggcgtccctttgcttcctcagtggtgaggactcaggagagtttatggagcatcgcgcagcagcaatggcagcgtttgtcacagagatgtctcagagactttgatgccactactctagtgggcgtgtctgacacgacccctccagctgcctccttcccattctggggtgacaggcagcattcacaaatgaacttgaactcragtgtggctgtttgttcacaagtcaccactgacagcttcaaacttgtcttcaaacttacgcctccagggtttaagccgttctcctgcctcagcctcaccagtagctggaactacaggcgcatgccaccatgcctggctagtttttgtatttttagtagagacggggtttcgccatgttgtccagaccaggtcttcaactcctggcctcgagtgatccacccacctcagcttcccaaagtgctgggattacaggcatgagccaccgcgtccagcctagacttctaatttatgtccacattggagctcttcctgttctctagtatgatgatatggagggtagtgacagttgtcattgcttacagtcatccatttttaccttagaatcttcgagaaaaagatgaagtattattctcagtttcgagatcagactcctcaccaccaggcgggggctttaaggtagacactacagggaatctgatctcagggtgatcctctcccttccacttgcaaaaagagaggagcaggtgggccactgctctctgagatgttaacacccctcacactccacgggcatgctttgtcattctgcacaccggtgtagctgcagctctgtgtgaattcagatctcaagagaaatgtaaatcaaaagtatgagtttctttctttcttgggtgccacagtaggaatgaaatgatggggacttttggaagcccctggacttgtggcccctgtagaagagcagcttgggcagggtgtgatggccatctctgtctctaggggccctgtggaggagaggctgcagctagaggctgggccacaacagtgaaagctgcccctgagtggaatgttgtcagtgtccctccacacyggggggctgctgggtgggaggacaaagctgtcctccagaggctgtgcctgaggctgggtgaaagtgggcactgtggcatgtaccatcagacatgtgcagttgactgtggtgagcacaaggctacatttgcagccaagcccaccagaggacccagagctagagggtgatgcttggaccccattctgcagggcagtttctcctygtatagggtgcatgtctgtttagggccatgagaagcactggttgagtgcttatcaagttccctgtgcccggccacataactttaaacccccagcttagtgactggctacaagagtcaaactctgttcacaagccatgctacctggactcctggttccatttctcaggagtctaccagtgctgccttgccactctgtccaagctttgtaagaatgcccagatgtgtacaaggatgacccatttgtgggcatgtatggcctaaagagcctgcccagccccaaggacttcttagcagagcagggcccttagtgcatctgggtgggcccagagcagctgcagccctctctcctgcacggccagagcgacttagctgggccctgctctgccygccctgtggccatgcttccatgggctcctgactctcctagggccttcttctggaaagtgctcaagaaccgagacactatcaccaaaactggagactctgggaataggatgtcatgtgttaagcatcagaatgtcccctccaacaagctaagagtgtctackcttgccaccctgtcatcattgtgcttgaggtcaaagccagtgccagaaggcaagaagaaatgaaaaaccatccaggccagaggggaagaaatgaaaccatctccctttgcagatcacatgattgcatagaaaatcctagggaatctacaggaaagttattagaactaataagtgtgtttaagcaaggtctccagatataaggtcaacgtaacaraaattcatcatatttatataatctatctgtaacagttgaaaattgaaaattttgagaaaagtgccmttaataatagcaccaaaaaaaatraaatacscaattawaaataatataaaatatgtgcacattctgtttgctgcaaactgtaaaaccatgatgacaaaaaggcttaaataaaaggaaagataccatgttcatggatcaggtgtctcaatatcattaggaggttagctcttcccaaattatagattcagtataatcccaaccaaaattctagcagacatttttgtaggtattgacaagctaattctaaaaatcaggtggagcgaggcatggtgtctcgcacctgtaatcccagcactttgggaggctggggagggtggatcacttgagatcaggagtttgtgaccagtatggccaacatggtgaagccccatctctacaaaaaatacaaaaaattagttgggtatggtggcttatgcctataataccagctactcaggaggctgaggcaggagaatcacttcaacctgggaggtaaaggttacagtgagctgagatcacgccactgtactccagcctgggtgacagagcgagactccatctcaaaaagtaaaaataaaatagggctgggttcagcggctcatgcctgtaattgtagtactttgggagtctgaggcaagaggattgcttgaggccaggagttcaagaccaacctggctaacatagcaagaccctgtctcttaaataaaaaggtagataaaagttggtggaaaggcaaaataattaaaatagccaaagtagtttttacaaagaacaaagttggaggatccatgccacctaatgtatgagttactgtacagccatagtaatcacaacagtgtggtatcgatgaagggrcagacacatagatcagtggaacacaacagtccagaaatagtcccacactacgtataatcaggtgatctctctgtttttktttgtttaagacgagtcaagtgcagtcgtgagaacgggaaaagagtacaacaaggagtttgatctgttactgactgtgaacaatcaatcgagatgactcactaccttcagaccagcctaatctttgacaaaggtgcaagagcagttcagtggagaaaggatagtctttcaaccactggtgctgggacagcaggacatccatatgccaaaaaatacgaaccttacactgtccctcctactgtatgtaaaatttactcaaaatggtcatagacacaactgtaaaaccttgaattataaagcttctaggagaaaacataggagagaaatctttgtgaccatgggttaggcaacatttttagcatgatccttaaaaaaaacagacaaatttggcttcatcaaaattgaaaacttctgttctttggaacacactgttaaggaaatgraaaaataagcccctgactgaatcaaaacaagtatttgcaaaacacagatcaaaggtctgtattcagaatacataaaarctcaataataagaaaacaaaacaatgctattgaaaaatggctttagaagaagatgtaaattattaaactttatcaaagaagatataggatgacagtcaggcagctgaaacgatgctcagtattggccattagggaaacaaactaaatccaygtggggtaccacccctgctcgaaaggctaaagtaatgaaactgatagcatcaagtgctggccaaggtgcagagcagctgaaactcatgccgccctctgcccctgcttgctctgctgctgtcgggcagccctgatacgatgaggttcccagaggcatggtgaggtgtttggctggtgcagctgccaggcacagagcccacattgggttcctggtctcagcttctgatccctgctgaccttctgctccccatggtgtctctgatggagattttgaaactgttaccacttaaccaagctcaatgaaatggtgagctccttgtcactggagctcttcttgcacaggctggatcctctctctgggagctgcaggatagctgagagacaaaagacaaccccaactgcacagcccagaactccatggagagatcagccctatcaaggggcctctggggcccctgggctggcctctggcttctggggcaggctctcttctttgtgcttgactacaagtggcttggttctgagagatgattatttccggtccccaccttggagggacagttgggaccttgaccgtgtccttgggtttattttagaacggattaagagttagtcattgcaaaggggctgctttcttaggagctcccctgggatctctgaactggcctccaatgaacaggcacgtcaccagtccctgggccactaggctttctcccactgatgacagtgcccttgagactggaggagggtcagaggcatcaggaaaagcagctaattggtgagaggatgtatccttctcacatattcacttcatgtgtcgtcagcaaaaaatgcagcttttggagatgcttcctggccccgtgggaggaggacaggagctggcgctgccatctgtgtgggcatggagtgtactgggctagcaggaatggcttgagggctctgggaacccagccactcacacgggggttgtgaagtgtctccttggggcaggcagtaggggtcctgcctgccgagattgttgcagaggtgggagtggccattcctagcttagcagggtccctgctggtgtggggtcctcctgcttccaggagctgatgggtcactcctygttttgaagcctccctggccttcactcttggtctgtggaggaagctacttctgggaccacttcctggttccattattctgtgacttctgtgagttgccagtttacccaagtcaggagtgcatggaactgccagccatgttatagatgtgtggctggtagattctcctttcatgcctgctaccactcatgtcatctctgcctccccatgggcagctcatatcgagcccctgtccccagtgtgcactgcaccagggcagggtgtgtccctcttggcgstgttgacatttggaccagatactgtgtgttgggggctgtcctggaggatgttgaacagcaccccggcctccacctgctgaatactagtagcatcccagccaagtggtggycacgaaaagcgtgaaatggttgaagaagagcagaggaaggcgcagcagcttagactcagtgctccttggcgtctagcctggctgggactcagcttcaagcttcatggcccctcctgcctactcacccagcaaagaggtggagtcgggtccacccagccctcctacacctgcgcttggtgcgtgtgtacccaatgtgtgggtgtggctgagccgggagagcatctcagtggggagcctgtgagacccagtgttgtgtccaggtgtcatctgcacgtgtatgccagggctgggtgcgtcaggggatgcgcattttctctgccatggcttgttaaggattggagtgacaggcttcacgcccaaccacagcagaggcrcatttgtgaaaygatacctgagttgaccgtgcggctgcccacaggggctcactgttcccctacacagtccatcagggagttgtggcaatccgagtcccaagtgtaccttatactgtcacttctcccagtctgtcactacccggtccaggcctctgtcattcccttctctgctgcggcaggtcctcctcctggcttcctgatgccctatgctactcccttgcagcctgtcctccctacggcagccgcccgagccatgctccgcaggggcgtcacccccactccaaactgccagcaactgtcatccatgagacccctgcctacctggccaaccctggcctcctaccaggaaagggctgtccctcaccgccccctggctcattcttgctgggcaactgagcaccttcctcccaagagcccaggcctcagacaaaaggaaggctgctgttggacggacgtgggaggcctgtgtgcagccctggcccctggaaaaggatgtgcacctctgcaggagggccgctccccagccacacctggggtacacagcacatgagcgcagcctcctaggagtgctagtcctaggacaggaaatcctagtttgctccggtgatggtcagaggggtgttggcacacagcagcctggggccatggtgagatgctcctcctgacctgggattcgctcttctgcttctgtgctgtcaccatgttcttgattttgagcggccttatttcacatgtatcctaaagatggttgggtgcagggagacactgtgtgccttgtccacacagcccgcctgggcaggaggacgacagcatccccagcgtagcacgagggtggcccccttctcagagcggccatttcctcccctccccctcagatggcaacagtctgtttgactccatggccagcgggatgcgcctggtcgtcagctgcatctcctccttcctcatcctgtcactgctgctcttcatggtccaccggctgcgccagcggcgccgggagcgcatcgagtccctgattggagcaaactgtaagtgccctctgagggccacaaccctggtccccatccccaccccaggtcaccccatgtctccatgagctccccagccctggacagagaggggcagaggcaggtttgaaggccacatgttgtggggtctgtgtcctcacctgtgggccaggaaagttcttgccaagaccctccttattcccattgagccacagggtgggcagaactcggaggcctctgagggtcagaggcccggatcacccttccagctggaggggtgtggtcagccagaggctgggtctgacagaagtgtcagcccagagggacaggttggtgtggtgagggtgagacatgccacggagcacaccaggggtctcatggggatgccgaatgtggccsaggggtaggcagcggggcacaggtgtgtgcactcagggacggcaggcccagcctgggggtggggggctcaggagccaggcagcctgcccccagtgacttgtctctgttcccgttgcacacttttgatggcccagtgcaccacttcaacctcggccgcaggatccctggctttgattacggcccagacgggtttggcacgggcctcacgccgctgcatctttctgacgacggagagggtgggactttccatttccasgaccctccacctccctacacggcatacaagtacccggacatcggccagcccgacgaccctccgccgccctacgaggcctccatccacccggacagtgtgttctatgaccctgcaggtgcctgactccccagggagagggaacaccttgtcaagtaacctggcacgtggggctgagcccagcactcttgcccagctgcagaggcctrgggrcctcacttctttccggctttgtctttggtttttcctttaaggcttctcctggggctgcccgtgcagaaggggtcctgatctccctgcctggccgcccttggcaatctgtgcagagagctctgagaaggcctgggacccctccctcctacctccctgccttctgtgagcacctgtcatctgggcagccctcagggccctcagcccagctctagagacctggggagcccgacagtggtggttgtgaagacagggctggcccagacccaggagccaatcacttgtctgtagacacatgagctagagacaccatggtgacagcccctcctgtcgtgtcaggaggcagctctgtgaggtgggaggaaagcgtggcttctgtgctactggcccatagttggagcctaccacccatctgagagtgggcgccattcctcaaggctgtgtagctaaggagtggcaggcccctgacccctggcctgtctctgtctctgttgagcagtgcaggtgtcccatcccatctccctgtgcattaggccccctaacacacacaaacctgtagtatatttggtaggcagtgccaccccaaagtggctggctccttgcatgcctgcccatctcggcagaatgggcattgtgaggctggggctkctgtgcctaaaggtctcagtcctgttcgtttgtttagtcagctgccacagctcttgcatgatctgggggtgcagaaaagacttgcatttgacccctgccctcatgacacagattgtcacagtcttccagggtaggaccagcttcctgcaagggatggtggtgggtggcagcagatcccagacacctgtgtgggccaggctgcagagcagggtgggggctgtgaggggctggccrggagggaggtgcatcaccggggccttgtgctgttagctttcagagacagcctatggtaatgacaagcaggcagcccaggcgcagtggctcacacctgtaatccagcactctgggaggctgaggcgggaggaggggtctcactatgttgcccaggttggttcgagaccagcctgtgagacctccttctccacaaaaaattcagaactagccgtgcatagtgggcacagctgtagtcccagttactgggcaggctgagaatggaggatcacctgagcccagaattcaaggctgtcatgagccatggtcacgtcactgcacaccagtgtgcaatcttttaagatcctgtctcttaaaagaaaaaaaaagcaagtaataaagatcgggcaaaacaaagcgagtcgactgcctaccacacagcctgccttggatcagagcttcctgcaaacacctgtgtggttttccaggccrctcactgcagccctgttgcccacactccggttgccacattccagctgcagccctgaatgttcttccacccacctgggcccagtgcctccctgatgacaaatgcccctgccttcttgctgagccgggtcttcaccttactgagtctgagacggtttccctttgggcccctctgttctagtgactgctggtcagtgtgtctcccctacctcacaccgatggtgggacaggcccgtgtctgcctttgtgagatgkgccctgcaccttgcatataccaggttcccagccacagggggcagtaggtacaacaggtgtcatgtggggcaggctcctccttcaaaatctgaggcccgggggagccacccaggtcctgctcaccacccagcttcaggggggccttcaggcaggaggagtgtctcctggttttgcctagctcccctgcatcccctgtgccaggcccgtacctgcctctgacacccctctgtctcttcctgcagacgatgatgcttttgagcctgyggaggtcagcctgccagcccctggggatggtgggagtgaaggtgcattactccggcgcctggagcagcctctgcccactgcgggggcctctctggcagacctggaagactctgccgacagcagcagcgccctsctcgtgccccctgaccctgcccagagcgggagcaccccagctgcagaggcactgccagggggtggccgccacagccgcagctccctcaatactgtggtgtagacggcctggcctgtaccccaayggtctgggagcacctgtcygttgyagaaaacaccggtccctggggagacttgaaaggccccygtcccagcctggacgccacgcactgccgcacgtcactggcgggctcgcgtgtgtacatagagaccacagcccgccttctgccaaaagaagtgatggcctgcaccgagcttccttgagggcttcagaaacatgcatagctttggatcactgtcttctcctttataaatggcagaagagtgacaaaattcattcagaccgcacatgttagaggcagggaatgaagaaggtactgtgggccatggccacacctgatgcgtttttggtgggcytwcttggtgcagtgtgctgtccagagagacctgctgacccagtctgggacaggcacagtgggagctgccacagtgccccttgctggccgccctcaggagggggcctctggaccgtcagtgtggcgtargcagtgggtctgcttcagggaggcagcctcttgactttgtcacaacggttgcactgaagatggcccccacaagcccagttgtgaatatcaaggtgaccctgcccctggctgggagctcccctggggctctggaacctgaagccctgagaaggagagcttggaaggaggttgagctcttcactgtgtctttccatctgggctctgcagcccagctctgtggcaggaggcctgaccccaccccatcagtccctctcccagcattgctgtgcatggctccctcaggaagaagctctggagtggggccgaggccccagatgctctgctggggtctggggactgagctgcctcctgtctctccactctggagccctgggctcttgcctcctgttgaattgcccctgggcctgcccccggccccatttgtgccataaagggttgcttcattgcaggaggggtggctgaaaccaccatcctgggctgcatctatctccttaaagtccactccttacatcaccrccactactgcagctcagtgcccagyggccgcatgcacacctcccggcccckcctcagcagcgcaggggctgggggcccttcctggcacccttttgcctgacggaccctgttgcctgctcctgggcagtggttttgttgcctgacacagggcctttaacatttctgaggtttggagattaagcgggttctgtgcgatttttagcacatccatatcttttctacgttgaatgtctggatctttcctttgtatgtttgtgtctctgtgtgtgtatgtggccaagcgtctgcaggtgagggtggcacatggaacttcacgggtcactgggggcccactcttccagggtcatcgatgcatcctgggctgtgctgaggcagtgctgtctcgctcagtctttccagaccagcggggcagcacctgggaggcctgtctgaagcatgcagttctgtggtgctgctcggggatggactccatgcacagtccacttcttgacacattctcacactgtggctggagacccattttttccatcccatgtggaatgagaatcttgagttgcccacagacagacttgacctttgtgccagaactgtccagagctgtgagttttgttactgaattgcctgtccctgagcttggcctgctggagcatgatgctggaggctgtgtgcgggcaggcttgtgctccccttggagaagggctgctacttaacaaggaagtcctggccacargagtcccctactggctgcagaggacgaagcaggaagcatgccgtggatcccacatgcactggggcagggcagccaggttccagagcagcaggcatgtgcattatgggtgccaggtggccagtgagggcccgaggaccacgcagcagagtcccccacgggcctgagcctgagagctcagaggattcctgccaggcctcagaactgtgtgtgcgggacagggtggctggcacgagatgtgtgggactgggacgcttcctttggggaccagaggaacattaggggccggtcagacacgtagggggcagtgaggaaacggggtaaagtggaccatgcaggctgcagagggtgggccttgggctggccggggttgctgggtggccccttccccatgggcctccacaagcactcaggccactggcacgttgggccaggcagaaggtccacatggcagggctgcctggaacaccgctgccactgtggctccaggaggcccttgggagcatgaggagagctggactcgctcatctgttcttgcaccaccatccagaatgccccctttgcaaggcctgctgcagtccccagtctgaccagcaagtcccggggtcacccttgctgaaccttgtgctccaggggtcctcctcctctaggaccagcttgccacggtttctcagagcccaggtgccctctgacctgccatgcggaggtkggatttgatactgtacattgtcttgatgcctgtttttttatgttttcattaagggtttttagtttttggttgggttgacactaacttttcttaagatgctgtgagaatcatttcatccaaatgccaaataaacttgtgttccggaagaggcatggttagtccttggtgtggcccccacggctgccacaggctaaggtggaagaggctgggtacccacctttcagcagaatgcacctagggtttgcagcccttgcaggcgtccatcaaaccccctgaggaccaggcagagctgagcctggagcccctaggtggagtgtgcagggagagcagcagccctgagctgcctacagctatcctgcagcacccagccctgcttggggcatcggctgctgccttggcaggtgttgctgacgtgcacaggatccacataaaggcaaggctgcttgacaccatctgggagctagcatgggacggggtggtagggcagggcttggaacctggccgtcagcgccatttcctctaagctcccctcatcatccgggtggctggaaacagcccctccctccagtccaagccacctaatgttacaaagtagcctaggtcctctggggcctcttcactcatgtccagcagtgccatctctaggtctcagagggtagtgggcccaggaagtgtgattgcatgccctgctctgggggcactccagatgtgtatactggggggacgtcctgcggccggacacgagaggagtcagggttaggaaaggaactggtaagtcccttggcagggatgggagcctcgaggatgtggcccctcattttttatcccatctgctggggcaggagtggagtggtggtgttgagtcccgagcacacaggtcactgtcagcactctggacagagccccgagccctgcctctgggtaggggctgtcttcccatccccaatgtgggtagggccctgccctctggcgattggaaagaggcgcagggtgcaaagaagtcccctcctctgacctcctgcagggctccgtcttggcctggatccgcaggggggcctgggtaggagggaggctgtggtcttgggatggggtggcagttccgggcccacagtggggcaagagacatcctacaccttcctcccatccttgccccgaaagtcatgggcactggggtccaaggtgccctcactatttgacctttcttgctggtggctttggtgtgtcattctggtccccagcctctgtttcctggactgtaagtggggataataataggtcacccctcccctgcaggattaacctcagcgattgttgctggcatcagtgcagccctgggaccagagcacacctgggtgagtttggagcgctcgcgctcttcctggtggccctgcctgggcaccgacccctcccatcctctcctcagtagccacgcccctagcccagctagctaatgaataaatatgtagtagccaggccagcatcctggctgcgtggtctagccactttctagtccttcctagctgcggctgccactgagccacgcacgcccctggcatcatgctcgccttgcggtgcagctggtgtggcgcagactctgagagtgagcaccaggactcttcctgtctggcctccaatctaccctcttgccatgctccaccaccccttaggtcttgccactgggagtggggagggactggggagagaaaatactgaggtaggggtgacaggagagaaggttcttcactggcctcccctggcctaaacccctgacctacttcattcttggaccccagctgatgggatggggcttggagagggcccagatgactggcctctcagctcagcctcctgcccactgtctctataggtgcctggtgctatgactcccaggacctcaagtatggtgaggacagagtgtcatgtgaggctgtgtcagatcagtctgtgtcctgggaccaccagagcatgtgccagtggtgcaagagtggccaagagacagtctgcaccctgcactctgtggcctttgcaggtttctgtctgtagtcgtctgccccagtagactgactgggcatcaggtgcaagtgcgtgactgtccccctgtgtgtgagtctgggcctgctgtgattgccggtcccgagtcagtcaaggctggtgtgcccgttactgtggccagcccaagtgtgtgcaggtgatagaggtcccagtgtgggtgtgcaactgtgtgccggagacccttccaccttcatctcaccatggggcagccaactgggagactagatggataggtcagatgcagggtacaagagaaggggggtgctgtgacctgttcaggtgtgggggaagcagggagctaggtttcctgaggctgggctatcctctgggtgtatgggggccactctctgctgcacccccaggctgcctccctgaccccccccccaccccaaaggccccagtccttgttccagcagtccccacccactggaagaagctggccccctgcctgtgggggcccaggccagtccctcatcaacattgactttcacagggtccggcggaactctaccctagggcccttcatcttccgaggctatgactcagcacctccaggcccttggaccctggagaatgacagccacacaagtcagcaccctgtggtcaggacccctcctaggcagaggcaggagccccacacagggcatgagagctcctgcgtgtacacagggaccaggaccccctacacacgggagctgagacaacctacagggccaaaaaccctccacaggggctagcttcagaggaaaggagcatcctcacacagcagtccagatgcaccctctgtgtaggtgccaggtcccaccttacaaatcacaaccagccatggcccctgaggaccaggagtcagggtctctggcagggccaggatccctgaccacacacagctgggcttagagccccacaccaggagggctgccctctgccctcttccatgccatgctgggtgtgggggggggaagggtttcccctgcagtctgtggagctctgctctgctgaccagcaggagccatggacaccatgggttccattccatggaggcaatggggccgcactggggagaaacctggcctgaggaagggcctctgctcataccctgtgccctaatggcacaagatggacaggtggtgaggtagagagggtgtcgtgtgcctcctccccttcattgctactctgaatggacactgatcctcagaaccacctggagatttgggaggctgggctgctgttgcctgtctaccgcgcactgcagctgcacttcaactgccggcggtgggggggcccgaggcgagcagactcggagcacagcctggacaggcagcgccaggctatggaggtagactcgggaacaaggtggggtggccggagtgctcccacggaggtgagagagagcaaggtgagggcagctgggtatctcccacatctgtgcctccccccagatgcacgtggtccacagtaacacaaagtaccagagcatggaggaggcaccacgccacggtgatgggctcgagtgcaggccctgctgctggaggtgctgctggcggtgaaggcagggctgtgattctatgtatgtttccaaaaaaggggtccatggggatcctggaagtggacaggccaggcctgtggagtccgtggggggatctctagggtctataggatctgtgggaggatggggcggtgggaatgcctgaatcggcagggccagtggcggcgagaaccctccaccccatttcccagatgccagatgcctcctgccactgggagcctcctgcttagagtaccccagctgagttccctcttcagagactccctcactcagaacccctcgcacttggagcccctcccaggagcaggactgtagcaacaccaacttctgcgccatagtgtcgggcttgaggaaggtgcctgagccaggtgaggagccaccgggtcgttttccggctcaggggcggggggtttgctggggatggcaccagcagggcacagggaggctggttccaatccccctccctctgccgcccggggctctcagtgaatctgatgtccaccttcccgctggcgtcgatgcggcccaacacctcgagctactgtcgcttcgctgggtcgctgaccccgcctgactgcgagcccacggtgctctggaccgtcttcgaggaccccatacccatccggtgggtgcaggtggagccaccgtcccccctcgccccccacacccctccccgggccttgcctggctcctcccgcaggcgctgcccctctcccaccccgttttgatctctttgccctgcaccctcagatgaccctgttctacaccctgccccaggctggaccctcccactttcaccccataccgctcacgggtaacttccgcccccagcagcctcttttttttttttttttttttgagacggaggctcactctgtcgcccaggctggagtgcagtggtggaatctcagctcactgcaagctctgcctcccaggttcatgccattctcctgccgcagcctcctgaatagctgggactacaggtgcccgccaccaggcccggctaattttttgtatttttagtagagacggggtttcaccgtgttggccaggatggtctcgatctcctgacctcctgatccgcctgcctcggactcccaaagtgctgggattacaggcttgagccaccgtgcccggcccacagcagcctcttaaggggcacgcagtcttggcctctccgagagcctcggtccccgcagcagccccctgctcttcccccaccctagcagttgtgcactgcgctctgatgggcctggggctcagcctgtggttctgtcaaccgtgggcgaccctccatgtgaaataatgaaataatgcacagagtgaccttagcctaatgtagcctggagggggtgggtgcgtgacccggcgtggtcccccattgcaagaggggcatttcctgccctaatcccactgaggcctcagtgtgcctgtctgttccgtgggagccctctgagtgaccctctcctacctcagcagaacccgggcctctccaggttcctctcagagggagaagggcccccaccctcatcctatacattgtgtctgaatcccctggtcagatggaaggagaacatctagcagtcagaaattccaccattaggccaagattacattattttattttaaaactaagctgggtggccaacccagggacaccgtgctctgctaaatgatgactccagctacatttcccgaggccaagagatgagaagctgctggctccaggctccgctgcaggctgccctggctgagcgggtgctgggcaccgcggagcgctgcctggtgctctgaagccatgccccagtgcctccctgggagttctgctgtggagtctgtgtggagggtgactctggagagatgtttgtgtcccggtggctgcctgtggtctggctaagtaaaggggtgagtattcttggtgtcactgtccaaagcaaagttgtgtccacgggacacagactaggtgaggctctgtgtccaggtgatgctgtccagtgagagggggttgcagtcagagtgaggctgaccggaggccgctgtccaattggtgccgtgtggaatgtgattacatactggttgacaccatcctgagggccatcaccagctgagtgtctcagccgccctgtgtccctgggttctgtgctcttgtgtgtggtttgacactattccagtgcgtggagaccctgcctcgtcactgagaccttgaaagaaaaagaacctgcagtcaccccaaggaagaggagtctcggctgttcccctggaggctgacccagccctggcccaaaggctgacccagacccaaggcccaaaggcccagctctaaggtccaaaggggctccaccctgttctctagccggactcagtctctcgcaaggaccccggctcccagccgcactccccagacgcacgtggcccaccctccgcccgtcccgcgcccaccccctccctccagtaccggagccctaactggcggcacccgggcacccttttgactcagagccacgctccacgagggggaccgatctgctcacttgccccgtcctgggggtaccagagt

SEQ ID NO: 96399 - DNA, 22648 bp, Homo sapiens
  misc_feature (1)...(22648): n = A,T,C or G
acagccctgcctgtgcactgcctgcagtgctctttacaacgtgtgtgcagagagcccaacaaacttttgatgaatgaaaccggtggactccaccaggagacaagtcctggcttccgctggagcatctccaccgggcctgcgtcggtgaaaagcagaggcaagcgagttctcctaggtagacctccacatcctgcctacttacacagtgatggttagctgccatcaataagaacagaagcacaattcaatttttagaacacacacaattaggtgcccataaaaaacggaagccaaaaattaaaagacaaatgaatgagaaagaacaaaacaaaaccacaatattgagaaacgttaaggaggactcaaatttcctggcaagggggcagagaggggccagggctgggtgtgaacctgggaagacacggccaggccgggctgaccaagccgggtcaggccatgggtcatgaccgcctggagaccacaagggcgtcgggctgggtcagatgccatggacccaccactgcctcctgatcccagcacgttgtaggatatatgaagcagaaaatggtctactctactcaaacatcgtcatgtcacagactactgatcagtctacaaagcgggctacaagagtccagtggatgctcagcctccagtgagggccccaggggcgcaggcattgggcccttccaccggcacctccttccccatctctgcacggcgccaacagttcctatgtactctacacctgattctgatgccaccaactccagaagagaccctctgccccatgctggtggctccctgaagtttctgggcatcttccaactgccccaggggtagtcctgtgagtctctcaggcaccctagcaggctcagagcctacatccttctccgctgtgtccttcattcaaggcaggaccttggcacatgtgcacggggcagacacgggaggagctgcgatactttccaacagcagacggctgtcctaccacagggttatttttgcccagctaagtcgggtggaccgagaggataggagagggtgggctattaagaaaatattagtttaggtcaattcaaagagaacttttttttttttttgacaaagtttcactctgtcacccaggctggagtgcagtggtgcgatgacattttaaaagcatgctgcaagctttttttcccctgccttctccctctctctctctctttctacctattacttctttcttttaattataaaaggccatatgcaagagaggccctgtcatcatacaggccaccatctgttggcaggaatgcaatgtgctctggccggggtggcctcagttaacgggtctaccgactgctagtcagttgaaaaatctcttcaactttctcactggccctacagtgtttgtcaaaggcaaatactgaactggggcacagcagtgttttaagtcagaaatttgtggtatgggcaagaatgcaaagtttcctccaatccacaatcctcaagttctctgtgtgtgtctcgcccccggccagccagccagccagccaatgtcctctgggtatcaccagcctccgtgaacaaaacacggaccctgccttccaggggcgtacagttcaggtggggggccagccacgtacaagcctgcacagacttcacacgcctgccaccatggggagtctcactgtgccctgacctggccgggtgggggcacagctaatcaggaataagaacagaagcagacacagcgaacccgggaagctgtggtgtggaggtggcttcggccaagcctggttttggggaacccaggaaaccgtggtgtggaggtggcttcggccgagcctggttttctgctccctccagggtctcctgcaattccacatggcagcttgaggtggagcgggggagagaattcaagattggctcctctgcccacgccaacacctcccacctcgtcaggaggggtagcctgtccagacagggctccactgcacatccagccttgactaggaggctctgtttcccccgggtgggcctgaaaggggcctgcatcctacaggatgagggagggagagggggccccagccacttcctcccaggatcctcacccgacacccccagctctgtgctgttgcccatgtggcctctcccccgtggctcccatcacactgcaaacgtacaattctgtgtgatgattccatgcctgggcttgcgcctggcccagtccccagaacacagtggagcttgataccttgagtgaatgagtggatgcgccatgctctgggatagcaccggagaaacggtcctggcctgccacggggtcctggtagaagagtgcagaacactaaaaaagcagcaaccggcagattgaatgtagggggcgggggagcatccaggaagggccccctgaggacaggagatataagctgagttgaggtttaacaaatggattagccaggcaaaacgtgggttggggagctggggaaagaaggttttcaggcacagggaagtggggaagaggctttgcagtggtcaggagctgagggaggcactgtggatagcagaggggcaggggaacaggtgctgggactctgtgcggctggagcagggagcggcaacggtgagcaagctcagaagcccttccgcacattcattggacaaacacctgctgggcacccacagtgtgccaggcaccatgccaggacttacaggccactctaagactgtggctctggatcccagaagcaggggatcaccccaacagctgtgggctgcccaggccagaggaaaaggagagaccagccgtgaggcttcaaagtctagaattaacagcaaccggcatctgacaggatgtgggcagggagagagagacattcaccaatggcctgggtgtcaggccttacagctgggaggctggaaaccatgctcatcccagacctggggagaggacagacaacattggtgaagggaaggagagtgccctttgggatgttaaaagtccacatggctcggagcccagagcccccatcgggcgggcgaggccaggcagtgaggcatttacatcaactggcaccaaccacaaacaagacaggcaaacaccagccaagccccagtggatgaaaactttgagctcccaaggactgggaaataaaaccactgaaccaagcttattatgaaatcaatctctgcgaaaatgggacaggctaggtgtttaacaaagtatcgctcgctctcatttttttctgaacagctggcagcgattatattaagtttccatttcaaacgcatttcctgccagttacacatttgtctcctccccttctgtacaacatggataataacacgggagaagcgcagggctaggaagagagagggtacaacagccaggtaggacatgtgtgtgtgtgtgtacaccagggctgcaagcatcttcactcactgccgaaagcaaaaccccacgtgcagtctaatttgagggctccacctaattaccaaacgtcacacttctaaagagagtggaggctgcatagagctcaagctggcaggatccttaaatactctcccttctcaggcactaaaaggaggcatcagctgcatgtctgggctttgagagagtcataccgtaagagaaggcacactgatgcttttggaagagattatgaatcacaccctgccttggaacagtgcacagagggaccctgagcaggccatgaagccacaatgcaatgcagttcacttttcaacctttgtagtttaagtggaaaacctaatgcttctgacaaaactgcctgatttaaatgttctcacttgaaaaaaaaaataatgatttaaaaaggaaataagactcccatttatttgcaaagcacagtacgggctgctgggtgcaccctgcgcccgagcacctgggagccagccctggactgcgcagccacctgcgggcggagaggggaggggccaggtgtcctcggcctctgatgtggcttccaccctgcgcccttttctgaagacacacatcctagagcccagagaacttgagggctggagggtttaaggcaaggctggatttcatttctatgttgaaattcttaagaacagaacagtgtgccgagcgcggtggctcacgcctgtaatcccagcattttgggaggccgcagcaggcggaccacgaggtcaggagatcgagatcatcctagctaacacggtgaaaccccgtctctactaaaaatacaaaaaaattagccgggtgtggtggcgggagcctgtagtcccagctactcgggaggctgaggcaggagaatggcgtgaacccgggaggcagagcttgcagtgagccgagattgcgtcactccactccagcctgggcgacatagcgagactcccgtcaaaaaaaaaaaagaaaagaaaagaaaagaaaagaacagtgggcctggcacggtggctcacgcctgtaatcccagcactttgggaggccaaggtgggcggattatttgaggtcaggagttcgagaccagcctgaccaacatgatgaaaccccatctctactaaaaatacaaaaattagccaggtgtggtggcgcctgcctgtaatcccagctactcaggaggctgaggcaggagaatggcttgagcccatgaggcggaggttgcagtgagctgagatcgcgccactgcactccagcctgggtgacagagcgagactccgtctcaaaaaacaaacaaacaaacaaaaaaacccacaacagaacagtggtcctcagctttacaaacacctccctcagcggcggccaaagaggacgcatcacagcagcccaggcctgctaggggcgtgtttgctggaggaggcgtggccgccgtgtgtccatccagacctgatagggcgcggccattggagaaggcgtggccgctgcgggtccacccaggcctgctaggggcgtggccattggaaaaggcgtggcccctgcgagtccacgttggccccggagagtaacgggacggcggaggggtcatttcccgccttgcacgtaacgggggacgaaaaccggcccccagcccgacgccggaccctggcctcctgggcccaccgacggcctccactaaggccccctcccgcccgcaacgtgggggacagctgaggccacttcccgggcgggccaccccaacccaaagcggcatgtcgcggggcagcacagcctgcgacaagcgcgcaaagctccccagcgggaccgcagcacgggcaggcctgggagtccctcgcgctgctcaaggccgctaaccggcactcagaaaccagcgctctgcggcactggagaaagcacttcccgccctcctgcaggctgttagccaggggatgcaaggggaggggcccctcacggacgtcccgcccgcccctctcaaacatggcggccacaggcgcaccaaaggaagagcccctcacaaacatggccgtccgcccctctcatacatggcgccaaagaggcttcaagggaagcgcccctcacgaacatggttgcctgcccctctcaaacatagcggccacaggcgcaccaagagaagcgccccttacaaacatggccgtctgcccctctcaaacatggtggccaaagaggcttcgagggaagagcccctcaagaacatggttgctcccccctcaagaacatagttgcccacctcgctcaaacatggcggccacaggtgcaccaagggaagcgccgttcacgaacatggccgtctgcccctttcaaatatggcgaacacagaagctacaaaaaaagcaccccccgcaaacataatctctcaggcctgccacgggcgtgggaaacatagcggctacaggggtgccaagggacgcgccctcatgaacatggccggccacaggccgacttcctgctccagtgtcccaccactggcccaaggcctgtgaccttcgcccgccgcttacgaaagagccaacacggggggggggggggggaatcacatgacgagggtgctgcactgtgattggctgtgctgacgtcggacgccgccgcggcgcgctctgcagactccgggtcgccgctccgccgggacgcgttggccggggcgcgcggtgcttggctgcggtgctcacactcatgaggagccggaaggtgagggctgggtcccggcagcagctgcgccgggcagggcggggactctgggycacctgctgtctggagaaccggggcggggtcacggggtgcctgtggcctaggagcggcctccgcttgggcctcgcccccggcagtagttggggggctccaggccacgctcccgggagaaggagggctgccaggtcacgcccctgtgaaaagggggctccgggccacgccctcggragaagtggagctcacaggtcacgtccccgggagaagggggctcccaggttacccacccccgcagaatggggcctctgggccacacccccgagagaaggggagctcccaggccatgcccgcgggagaaggggggctccggtccacgccctcgggagaagtggagctcacagttcacgtcctgggcaacagggggctcccaggtcacgcccccttgaagggaggtttcgggccactttcctaggaaggtggggcaccctctccagaactggtttcaactcctggtagtgctagatgctgcagagctgagtttgtgcccctcaactgctgccactccaatggacgtcacacagcaagtgacctcagcttggccccatctactgaatgtgctaaaagtggggtgatgagggatccaccaagagggtggtgaggattgaaggggggtgccagtgtctggcaaggggcaagtgctcattgcgtgggtgtaacagttaaggcgaaggacccttttcacagtggacccggcgcgggtcccggtccacttgggaggctctgagctgcatggaggctctcctggtttgttcaaatggagtggccacttgtgaattccaactccttttactatttttatctttgaaccaaaacttgtctcctgtaggcacatatacttggatcttttttaaaatgcagtctggtagtttctgccttttgattgaattgtttagcccatgcacatttaatattattgatacactgtagttaggtttacatttgccattttactttttcttttctttatacaagtctgtctttttcttcccctgttccttctttaagtggattaaagtgaatatttcctaatgtagcattttaatttaatgattttttttccacaacttttttgggttttttccagtgctttatgttttaccgtatacagcttaatcttcatattctccatatacatcttaagcttcagatttgtactaggttaattccaagtgatacagaaatgttactcttatatggttatttttgtggtattttgttatatgtattacatctgataatgttacaaactcaacagtactgtgttatcattattactttctgtctgtggtcatttccttagccagcaggggtttgctttcacccactttgttttgttattggcaaatatagtacatgtctgtatatattatacacatattactgtatacaattgctttttaaattaagagaaggaggtagaggaataggcatttaaactatataagaacataattacctttactggtgctgtttttgtgtgtgtgtggttttgaattactgtctggggtcacttgctttcagcctgatgaacttcttttagtgtttcttgtaaagtgagtttttttgttgttgttgttgttgttgttgttgttgttgttgtttttgctttgagaccagagtctcactctgttgcccaggctggagtgcagaggtgtgatctcggcccactgcaacctctgcctcccgggttcaagtgattctcacctcagcctctggaatggctgggattacaggaggctgccactacgcccggctaatttttgtgtttttactggagacaggttttcaccatgttggcgaggctggtctaaaactcctgacctcaggtgatcactgcctcagcctcccaaagtggtgggattacaggcatgagccaccatgcccagcccatttttgaagtatagctttgctggatataggattcttggttgacaagtttgtttgagcatgttgaatatgtttgaatattctccattgtttcagtcagttcatttattgaggttcccttctaagtggctttcttcttggggctttcaaggttttgttctctttcaagattttgcctttgatctttgtatttttacagtgatgtgtctgtggatctctttgcatgtatcctatttggagttctgttcattaagattcctggatatggggccaggcacggtggctcacgcctgtaatcccagcactttgggaggctgaggcaggcggatcacaaggtcaggagattgataccatcctggctaacacagtgaaaccctatctctactaaaaatacaaaaaattagcggggcgtggtggcgggcgcctgtagttccagctacttgggaggctgaggcgggagaatggcatgaacctggggggcggagcttgcagtgagccaagattgtgccactgtactccagcctgggcgatagagtgagactccgtctcaaaaaaaaaagattcctggatatataggttaatgtttttctgtaaatttgagaagttctcagccattatttcttcaaatattttttctgctcctttctctctgcattcctggtggttcttattttgtgtatgttagtgcacttaatgatgtccagcatttctctgcagcttgctttatttttcttcgttctttttttctctgtgttcttcagcatgnnnnnnnnnnnnnnnnnnnnnnnnnnnnnnnnnnnnnnnnnnnnnnnnnnnnnnnnnnnnnnnnnnnnnnnnnnnnnnnnnnnnnnnnnnnnnnnnnnnnnnnnnnnnnnnnnnnnnnnnnnnnnnnnnnnnnnnnnnnnnnnnnnnnnnnnnnnnnnnnnnnnnnnnnnnnnnnnnnnnnnnnnnnnnnnnnnnnnnnnnnnnnnnnnnnnnnnnnnnnnnnnnnnnnnnnnnnacagacagcttctgtggcctgcttttattccagtgtatgagcctacttttctttttctttgagtgcttcataattttttgttggaattatgccttcataatttttttgacattttagataatacattttagcaattctgggtactgtccccaaccctggggcttgtcattgttaatatgcttatttgtttagcaactgggtagattgttttgataaagtatatttcccctgccacagtgttcagcctgtgatgttgctggtggggggtggcacccagccactctggatgacagtggttttagtgaggtccttttcctctttccctgaccacatccagctgttgaacttcgctaatgccaggttattgtgctgttctcagcaacagcctgggcataagttgctctacaaactaatccaatcaaattgtggcttcttcgaagggatactttctaaggtcagtgtttggttagtttgttctgtgtccaagaggcctcctcccagccgtgttagtctctggttctcttctgcgaactggttggcctacaatttggcctattgcttgattctccactgcctccacccccttcgtcacagcatccacggtacttgaacagctcccttaggccggaacttctccacattccatggcagggaatttggtgcctttgggcaggtgtaagagctgtctgtttagttgcctgcctctcatcccaggcagagcctctgagccagggcctgcagctgaggacagtaatgggctcctctctgaataggggctgggggagctagcagcagcctgagatcctccaaatgtgtcttccccagcctggaaccacctcatatctaggacggggttgatggggccccagtcttctccgttcactgggcggagcctcttgcagaggcttaaaccgtactggtagaatggagccaaggtgaagccttcattctacaaatagggtctgagcagaaaggagggcccctcttctcaatcctactcactcaggacctggtctcagtcacaggtgggatgagagcagaaagggaagcactgctatcctgcctctcnnnnnnnnnnnnnnnnnnnnttcgtgtccttaccaaatgtatgtaggtgttctggagcaagtgtttcttcatttgctgggtgcccataggaccatttccaaaggctctctaaatggctgttttgggactgctcattactctctgagaaggtcagtgaagctcctcgagccatcatgttgaagtcagtctcggccagcccttttggagaaaccatgtttgtgcttctgacataccagttattaaacaatctactggaatgaggagaatctcaatgatgagaaagtctttccttttttggactgtgggagcagtccaagctgcccagctgcagagcaggaatctgcaagtgagactgtgaccaattcttgacattttggagttgacaccttggaggtggttaatccatgacgaaactgaagctaagccgatctcatgttttgactcctgtcaatccggagaggacagcaaatggcctgctcaggtgtctgttaacagccagcgcttccaggcccaccagatcctcaggtgtctgttaacagccagcgcttccagcccagcagatcatctggcttttctctgcagaaggggccaaaaggtccacctgatgaacctgttgcacgcgaaaagttcagaaccactgctgccaagatgctgacagaagccttgagaagcacctgctgcgggaaaagacgtgcaggcgtagaacacagagcgggtggcagcttcttcagttcaatccccacctcaggcagttgttgggggtcatatctagggtgagctgtggtgatggaatagagatttggaagccaggcatcactcgtataacctcataagctccttacccaagttgtcctcatctgaaatgggtgtgccactcctttaaagctgttcaggcaccgagctgggctccccacacagcatactccagcacagagcagcaaagcgcccggaggagggctcacagcagggaggagaggtggggcagtggctttctaggtcagagatgtcttttccctacgaggcacgtgatggcgttttagggagatgggcttgtttaagacccagtgggaggattttgatgagagatgtttatggcaactcttagcaagttctgtaacctctgttgcctcagtccccttggtgtaactgtgaccatgacgtctgccggggctctcagcaaagccctgcccttgtgagaggacggaggcgcagcccccggtgtgctgtggtagcaggcacttcacccagcctgtgggcaactggcgtgtcctgtgtacagcaggcgggcgtcctggcctccggtgggctgctgcctgctcttctccctcctgtttcagacacacactctgactgccacagtatcacaggaccttggagctgccaccccacagggtttctggagctgtcttgggctacggggtgcatggcagagacagattatttcttttttttttttttttttgagacggagtcttgctctgtcacccaggctggagtgcggtggcgcaatctcggctcactgcaagctccgcctcctgggttcacgccattctcctgcctcagcctcccaagtagctgggactacaggcgcccaccaccacgcccggctaattttttgtatttttagtagagacggggtttcactgtgttagccgggatggtctcgatctcctgaccttgtgatccacctgcctcagcctcccaaagtgctgggattacagccgtgagccaccgcgcccagccgagacagattatttctgtgttttatttttttgtttttttcctttttttatttctcttatctgctgttgggcagggcactcttcatccgtccccttctgggttccagttctagggcctgttggcagcagctcttgggcctttcccggccatgtcaacctgcattgctcctgtttgttgcttctactactcacactcattcctttcgagttttctaagtgcagtgtggtattgtggactggattctggaacagaaaaacggttcatggagaaaccgataaaatacaaataaaatctatagtttagtgaagagtaccgtaatgtcactaatttcttaatgttgacaatgtcctgtagttgtttaacattagtggaagctgagtgaaggctacatggcaactccctgtactattttattattattattttttcagagacactgtctcactctgtcacccaggtggagtgcagtggtgcagtcatagctcactacagcctcagactccygggatcaagtgatcctctcacctcagcctcccacatagctgggactacaggtgcacaccaccacacctggctaatttttaaaaaaattttttaaagatgggctttcgctgtattgcccaggctggtcttgaactcctgggctcgagcgatcctcctacctcagcttcccaagtagctgggattacaggtgtgagctatcacaccagtttctttgtactattttttgcaactttctgaatgccgaaaattattcctaaatagttattttaaatgttatgtctttaattaatttctttcttgttattagaggagtttgctttgcattcaggataaaagagaggtggaccagtttgttaatattaaaatttgtgagacagtcgctagctgcattcagctaatagaataggagtctaatttgaggaagagaaactttggtttcctcatgttacctttttttaaaaactttgacaacgtatgaaagttggagagccttctaaggaagggcatgtgctgcttattctaaacactttgaagttgacttaatttccactaaaggacaaatggtggctactagaaatatacaagataagggggacagatcgtcccaagcctccaaaatcgtggaaatagtagatcctgtatcctaaatccaggcacagtttcatttggatttacacattcgggccacagctgtctccacaaagatgataaaatcctgggagtgggaggggcggtcttcgggtgttctttaggtgggaaattctcgtctacatgttcatgctgccttcctgagagcactctctgagtggctctcaatctctctagctcacaggtgcagtgcggtcttcagcgcgcttraaagcacgaagttgttcggcagccaggttggcctctgcccaggaagttgctggttccacgtctgccaagacagcatgtctggtgagccctgttaccgtggagaaygccaagatcctgactcgagggtccatttttatacaaaattgccactccaagatgtgttgctttagaaaaatatcgactgttacttatctgccagagrgggactattgcagatgaaaaggtgacwgcactgtaattgccttcagagaaagacacactctgcaggccagggctggctctcctagcacccgcccacccgtgtgtgtgtctagacccgggctctgatcctagcacccgcccacccgtgtgtgtgtctagacccgggccctgatcctagcacccgcccacccgtgtgtgtgtctagacccgggccctgatcctagcacccgcccacccgtgtgtgtgtctagacccgggccctgatcctagcacccgcccacccgtgtgtgtgtctagacccgggccctgatcctagcacccgcccacccgtgtgtgtgtctagacccgggccctgatcctagcaccckcccacccgtgtgtgtgtctagacccgggctctgatcctagcacccgcccacccgtgtgtgtgtctagacccgggccctgatcctagcaccctcccacccgtgtgtgtgtctagacccgggctctgatcctagcacctgcccacccgtgtgtgtgtctaaaccaggctctgaggccacttgtgytcatcgctctgctcttagcgtgctatggagtcatgctggcccattgccgtgcagcctcaccgccagaggcttgaagagaaaggcagagtgggtggggaaaggaatctcatgccgtctgccgttcaccctagcccagccatcgattccgaggagcgagttcctgaactyaccggtgaagtagagccgcttcrcggagcctacagttgaggggttaggacttggccatatgccagcgtgtagcacagagctttgctcatgatgaggtgcttggtaaaattttgtcgaagtcaatttcacaaatatttcttgagcacctactgtgtgccaggcactaattggtgaataaagcaaagacccctgccttcacagagcttatgccctagcagaaatgaatgaaagctggattcttttactgtaattgtataatatataaatatatgcttcagaattcacctgaggagctgtaacgccactaggggaaactgaaagtgtaggagtggtgtggagctgtaacgccactagggaaaactgaaagtgtaggagtggtgtggggtgtgtctagattcagtctcgcttgtattttgtcccttggtggcaaaacagtgaaatgacratctgtgaaagttgtggtcacagcatctttatcatttccgatgtgagaagaaatactagcctctggattgaggcctgttttatttgctagatatgtctggttccccttacattttttttcttgacagacttcctcatcccacaaagccacagacaggcgaacgtccaagaagttcaaatgtgacaaaggacatcttgtgaagtcagaattacagaagcttgtccctaagaatgacagcgcttctttgccaaaagtgacacctgagaccccttgtgaaaatgagtttgctgaaggcagtkccttgcttccaggcagcgaggctggcgtttctgtgcagcagggggctgcaagtcttcctctyggtggctgcagagttgtgagtgactctcgcttagcaaagactagagatggcctgtccgtgccaaaacacagtgccgggtccggagcagaagaatccaacagcagctccactgtgcagaagcagaatgagccagggctacagacagaggatgtgcagaagccaccacttcagatggacaacagcgtctttctagatgacgacagcaatcagccaatgcccgtgagccggttctttggaaacgttgagctcatgcaggtaagagcggygccttcctcctcccgtgggtactcaggcagcagctgcacattcaggtcacacactccccactcagtgcaggtaaataatgcctcgacacaacattaaacataaactaatcattttaacccacgaggagaaaatgaaaccgttggctaattgggggctctccctgcatctcccgagctgagaatcactgctctcgggaaaggtgtgtttccatgaaatcaggtttgtggtttttttgaacatccaccccgcgcttgctgttaatttcttttgttttgaacccagcacctttccttctctttacycgatcagcccagtagggaggaagttctcatctagaggcgagtgctgggactcaggcattttcacacgtctaaaagggaagagcgctctgcgagccctagagccgctgggtggggcacattgcaaatgcgggtgcagatatgtattgctcatgactgaagtcatgttttcttctccwctaaggacctcccacctgcrtcttcatcttgtccttcaatgagcagacgagagttcagaaaaatgcatttcagagccaaagatgatgatgatgaygacgacgatgatgcagaaatgtaggggccatacaaaataatgtccttgagtatttagtaccattaacaatttgacaatttagcacattacaagatttatataaaatgtatctccaagagaatgtcttaatcaaacttcagaactgacccatctaagtcaatagtgcaaagcacccaatacctgtggaggrtgtactcatgggaactaaaactcaaaccatctttgaggttgcaaagctgctgtactgtgccaatgtcctttcyttttttttttttttttttttccttggagacagagtttctctcttgtcgcccaggctggagtgcaatggcgcaatctcggctcactgcaacctccacctcctgggttcaagtgattctcctgcctcagcctcctgagtagctgggattacaggcatacaccaccacacccagctagtttttgtattattagtagacacgggggtttctccaygttggccaggctggtctcaaactcctgacctcgtgatacgcccgcctcagcctcccaaagtgctgggattacaggcgcgagccaccatgcccggccagtgtcctttyttatacacgtacatacatgatgatggcttgagtcagctgcagggcagtgggcttaatgagagggatctttgtaaagacagctcttcacttcagctcagtagctttggtcataggcaagtttgttttccattatcataatttgatgattcttgtgatgaattcaatgctagttcttaaagaactcttttatttctgtatgtggagctaatgtttaccttggaaattttgcaaaatacatgtaagaaagaaataaaatatattttgaaaatattttgaaagcagtcgtatgttcgtaaaaccggattcctttctcaatgcctgggagccgagtagaggaaacacatcctgcctcagtctcatgctcccaaatgctcataaggctgggtccatcttttttttttttttttctgagactgagtctcactctgttgcccaggctggagtgcagtggcacaatctcggctcactgcaacctctgcctcccgggttcaagcgattctccaggctcagcctcccaggtagctgggattacaggcatgtaccaccatgcctggctaatttttcgtatttttagtagagacggggtttcaccatgttggccaggctggtctcgaactcctggcctcaggtgatccgcctgcctcggcctcccacagtgctgggatgacaggcgtgagccactacgcccggcacgggtccatcttttagacctgttaaccaccgaggcccccgggacagggcctcttcccttctctcgagtgtacttccactcccactttgctgcagaagtgtcgggctttcctatcctgtgtggtggagacggtcagccatccagcgaaggccatgctctcctccaggccatagagaggtccgtgtgcagctgcctgacgagaactgcattccccagccccagcggcgtcagggagcacctcaccgtgtgttctcgcccagggcagtggagacaagccattgggagtgctctctccatggcctcttcctgccgccacctgcacatagaagctgagtggaccaaccaggagcaagctggggtccccgggtgaccaaggacaaggagaagttgcctgcgatgtgggaagactgggccttttcatgagggaacaagtgagtcttgctggttttgagcttttatatgtttctggtttaattacaagagcagctagaattaaccctgtgaaaatgtcctatgaagcacaggaaggattttctataacagataaattggaagcaaaatatagttgaagtgccctgtaagaagtgtttccactctttactattcaaacactgccctccctgaaggtgtcattctccacttctaatgtgatccttttctcatgagctgtgactttcacctgttttgaataactttgtgatttattgatcaacaaactataatttggaaatgtggcttataaagtcattttatggtagccagggaaaataatttacaacttttgccgggcacagtggctcacgcctataatcccaacactttcagaggctgaggcaggcagatcacctgaggtcaggagttcgagaacagcctggccaacatagtgaaaccccgtctccactaaaaatacaaaaattagccgggcgtggtggtgggcgcctataatcccagctacctgggaggctaaggcaggggaatcacttgaacccaggaagccgaggttgcagtgagctgggatcacgccattgcactccagcctgggcaacagagcgagactctgcctctaaaataaataaataaataaagtacaacttcagattgctgcatgaataactattaataacagcacctggccgggcgcggtggctcacgcctgtaatgccagcactttgggaggctgaggcgggcggatcatgaggtcaggagatcgagaccatcctggctaacctggtgaaaccccctctctactaaaaacacaaaaaaaaaaattaaccgggcgtggtggcaggtgcctgtagtcccagctactcgggaggctgaggcaggagaatggcgtgaacccaggaggcggagcttgtagtgagccaagatcacgccactgcactccagcctgggtgacagagcgagactccgtctcaaaaaattaaaaaaaaattttttttttaaatgacagcacctatcctggtggtgacgagaattttgccatcctctaagcagacttcagtgaggtgcactgtcccgaatgatgatacacctgcagaggagacgcagcacgcagagtggaaagtgtgtgtgttcctggggccacccctattcactcacagtggttaacctgcactaacaagcactgccaggtagaaacacttcctagtctacatgtggactgtagcctgcacagacctagggggactgaccaaaggggggcgaatgagggaataaaagataagatacaaaagagtgtatttgtgctcacgcacaccccctggcgcaggccgactgtggctctgcctacagcgcttcctcctgagctgcaggagggccatgtcttgtggtcgtgtttgctgcagctttgccgtctggatggagcctggcactgagctggttgaggccgtctgcaggcctttactgggctcttcccttggaagcttcttactgatgccaggacctcccagcaggtgaccctcagccccacagatcacagaattccacactcttagctcctagaacttttctccctcttgtgtgagaatgcacagaccacacactctttctttgttgcagaggttcagccaccttttctaacctgagactctgggtgacataactcctgataggtgatagctctttgtaacaatcaccagcaccttgcccagccaagggcccggaagcaagaaaaaaacaaccaaaacaccatgtcacagccaggagagccttgcacgcttcacacacagctcaacaagcctgggtttccggtgtctcaactcctgcagaaatgaagcctcaagtcaggaagggtgaggaggggcacggacaaggcccaacggcagcaggatggcgcagaaagcctgagggacacaaaaccttctaggcctagtcgtaggcagtggggcagcaccgtggagccacgtggtagagggatagccgccctgtgtgtccagggcaaggtggcacagcatgcctggaccgctgagaaggaaggacttccctcaagaatgtgtcttgcgccgggtgcaggggctcacgcctgtaatcccagcacttcaggaggccagggtgggtggatcgcctgagcccaggagtttgagaccaacctggacaacatagtgagaccatctctacaaacataaaaataaattagctaggcatggtggcacatgcccggggtctcagttactgcagaggctgaggcaggagaatcacttaaacccaggagttcaaggctgcggtgagctgagatcacaccactgcactccagcctggatgacagaacaagaccctgtcttaaaaaacagacagacaacaaaagaatgtgtctctgaaaaaggcccacgtctgtggctgttaaacagagcagctcgtctcctgaggctggagcgatggagctggaagggcctcacagctgtccgggccaggctccttgctgcacaggtgggatctgctggctccagagagttcttcagaccctgcaagagggatctgagaagagggaccaggccccccggttcccaggccctgactctcccactgtttgtccttccctgatcagagcagataaacatcaccgtaccatagatgggacttctagaaattccccacacaggactgggttaattctaaggtattgctttagctctgtgaagaaaatgtagtcaatttgtaaaattgaagtcaatttgtaaaatgactcaatttgtaaatgaagtcaatttgtaaaatatcacagactccttatttttatccttattttcagcatcctcaatgagtgcaaactttcttgacatgtctatttttgaaaaatctttattgcttttcctgattgtacaacaaatgtaaaaattcaaatattacaaaatgacttaatttaaaaagtacattttaacatgttataaaataaatgcccatttcaaaaaattcaagtatcataaaatacatgacgtagaaaatgagccctctgtaatctagcccaacccccgtatcccccaggattactgctgttcagatccgcgtgtttccttccagaccgtctctgtgcacccgccacccacacggctgacatgagctccatatgatccgagatgatagtaacgctgaccaacggagcagggttcagctgccgatgccctgaacagcttccagtttctacacagaaacgctttcctcataaaagcctgaaactgtgacacagttttgcactatgtaaatgtatcaggttgaatcatgaaataaatgatcgctcaccatttttggcctagaaaacagcagtttcacgtggttcaacgtgatagctgttcaacagacattggggggtttcctatttcttgccattataaacaattcagcaggtcaggtgcagtggctcatgcctgtaatcccagcactttgggagaccgaggcgggcagatcacctgaggtcaggagttcgagaacagcctggccaacatggtgaaaccccgtttctactaaacatacaaaaattagctggccctggtggtaggtgcctgtaatcccagctacttgggaggctgaggaaggagaaccacttgaacctgagaggcggaggttgcagtgagccaagattgcatcactgcactccagcctgagcgacagagtgagaccctgtctcaaacaaacaaaaaaaaaaatcagcagtgaatgtccttgtatgttctttacggagtataaacatcgtacccccaaagcatgacacctcttttgggcatttagaagagtcaagaggatggagctgcccatttgccatggaaagggagacccagcagagagctgatacataaacaacttgtccctcaagcaaggtggccaacttcagccatgacaccatttgagtatggtgaccacattacatgagcaaacccaacgctggtgaaaccagagaacagaagaattcctcagcccagagacaattcttatccctactgacccgtatgaccaggtactcacagacatccaacgagtaccccagagctgtcctctggaagttgggctgtcagaaggtataagaaatgattcaggctgggcgcagtggctcacacctgtcatcccagcactttgggaggctgaggtgggcggatcacctgaggtcaggagtttgagaccagcctgaccaacatggtgaaaccccgtctctactaaaaatacaaacattagccgggcgtggtggcacatgcctgtaatcccagctactcgggaggctgagccgagatcgcgccactacactccagcctgggcaacaaaagtgaaactccatctacaaaacaaaacaaaacaacaaaaaaaaccccaacaattcagaaatgtaatgaaatcagatttggaggaaacattttttaaggttttttccaggagctactggagtgaccaaaaaaacgaaaaacaaaaaaacaaaaaaggcacctgttaaaatgatgcccacgtcaggcctcaaacaaagaccaggacgtggtgtgtacgtgtcactggcgtttccgcacaggctgcttccgcttcaaccttgtctggggtttgtagattctgcttgggtcacagttgagcttgtgggtggttttcttatggcagacaatgtgcactagttttaggttctctgaggtaaaaagcaggccataaaaatactcccagtccacttctcttccatcttgttccttaattgcttccaccagtgtaggaatgatggtgcgtttcttttctattctgcaaagtaaggttagagacatcattttctgtggtcacagtgccacaggcaacaggtcatagcagtgtattgcagtcacagctcttcacaaattcccctaagtgctatcacggacacacggccgcacctactggccaggtttgttgagcagagcctgatgcaagcagcctggctcctcttactttttaaaacttgacttgtggccgggcacggcggctcacgcctgtcatcccaacactttgggaggccgaggcgggtggatcacttgaggttgggagttcgagaccagcttggccaacatagtgaaaccccatctctactaaaaatacaaaaaattggctgggcttggtggtgggcacctgttatcccagc

SEQ ID NO: 96400 - DNA, 13566 bp, Homo sapiens
tgacttcagatgatctgcccatctcggcctctcaaaatgctgggattataggcgtgagccaccatgcccagccatcaatttttaaagaaaggaaaaaaaaatttttttaaggagaacgtgttatgccaggcatggtggctcacacctatatcctagcactttgggaggccaaggcaggaggatcacttgagttcaggagtttgagaccagcctgggccacatggtgagaccttatctctgtgaaaaaataatgttttttaattataaaaatgttaaaggctggacgcggtggctcacgcctgtaatcccagcactttgagaggccaaggctgtgggtcaaaaggttaggagttcgagaccagcctggccaatatggtgaaaccccctttctactaaaaagacataaaacttagccgagcatggtggtgggcacctgtaatcccagctactcgggaggctgaggcagaagaatcgcttggacccagtaggtggaggttgcagtgagccgagatcgtgccactgcactccagcctgggcgacagagtgagtctaaaaaaaataaaaaaggaattctcaataaaaatgttaaaaatagactaggcacagtggcccacacctgtaatcccagcactttgggaggttgaggcgggcagatcacctgaggtcaagaccagcctggtcaacatgacgaaaccctgtctactaaaaatacaaaaattagctgggtgtggtggcaggtgcctctaatcccagcttcttaggaggctgaggcaggagaatcgcttgaacccgggaggcggaggttgcagtgagctgagatcatgccactgcactccagcctgggtgacagagcaagactctgtctcaaaaaaaaaaaaataataataaataaataaaaatgttaaaaatagaggccaggtgcggtggctcatgcctgtaatcccggcactttgggaggccgaggcaagcagatcacttgagctcaggagtttgagaccagcctggacaacatgatgagaccccagtgcaaaaatacaaaaattagctggatgtgcttgtttgaacccaggaggcagaggttgcagtgagccgagatcgcaccactgcactccagcctgggtgacagagtaagactgtctcaaaaaaattaaaaataaggagaacgtgttaggggatgcctgtaccatggaaagagctcattgtattgtatataccggactcgaaggttctggacaccagggttacctgggcagtggccacatttaggaagtaatcgaccagctccttggcgttgtactcggggctgcgagggtcctccaccagcggctgatcgacacacagcacatcccagcacagattccttggcgggttgtaaccattgggaagcacacctgcaggtcacaccaagttcaaggggtggcccatcacccagaccttccctggtttcaaagccggccatgtcccacccaggatgggcttcagaatttgtgtcccaatgcaaaaggaaatgcagggcctttgttcccagactataggaattccaggacagtgacaacagagcagatatcaagcccagggcccttctgagtgtgtggcaccatggctggccctgccctcaccaagccccctaccagtgaagaggtccgcggtcgggggcttcaggctggtgctggcccgccacacctgctccatctccagcttctgcatccgtacccacttatcttgataatcaaggcgcccaaagaagaagccgtcgaagcccatctggggatgagggaggaaaaggcagtgtgaattagtgcccagccctctcaccaccaaactcccctctgcttgggaggggcaggtcagagcacaggttaaaaagcagtgctaggtcgatgtggtggctcttgcctatgatcccagccttctgggaggccaaaacaggaggatcacttaaacccaggagtttttgagaccagcctgcacaacacgggcagactgtctacaaaaaatttaaaaattagccaggcgtagtggtgcgctcttgtagtctcatctactaggggggctgagacaggagaatcgcttgaatccgggagattgaggctatagtgagttaggattgcaccactgcactccagcctggatgacagcaagaccctgtctcaaaaaacaaaaacaaaaacacgtagggctgaaacagagaggcctccagcttatttccaagcttggggaagtttcagaactcaccaccttgggctagcagggagagggcgggtccaacatcagaacccaggttcacctccccagcactgtcaaagcgcagagcaggcctgactccaggaatgaggttcccccttccacagcctgaggatggatggggtctgagcacaggtaatgaacctgtttttaaggcagcctaggcatccacttgccacccggtttagggaggagccaggacccgagctagtgggtggggccagaacaccaagaggggcctattaggggagagggcggagccagccggagctgggtcagcctgggctgggcatagccggctgaggccagagctcaaaagccactggctttacggctcactcaaggggcagggcttcaacaggcctaggcctgggcctggtccttgtgagattgcagggagagggcggggtttgactgggcgagggaggagccagagtgagtgaagaagtgggcccaagagaggtcccgggtcgcacctgcgcaaacagcgaggcctgctcccgagagtggccgaaggggtcaatgtgccaggccacacggggtcgcccatcattgccaaatgtgtcctccagaaagcgcagcccaagtgtcatctggtccacgatggcaccgtagtgggtggctgcctcatcgttcatcacccagccaccattggcgaactccaggcgccctgtgccaggacaggcaaggtcagggtcagcggtcagagccaggagtgggagtagggtgggtgatactgggaatgtgaaagcctgcctgtgtacacatttctggcggaaggacaagaggggtcgctcccaggccatagttcccagatatgggaaagaggccccctgcatggcaggcttcccagaggatgcacagcaggtggggctttgtgggatgtataggaggtctccaaatggagagtccaggcaggcggagcgacacgcatgttatacagcttgcacgtggcatgacaaatctcagaaaccagagatgcagaagcagaagctgggctgggcttcctcttttcacttccttggggtaggctcaccctggcgcacaaggtctcgcacgacttcctgtgtggcatttgtctgctggtgccaccaacgggagaagaaggcaatctccacgtaaatgaagcgacgggtgggatctgccagcaaggcagagatgaccgagtccaggatgtactgcacaccggcgtgctggatgtcattcttgactgtggataacagggataaggctctcagggaacagcagagccaagggggttattcctagacagaggagcccaaaccctggatattagggtagcactggccccaccctaatgtccaggacccagagggattacagggaccatggggatcccagggaccagtccccatcctctactcacttccataaaagtactggtccacggttttgagccagcccacgtcatcatgtgtgtgaggcagcaggtgcacgttcagcatgttcggctgcactgtggggcatgtctgcacagggaccccaaacacacataccttgtcaataacccccgaggtcgggggctgcagagtaagtcttgatctagaggtgagtgactcagagaggcctgatctcgcctatgtgcagaggaggccaggccctcccaggcaggacacacacatacatagttgtgctcatagatacaactccactttgcacaaccccacagggcagctctcattcacactccgggaaaataataatagaagtagctgatgtttgttcagcatttgccgacagcagacggccaccgtgggaggtggggtgatgttatccccagtttccagatgaaggcactgaggcttagagaggataggtgacttgcccaacgtcacacactcaggaagtgtaagagctaggctggaatttcaggcagactccagagtcccagctctcagccagcacctccccccacacatacactgctcaccccctgccacctcctgcccctccaatcccacagttaagtgcagacaaagtctaggcaagcatcccggagacacggaggcaggtacaatcagacacagtcctatactcagatgcgcacagccagacctcgcaatgacacaaagcacgcactcagaccacactgtcatatcatcagccattcactagacacccacaggacagacccacccacacctctagactgtattctgggtttcactctgcctcctgtacgtttcagctcggaggccccactcacctcgtatcccccggcccgagcaccggcagccgccagcaacaaaaggaaaaagcagagaggcgggagcggtggccgcagggcgcgggacatggtccaggggcctgctgagtccaggcagccgcgagcgcagacccccgaagcccgcgcgtaggcgcccatggctcagcagcttcctcctggggttccccggccctggaaaggccgggcaaacgccccgcccccagacccggccgggccaatcggggtggggggcggggccagggcgcggtctggaggctcacgggagagaggctgtagccctgggcaatcccgggggtcgttacaggaaggtaggaaaatgccaccctcagggcactggttgggctaaaggtgacactggcgtctcacgggctatgaagacggaatgcctcttaatgccggaattccaagacggaatgcctcttaatgccggtaggagcagaagtgcttttcctaagggggccgggttttcctagccggtgtagtgtgtccatgggaatccagggtgtccgtcccatggaccttcagcgctagggtcctggaaggacctagcttgcctaagaggaggatctgatgaagagtcctatactgtggggattgggacgttgggtaaatacccctggagtaccagggatgggatccagcctggttgagaaggatccctgggtgttccggagagaaaagagggtctgacaagtggggaaggaccccgagtctttcatgcctttcccaattcctaccagttcattctctgataagaaaacaaagcccagggcaggcgcagtggctcaagcctgcaatcccagcactttgggagggccaggctggtgaatcacttgggcctgggagtttgagaccagcctgggcaacatgggttgttttgtagagacgggtttgaaaacacaaaatttgtaattttacacaaaatgtaaaaatacaaaaattagctgggcatggtggcacatgcctgtaatcccagctacttgggagactgaggcaggagaatcacttgaacctgggaggcggaggttgcagtgagccgagatcaagatcatgccattgccctccagcctgggcaacaagagcaaaactctgtctcaaaaaaaacaagaattaactgggcatggtagcacgcatttgtggtcccagttacgtggcaggctgaggtgggaggattgcttgagcccaggagtttgaggctgcagtgaacatagattgtgccactgcactcagcctgcatgacagatcaagaccattttctttcttaaaaaggaaaaaaaaaaaaggaaaccaaagcctagattatctaggtcagcagggccatctggtgagttgccagagggcagaagtcactgtcttgtccctagcacctgacttaagacacaaggtttatgaagtaagcaaatgaacagccagaagcctccagactggggccccacaccaggcctatggggctagagcccttcccgccaggtaggaggaacaccccactgaacagaagaggctgacagccagagtgaaaaactttattaacaacaggtttcaacgagaaagcaaatgaatacccctagaaacatggacagcatctcccccagcagcaggcaggggaagggaggcaggaggggtaagcctagggtkttccctaggaaagggccaggttccctctatcmagctgggggcaccgagacggcctcattcagggaagtccaggatggcagctgaaggcagcaggtttagcagccaaagcccaggcctagtggatagacagggtccaaaatgtgacccttctaggctgrtatcaccatggggscgtcatgggctgaggattctgcagataggacatcaccacggcagagatggacagcctgagacaggagagaggtgtcagtctaggatggscaggctggggtccccccaccccttactcaagagtcacttgttctgtagggcaagtctcacatgaagctactcatcatttgcttcgtgtcctccgagctccgagagttggcaaagctgatgaaggagcagtagacagcgacccaagcacaccacttcagctagggaaaggtaagtgggtgggcaggttagtgaaaggcacaacaatgagtccccgaagccacctttccagacaccagatcatgcccactgattccatctgatgcagctgggaccttgccccacccggaattcctcagtcccacctgctcatggcatactctagatacgtggtttctagtcctactgtctggcctgcgtctctcaggaccaagagagactctgacatcccacatgcttaagaccctgccctttttccacaactcctctccaagttgcttcaaagcctggccccactcgcagaccaatctgccacatccccaacctgactcgaatccttgacttcaccaaagactggggctttctcggcccagcgtcatcgcagccccactcccggccgatctcaggtcccgccccatcagcaatgacaagacaccccgcttcattccaaacccgcccccgggcctcgttctcaggtccaactacacccatagaagctcaaccccgcccaccttaagcatgaggccgcacatgctgaagatcatgcccagcaggttcatgtagtccggcgtcgggtcgtccarggccgggttacattcgctcggcgggggcttgtacctgcgacaggctcgagggtcaggggcgctcaggtcctgcccccgggatagacaggcgcttcccagggccccgatccacacccacaacccgaacccgtgcccacgacgctggggtcctcacctcagcactttgttcggcctccgtgggtccgacatattgttagtgsacatagcgagtcgaaggccagatcacgcytcttccgctgcaggaatcgcagcttccggcgtgcaagctgagggcggattttagagtaacacccgaggccctcgcatttccgttcctcatgacagaggcttggactccccttacccagagaacggagatttagsagaagccagaagtctycctttcaaagggaaaatggggaaaagaacctgaaagcgggcttcaatagttccaacccgatcaccgaaatgccaaaatgatgaacccggaagtgataaacaggaagtaggtcaggaagaacaataataaggttacacccaagcgtgggtttctaaggcgcggaattttccgtacagaccgatttaaggctgcaaggaaggagtcctgggagcatggctttccctgagccaaagccgcggcctccagagctgccgcagaaacggttgaagacgctggactgcgggcagggggcagtgcgagccgtacgatttaatggtgagcgccttcgtcttcattccgggtcctcctcccgcctcctgagatcgacggcccagtaacccccgcctggtgttccccagtggatggcaattactgcctgacgtgcggcagtgacaagacgctgaagctgtggaacccgcttcgggggacgctgctgcggacgtacagcggccacggctacgaggtgctggatgcggccgggtgagccggggaccaggctgggatgggagcgctgaggctgggatccgaggtcgatgctgatcctcctcctcctttactccagctcctttgacaacagtagtctctgctccggcggcggggacaaggcggtggttctgtgggatgtggcatcagggcaggtcgtgcgcaaattccggggccacgcaggggtgagtgaaagcctggagaccctcatttgagtggaggggacccgtattagcgcataggtggtgacacggccacccccattacaccgtaaggatcccttccccagatgacgatcccccactccgcatgccaggctaggcagtcaccaacccctgtccttgctgttcccccaaaacctttcacctccccttcgcccttgctttaaccgacactgggaaccctgcctttatcccagtcctccaaagtccagcctcctctgagtggcaataactttctcagaaggtgaacacggtgcagtttaatgaagaggccacagttatcctgtccggtgagtctggggcctaagcacgggggcccagggtgctgccctccccctccaaacctgacctcaccatcatgctggcctcacaggctctattgattccagtatccgctgttgggattgccgctcacggaggcctgagccagtgcagacgctggatgaggccagagatggcgtgtccagtgtgaaggtgtcagaccacgagatcctggcagggtgagtggagccaggacctggtctcaccccaggtgctacggggaatcatagctgcccccatgctcagattaaaacctactctcagctgggcacagtggcacacagctgtaatcccagctacttgggaggctgaagtggaaggatcacttgagtccaagagttcgaggcaccattgcactccatgctgggtgaaagacagactgtctacaaaataataataatctggccgggcacggtggctcacacctgtaatcccagcactttgggaggccaaggtgggcagatcacttgaggtcaggaggttgagatcagcctggccaacatggtgaaaccccgtctctactaaaaatgcaaaaattagccaggtgtggtgacgggagcctgtaatcccagccactcgggaggcggaggcaggagaatcgcctgaacccgggagttggaggttgcagtgagccgagattgtgccactgcactccagcctgggcgacaaagtgagactccatctcaaaaaaaaaaagataaaatgatttctaaaaataaataaaaataggccgggcgctgtggctcatgcctgtaatcccagcactttgggaggcagaggcaggcggatcatgaggtcaggagatcgagatcattctggctaacacggtgaaaccccgtctctactaaaaatacaaaaaattagccgggcatagtggcaggcgcctgtagtcccagctactcaggaggctgaggcaggagaatggagtgaacccaggaggcagagcttgctgtgagccgacatcgcaccactacactcctgggcgatagagcaagactccgtctcaaaataagtaaataaattaaataaataaatacataaaaataatcataaggaagaatttttgttttttttgagacgcagtctcgctctgttgccaggctggagtgcagtgacgtgatctcggctcactgcaacctctaacttctaggttcaggcgattctcctgcctcagcctccctagtagctgggactacagtcgcgtgccaccacgcccagctaatttttgtatttttagtagagacggggtttcgccatgttggccaggagggtctccatctcttgacctcgtgatccacctgccctggcctcccaaagagctggaatcacaggcgtgagccaccgcgcctggtggaaaaaatatattttctattcattaagtggaagtgaagagatcgtcataaagatcttcgtgttgagaaagcagaggaggaggaagaggagggattgatcttggtgtctcacagctgatagaggcagaagaaaatccacatataagtggacgcgttcagttcaaaccgtgttgttcatgggtcaactgtactttgaaaagtgctccctctggtggctgtggggggtgcagggagaccagaacagtctagatgctggtgctgggtagtggggaaagtggtgggactgagtactgaggaggaggagctggagaatgcaggaaaagggggaattgggccaggtggggtggctcacacctgtaatcccagcactttgggaggctgaggtgggcggatcacctgaggttgggagttcgagaccagcctgaccaacatggagaaaccccgtctctactaaaaatacaaaattagcagggcgtggtggtgcatgcctgtattcccatctactcgggaggctgaggaaggagaatctcttgaacccgggaggcagaggttccggtgagccaagatcatgccattgcactccagcctgagcaacaagagcaaaactctgtctcaaacaaaaggaagaaaagggggaatcagaaggactccaagggcttggaaagggggtgtgggtcttggaaatgatggagtaggacgtaattggccctgggcctgagtctcaaggccagagcttcagaattccactcctgtgcactggaagagcaggcccactgggctgggaaggcacagggctgcctggagccatgtgagtgtagtcaaggttcccgctggatctaccctctcctgcagctccgtggatggccgcgtgagacgctatgacctaaggatggggcagctcttctcagactacgtgggcagtgagtgtggctggggatgtgggacaggcagggaagatggggggccaaccaggggcaccccaccctcactcacctacccacccttcccccaaggccccatcacctgcacctgcttcagccgggatgggcagtgcaccctggtgtccagcctggactccacattgcggctcctggacaaagacacaggggagctgctgggcgagtgagtccttgtggtcgtggggatccccttccctcctctcccacccctggagaggaccaagccccccgatcctgtccacccttaggtacaagggccataagaaccaggaatacaagctggactgctgcctgagcgagcgtgacacacatgtggtcagctgttctgaggacgggaaggtgttcttctgggacctggtggaggtgaggtgcccccagccctacttcatacctagatgcctgccccatctcagccctgtccttacctcagtcactccagggcctgaaggctaggatcttttttttttttttttttttttttttgagacaagtcttgctctgtcgcccaggctagagtgcagtggcgcaatcttggctcactgtaaactccgcctcccaagttcaagcgattctcctgcctcagtctcctgagtagttgggattataggtgcgtgccaccacacccagctaatttttgtatttttagtagagacagggtttcactatgttggtcaggctggtcttaaactcctgacctcatgatccacccacctcagccttcccaagtgctaggattacaggcgtaagccaccacacccggcccttttttctttttttgagactattgcccaggcaaatgcagtggcgccatctcagctcactgcaacctcttccccccagggttcaggtgattctcatgtctcagcctcctgagtagctgggattacaggcccctaccaccatacctggctaatttttgtatttttagtagagacagggtttcaccatgttggccaggctggtctcaaactcctgacctcaagtgattcacccgcctcggcctcccaaagtgctgggattacaggcctgagacaccgtgcccagcttgggctagagagaagatgaggcaggaagggcattccaggcaaagggaacagcatatgttaagaggtgtagcctgcgcatgcatcagtcaggaaacaaaggcttcagggtggcggcaggtgcggcaagatccggggtcaggctgggctgcagatgccaggccgagcaactggcactgacccctgggcaagggggagccgacggccatgtctaaccttgggtgagatagggctgcagtcattcaagaaactggagctacatcttagcatccctgtgcatggtttcaagccctgagccctgtccttgacatgtcccagcctggtggggagtcaggccagaaacagaccatcctggtgtagtggggtcagagccgggggaatctcggcaaaggagacatcagcgctgggcttggccaggggaactaaggcccataagaggatggagggaaccgggggggccctgaagacttggcggacaagctcttgctttaggaactaaggtagcaagaatgttccacctatttcttatgggcccagtagaacagaagttgccttggagggcaggcacatcaagggacattttcaaggtggaaagaggaagcatggcttgcttgaggaactgtttacattgtgttgggaccaggggaagtggggatcattggggctgccaaatggacaggatggagcccagctggtggcagggaacaggcaagctgtgagcaaggcatgctccaaacatggtagtggcagaaaatcagcagtctctggacatggtctagaagcagagccaagaggaataactgatagaggaacatgtggtacaagaaaaagactcccggccaggcatggtggttcacacctgtaatcccagcactttgggaggccgaggggggtggatcacgaggtcaggagatagagatcatcctggccaacatggtgaaaccccatctgtactaaaaatacaaaaattagctgggcatggtagcgcgtgcctgtaatcccacctactcgggaggctgaggcaggagaatcgcttgaactagggagtcggaggttgcagtgagcccagatggcgccactgcactccagcctggcgacagagcaagactccatctcaaaaaaaaacagaaaaagaaaaagactcccaaagccaggcatggtggctcacacctgtagtcctagcactttgggaggccaaggcaggaggatcacttgaggccaggagttcgagaccagcctgggcaacatggtaagaccccatctctgctattttaaaaaataaaaaatcaataagaggctcccaagacttgcggcctgaacacctggtaggacagagctactgaggggctcagtctgaggtagattaattttgcagtgtctaggaggcaattagaggcaggtggctgaaggtcggggagaggtgactgagggcttcaggcaggactgagatggggggtgcccagggacctcagaaaccagggtacagcccagccacagataaccactccctacccctcgctccacagggtgcgctggctctggccctgcctgtgggttccggtgtggtgcagtcgctggcctaccacccaacagagccctgcctgctgaccgccatgggaggcagcgtccagtgctggcgag

SEQ ID NO: 96401 - DNA, 13846 bp, Homo sapiens
ccacacacacaaacacacatacacaccgacacaagttagccataggaactttgaaacaacctacacgtacatacatctagaccatgtgcaacccatcctatagagctcacacacacacagagtggaacagaactctacacagataagccctacatagacctttgcatccagggctgggcacagaagcgggcagagggctactcctgtctctcaggcctgggtgtcagggttggaccagcacacactctcacatgcaccctataggccagtcacacgcttgccccctggaccttgccaaggttctgtgggggcactggacaccccagtctgtctctgccccacagagatcctggcacttcctctctccaaacatcacccccacttccctccctctttgcttttgccacttcccctaggaggcctagctcagcagcctctgctcctgctggggtgggggcctgctataaagaggtcacccagggtcttggtgatgcccaggtcccccaaggcttcaccagcagtggcagggatggaagcagcttcctgagaaactcccctcatgcccaaccatgtcagcctggagagagagaaagagagagactctccttcctgcttccaagaaaacctagcagcttcctctccaggagagggggcaaaggacccccaaaccacagaggtgggagagggaggcggctggtaggccaggagttcctgggggagggctcctgccgggcctcagatccacacccaggggcagggacacgggagggaggctgggtgctgtgtgctgcgatttgtgggttctcgccctggcctgcccactggctgactcacaggcagcccccagcccagtttcctagtgagggccccactggtcagtggggccagcagggaggggggtcaccgggctatttataagaaggagaagtccctcgtgccaagaccaaaagccccgaagacacttgtgggtgggggtgggtgaacttcctccttatcctgtgccctaggccccaggccctggggcactggggaagcctgcgcagggacttcttagccaggtgctggtctggagcccagggcctgggcagtacccagctgccagtctggacgctcaggccagttgggggagggggctgttctcccaccctcctcgtggggccggcctggcgccagtggggcggcttgagggggtggtgcccaggccacaagggtgacactggcagaggcctggaaccggctgtaccagcttggctgggcccccgccctccctgtctggcccaatctccaccccgtgctcaaacacccatgcagagtgtttggaggaaccctactcccacatgctggcctgtccacagagacccgtgcccctctgtctgtgccccaccacatttctcccccaattaaaggagaccctcagtggggtgcggtggctcacacctgtaatcccagcactttgggaggcccaggtgggaggatcccttagggccaggacttccagaccagcctaggcaacagaatgagaccctgtctcaataaaatataaaaaaataaaacttagcagttgtggtgtgcttgtagtcccagttactctggaggctgaggcaggaggatcgcttttacccaggagttcagggctgcagcgagctatgattgtgtagctgaactctagcctgagcaacagagtgagatggtcttgttttgttgcccaggctggagtccagtgtcaagatcatggctcatgtgatcctcctgcctcagccttcggagtagctggaactacaggcacaccctcctgacctcagctaatttttaaatttttttgtagagatgggggtcttgctgtgttccccaggctggtctcaaaaatttctgggctagggctgggcgaggtagatcatgcctgtaatcccagcactttgggaggctgaggcgggcagataacttcaggtcaggagttcgagaccggcttggccaacatggtgaaaccccatctctactaaaaatacaaaaaattagcctggcgtggtggcatgcgcctgtaatcccaactattcgggaggctgaggcagaagaatagcttgaacctgggaggtggaggttgtagtgagctgatattgtgccactgcactccaccctgggcgacagagtgatattttgtctcaaaaaaacaaaacaaaacaaacaataaaaaaaaactcctgggctcaagtgatcctccccctcggcctcccaaagtgctgagattatagacgtgagccactgtgtttggccaaagtgaggttctctttaaaaaaacaaaaaaagggccgggcatggtggcccacgcctgtaatctcagtactttgggagactcaggcgggctgatcacaaggtcaggagttcgagaccagcctgaccaatatggtgaaaccccgtctgtactaaaaatacaaaaattagctgggcatggtggcatgcgcctgtaatcccagctactcaggaggctgaggcaggagaatcgcttgaacccaggaggcggaggttgcagtgagccaacatcatgccattgcactccagcctgggcgacagagcaagactccatctcaaaaaacaaacaaacaaacaaacaaacaaaacaccaaaaaaagaggcccttcatgagacggcctgcagctggtactgcatacatgcttctctggttgtcattattcacaacacagtggctaatgctctgaagccagacagcttggattatatctcaactctagtgcttctagctgttggacaccagacaagttccttaatctcctgtggctcagtttctcatctgttacatggggatacaaataacatgcattttgctggattgttggaagcagtcgatgacttattttatgttaaccacttagaagagtgcctagcccacagtaagagccatgtaagtgttggctattaaaataataattattatttctcagcctatctatcttaagtgtttctgagtctcactgtctgcgtgacactaaccttgaacccatttgtctctctgggcatctctccctgccctgcgcccctgcccccatacacccactgttccttgccctcctcctgggatggactctgtctgggatggcctcacctctctctaggactccctctggcatggccagcctcagccctggccagggctgaattactgtggcctcctggcttttgggacctgcaagttagcttcccaaggtgctgccctctggcctgccctgccctgcccaaccccccaacgctgcccgctgcgcccccgcggggcccagccagatgtcagctgcagttattagcctgggcgggagacacaggcctggcagtgtgcctgccagactcacaggcctccggaatctcccttgagcctggggagggggaggggagccattcaagcaaggggaagaagggagggggcatttaggggtcacagggaccctccaaggacgggacgcccccagcttctgctgggaccttcctccagcaaggccactgcactgctggacttccccctgcccccacatagctcagtttctttttcgcctctttcgttttccttctctttcccacacttggtgagatctaggctgccccggaatggctgtttaacccctatcccttagcctctttctaccctaaagaagagagaggctctcttcatcctccagaagacagaggcctgggaagctgagagagagagagagagacaaagagagagagagagagacagagacagagacagagacactaggcttctcacctcttggtctagtgggttcacacactaactgctcggaagtcccaccttaagtctaactggaagcctgaccgtctgcacctcgccgcagcccttcccgggaaggggctctgggttccctcatattctccccttagattttcaggtcttctctgactcggggagggaagctctcagatgacagagctactctagggaaggaggggggctccctctaggtattctggatgatagtaggatgggacctgcagactaaaacgagagtggggcccctgactcacatgagtgagtggggggtgttggggacggagctccagatctcctggcagaagggaagggcaccccacccgagggaggaggcagccgccgttccagcccgcccaggcgccgggggcgcctcgaggcatcggcccgccctctccgcgccccgtcgggccgggggcgaagtccgacccaggcccgcgggcaggcggggacctgccgggctgggttgggccaggccgggcctggcaggacgcagccccaaagcggcggggtggggcggggccgggccaggcggccgtgggggccccgggggcggcggtcggggctggtcgggactagcagtctgggggcccaggcgcgccctgggacctggcagatagtcgggttccccgcttctggctcggggccccaggacagcgctggtcccacctcttcctgtgccctaatatgggcggcggggagagacttcgggggccggcccgcgctcagtcctgcccgcggactcccgcctgttgccatggcgaccaggccccgctcctcggctgcgtcccccgccgtcgggccaatggaacactccccaagccgcctgcctccgcggtcccctgcaggcaccgcgggcggaaccattgcttgaggggagaggatggtggctggaggctgccgcggctgggcgggctccaagcacccgggcctccgcgggggctcgcacgcccaggttcctcttccgaggcgcaggatgcggcgggacccagggcggggcgcacggtcccgtaggatccgagtgacggagacagggccgggctccttcccccggggctgttgccacacttcctgcctctgcgctctttccccagcctgtttctaaggaagggagtggggttgggcgaccgcgccccagccgtcgggctgggtccaggctctaggagccgacacggtgttgggcaaagcccagggtcaataggggagggttttaggatgggggacagagaatacagatgactaagaggttaccatcgagggggagcagcagtcgtggaagatccagcagtcctggtgcgcgggaccctcaaggccccctcctcacatgtcaactgagtaccctcttattgtcttctctgctccgaagatgtgtccggccccttctaactctctccttcatccgggctagcagatgaccccagtggtccccaatttctggcagacatgtctccatcttctacctggcatattttacctgcctcagtgtaccccaggccgcttactagctttctgcatatctagacttcccctaatgcctccttcccgcttacgggagagcctcagactctggactcagctcccatgagctcctggacccctactcatttcttgcaatttaatgggtcatgcagctccacccactcaccccttttgatctctcccctcctccgtcctgtgaaaattccagtcccgcatccttctgagcccgggacccccagtcaattcctgggtcaggtgtctccttaaccctcccgatttacagtgcttaaccctcatttctgctttttggggtctcccaatggattgtcagtcctcctacccctctcgtattctgggtacctcaggggtttcttcgcacatactgggaccctcaccccacttgctgcgtaccaggtcctggtatttgtcccagtggactccagggaaatcatcctcctccctgaaacccctcactcatgtgcctgggccccccagcacctccttccatgcgtaccccgaggtcctttgagcccctccccctgcagccccgccgagccacccggcccgtggccgctgtttacaaggacacgcgcttcctgacagtgacgcgagccgcctcctccccttccccacgctcgaggaggggggcgcgggggcccggctccggcgacggccaatcggagcgcacttccgtggctgactagcgcggtataaaggcgtgtggctcaggctgagcggctgggaccttgagagcggccaggccagcctcggagccagcagggagctgggagctgggggaaacgacgccaggaaagctatcgcgccagagagggcgacgggggctcgggaagcctgacagggcttttgcgcacagctgccggctggctgctacccgcccgcgccagcccccgagaacgcgcgaccaggcacccagtccggtcaccgcagcggagagctcgccgctcgctgcagcgaggcccggagcggccccgcagggaccctccccagaccgcctgggccgcccggatgtgcactaaaatggaacagcccttctaccacgacgactcatacacagctacgggatacggccgggcccctggtggcctctctctacacgactacaaactcctgaaaccgagcctggcggtcaacctggccgacccctaccggagtctcaaagcgcctggggctcgcggacccggcccagagggcggcggtggcggcagctacttttctggtcagggctcggacaccggcgcgtctctcaagctcgcctcttcggagctggaacgcctgattgtccccaacagcaacggcgtgatcacgacgacgcctacacccccgggacagtacttttacccccgcgggggtggcagcggtggaggtgcagggggcgcagggggcggcgtcaccgaggagcaggagggcttcgccgacggctttgtcaaagccctggacgatctgcacaagatgaaccacgtgacaccccccaacgtgtcmctgggcgctaccggggggcccccggctgggcccgggggcgtctacgccggcccggagccacctcccgtttacaccaacctcagcagctactccccagcctctgcgtcctcgggaggcgccggggctgccgtcgggaccgggagctcgtacccgacgaccaccatcagctacctcccacacgcgccgcccttcgccggtggccacccggcgcagctgggcttgggccgcggcgcctccaccttcaaggaggaaccgcagaccgtgccggaggcgcgcagccgggacgccacgccgccggtgtcccccatcaacatggaagaccaagagcgcatcaaagtggagcgcaagcggctgcggaaccggctggcggccaccaagtgccggaagcggaagctggagcgcatcgcgcgcctggaggacaaggtgaagacgctcaaggccgagaacgcggggctgtcgagtaccgccggcctcctccgggagcaggtggcccagctcaaacagaaggtcatgacccacgtcagcaacggctgtcagctgctgcttggggtcaagggacacgccttctgaacgtcccctgcccctttacggacaccccctcgcttggacggctgggcacacgcctcccactggggtccagggagcaggcggtgggcacccaccctgggacctaggggcgccgcaaaccacactggactccggccctcctaccctgcgcccagtccttccacctcgacgtttacaagcccccccttccacttttttttgtatgttttttttctgctggaaacagactcgattcatattgaatataatatatttgtgtatttaacagggaggggaagagggggcgatcgcggcggagctggccccsccgcctggtactcaagcccgcggggacattgggaaggggacccccgccccctgccctcccctctytgcmccgtactgtggaaaagaaacacgcacttagtctctaaagagtttattttaagacgtgtttgtgtttgtgtgtgtttgttctttttattgaatctatttaagtaaaaaaaaaattggttctttattaatttctgttgtctttttttccaagctgggagggcggggggaaaaaaaaaagcactggtttgcccccagctcagtgctgttggtggctcggtcctgtatgtgtccccctcgtcggttcggcgcaggcatcttgtggtcccagcccaggagtcccacccttcccgcgtccccagatctccagggttggatggttggggcgcgggacgcggtccagggacccaggagctgaaggcagggtgctccggccgagacttggagtgcgcaggcgcgtccccgcccagccgcgcgcgccggggctttccccgctgacgcagcggaagcgctgcccatacaaggaccgattctgcccagtgacgcgaccgcggtctctgggcagattccgggaatcccctcccccgctctgccgggcagggccgcggcgccgggaagggggccgggattttcccgggcaggcggctgcccgggcacggaaagccccaggcctgggtccagagcgcccgcggtgggcgggcagcgctcctgggctccgggagccacccctgtgccaccttcaagacactggcgcctaggccccgccgcgcccacgccccctccgtctgacctgaccggggcggagggttgctgctgcctccgctgctttgccgacgccgtcccctctacccccaccccctccaggaagggcggcgcccgcctgccagtttcccctcacgggtgccaggccaggagcggggcgactgccaggtctggtcctgccggggcggctgctcgggccgctgggcgccgccaccgccctcgcgctgggctccctcccgcgcagctgggacacgtggaggtgggggtgggggtgctggtgctgctggcccgcctagagggagtctggccggcttcggggttggaagcccccagagcagtggagaaaaacaggtagagaaaccagacaggcagtagggtgagtggaacagacacttcatcaattcatttgtacaatacctagaacaactagaccctggagacacagcctggaccactccagacaagacaataaataaacaagcaaacatggttctttgggggtggtggtaagtgctagtaagaggaaaaaaacaaactaaaacaaacaaaaaaaaaaaacaaaaaaaaaaggtcaaggtggcaatgatggggcagggaggaaagatgctttgcagaatggagtgggaacatggacctttaatagggtgactttttcttttttatattttagagacgggtctttgtcctgttgctcaggttggagcgcagtggtgcaatcatagctaactgcagcctagaccttctgtgctcaagcaagccttccacttcaacttcccaactagctagagctacaggcatacaccactatgcctggctaattttgtttatttttgtagagatggggtctgctatgttgccctggctggtctggaactgctgggtcaaacagtcctcccgccttggcctttcaaagcactgggattccaggcgtgagccagtgctcttctcctgcagtgactttttttttttttttttagacagattcttgctctgtcacccagacttgagtgcagtggtgcgatcttggttcactgcaacctctgcctttcgggttcaagcgattttcctgcctcagcctcccaagtagctaggattataggtgcctgccaccacgccctgctaattttgtatctttagtagagactgggtatcagcacgttggccaggctggtcttgaactcctgacttgaggtcatctgccagcctcggcctccaaaatgctgggattacaggcgtgagccatcgtgcctggccatgacttttcaacagatttgaagaagtggggtcctgagaaaatcctgggtaacaacagcatcagaggtaacagttttttgtttgtttgtttgtgttttttagatggagtctccctctgtcacccaggcaggctggagtgcagtggctcgatctcagtttaccgcaacctccacccacaggattcaagcgattctcctgcttggcctcccaagtagctgggtctacaggcgtgcatcaccatgccaggctaatttttgtatttttagtagaaacagggtttcaccatgttggccaggctggtctcgaacccctgacctcaggtgatccgcctgcctgggcctcccaaagtgctgggattacaggcctgagccaccccgctcaactgggagcagctttttttttttttttttttgagacggagtctcgctctgttgcccaggctagagtgcagtggcacgatctcggctcactgcaagctctgcctcccgggttcacgccattctcctgcctcagcctcccaagtagctgggactacaggcacctgccaacatgcctggctaattttttgtatttttagtagagagggggtttcactgtattagccaggatggtctcgatgtcctgacctcgtgatccgcccgtctcggcctcccaaagtgctgggattacaggcgtgagccactgcgcccggccttgggagcagctcttaaatggcaaaattcatgtagccaggtgagcctgtgaaagaacagcaggaagccagcctgtctggaatggagtgaaccacaacagggcagatgtcaagggagactgagcaggggccttggggaggagtgtagattaaattccaagggagatgagtgacccttagagggtattaggtgggtaccagcattaatagtggatctgtggattaaatgagcatattagccctgttctgtaggaggaaattggggcatagagtagcaaaactactttcctgaacgcacacaatattaaactgcacccctgggaaccctgccttgctgctaatacctgccttctagcctaactgccaccctcccaccccaggggcagacaggcaacctttccagcctggggtggggcagagctcacagcagggactctgcactctgcacgtagctcaggctctcattcttggttctgctcttaagactgggtccccaccctcttccccataagactacactgggctgggttcctttcagctcgaggaagccgtcttaggaactaggaactgggccctacacaggggcctcagccccgagcttcacataacttatctcctacaaattttaccacgtgcatggtgatctgggtttgcagtcccattttactgctgaagagacccagagacgatcacagctcttaaacggcatttgaacccaggctggctggtgacaaaatgtgggctttgccttgcatggccagatttctggatgtagggcatcctgggatttgcaagggacaaacggcataccctacccctccgaaaccgccttgagcgcaagcaggaaaagagcaggcactaagcatgtgataagaccgccaccgtgtggcgaagatgagcaaccacagggtcagtttcccaagcctgagcctgaagaaggaagggggttgcaggggaggacgaaaggacagagcacaccaacacagactcacacctttccctaatactttattggttacctctaggcctgtgtgcggctgggtgggcttgggggagggcgtcactattcagcttctaggtggaggcatgagaaggccttggcctagccctccagggtcccatactgtggagtttggaggggcaggtctggcctttcctgggtcagcatagggcacccaggtgggggcacaggtggacacccagcacaggcacctaggcaggggcacaagctcactatccgttagccagcctaattgtgtttggagaaatattccttgctgtcatccacgttgggcttaatcgtgtcactgccaggcttccagccagcgggacaaactgtgggaagacacaaggatgcacatgaaggctacagccccaggttcaaggtgaagcaaagcaagggcctgtgttgcagaagaaaatgctggaagcaagtggtccaggcccaggaatgtggatattaagataaaccctccaagcccagttcagtattttttcttttttttttttttcagacagagtcttgctctgttgcccaggctgaagtacagtagcatgatctgagctcatgcaacctctccctcctgggttcaagcgattctcatgccccagactccctagctggaattacagaggtgcaccaccacgcctggctaatttttgtatttttggtagagaccatgttagtcacgcttgtctcgaactcctgacctcaagtcatctgcccgtcttggcctcccaaagtgctgggattacaggtgtgagccaccatgcctagccaagttcagtattttctctttttcttttcttcttttttctttctttctttttttttttttttttttgagacagagtcctcctctgttgcccaggctggagtgcaatggcgtgatctcggctcattgcaacctctgcctcccgcgttcaagtgattctcctgccttagcctcctgagtagctgggactacaagtgcccgccaccacaccctgctaattttttggtacttttagcagagacagggtttcaccatattggtcaggctgatctcgaactcctgacttcaggtgatccacccaccttggcctcccaaaatgctaggattacaggcgtgagccactacacctggccaagttcagtattttctagctggtgtttttcctactcttaattcttcaatttctttttgccacccagctctcctttttcttctttttttcttttctttttttttaagatggagtcttgctctgttgcccaggctggagtgcagtggcacgatctctgctcactgcaagctccgcctcccaggttcacgccattctcctacctcagccgccagagtagctgggactacaggcgcccgccaccacgcccgactaatttttttgtatttttagtagagacagggtttcaccgcgttagctaggatggtctcgatctcctgacctcttgatccgcccgcctcagcctcccaaagtggtgggattacaggcatgagccaccgtgcccggcctcttttttttttttattttttgagacggagtttcgcttcactcgttgcccaggctggagtgcaatggcacgatctcagctcactgcaacctccgcctctcagcttcaaacgattctcttgcctcagcctcccaagtagctgggattacaggcatgcaccaccaggctgggctaattttgtatttttagtagagactgggtttctccatgtcggtcaagcttgtctcgaactcccgacctcaggtgatccacccacctaggcctcccaaaatgctgggattacaggtgtgagccactgcatctggcctctttttttttttttttttttttaaccaataccccatctcttaaaaaaaaaaaaaaagagatggggtattgctatgttgcctaggctcgactcaaattcctgggcctaagcaatcttctgcctcactctccagagtaggtggaactacaggcatgagacacagcatctacaggcatgagacacagcatcttcctgtctttttggctcctttagtcccatctttgtccctctgccccacccctacaggtttttttgttgttgttgtttttgagatggagtctcacactggcgcccaggctggagtgcagtggtgtgatctcggcttactgcaacctcctcccgggttcaagggagtctcctgcctcagcctcccaagtagctgggattacaggcacctgccaccgcacccagctaatttttttgtatttttagcagagacgcggtttcactatgttggccaggctggtctcaaactcctgacctcatgatctgcccgcctcggcctcccaaagtgctgggattacaggcgtgagccaccgcgctcggcctgtttgtttgtttttttgagacagggtcttgctgtgtcacccaggctggagtgcagtggtgcgatcacagcttactgcagccttgacctcccaggctcaagtgatcctccagcctcag

SEQ ID NO: 96402 - DNA, 14784 bp, Homo sapiens
cagccccggcctgggatgtgagtgtgatgctgctgttccagggttcttggctaacgtggtggcccttgaccacattctccaagtcggggaattcctgggcaaagatcccttccagctggtagttatagacccaggggtaggtgtaggtcagctgcttgcctggaggacaaggggaggaggaaatgcaagatcgttccaggttctggtcagtaaacccaggactcatcctgtgtccctgactcgacttacccatcttcgagaactgagcgaagggaaaagacacacagagcagggtctgcccgtaggtacaggcgctatgaggccagctgtatgcagcagaggaggccggtggagggaagttaggtacactgtggaccagccagaagcccccatcgtggtcaaggagcaggacacctggaccaaaagaaggcattaggggaggtcgggcgcagtggctcacgcctgtaatcccagcactttgggagaccgagacacacagatcacctgaggtcaggagttagaaatcagcctggccaacatggcgaaaccccatctctactaaaaatacaaaaattagctgagcgtggtggtggacgcctgtaatcccagctactcaggaggctgaggcaggagaatcgcttgaacccaggaggtggaggttgcagtgagctgagatccaccactgcactccagcctgggccacagagcaaaatttcatctcaaacataagtaagtaagtaagtaaataaataaataaataaataaataaataaaaatttaaaaaaagaaggcaggccccacgcagtgtaatcccagcactttgggaagccgaggagggcggatcacctgaggtcgggagttcaagaccagcctggccaacatggagaaacctcatcactactaaaaatacaacattagccgggcatggtggtgcatgcctgtaatcccagctactcgggaggctgatgcaggagaatcacttgaacccaggaggcggaggttgcagtgagccgagattgcaccattgcactccagcctgggtagcaagagcaaaactccttctcaaaaaaaaaaaaaaaaaaaaaggcaattagagggtattgctccaggcctcccagcaagctcatctgcaatcaggaacaccctcagtttgcagcggggcttagagagggtgccagcagtgttagaaccacagctgagctcagtttttgcaggcataaattcttatagtccagaataacgccaagagtaatgtaaggtagggaaacaggccaggtgtggcggctcatgccggtaatcgcagcacattaagaggccaaggtgggtggattgcttgaaccaggacttagagaccagcctaggcaacatggcaaaagcccactctacaaaaatacaaaaagtaggccaggtgtggtggctcacgcctgtaatcccagcactttgggaggccaaggcaggtggatcacctgaggtcaggagttcaatatcagcctgtccaacctggtaaaaccccatctctactaaaacatacaacatttagctgggcatggtggcgcacacctgtaatcccagctactccagaggctgaggcagaagaatcgcttgaactggggagatggagattgcagtgagctgagattgcaccaccgaactccagcctgggtgatggagagagagtgccgcaaaaaaaaaaaaaaaaaaaaaagccaggcgtggtggggggtaccggcaggcccagtacttgggaggctgaggtaggaggatcacctgagccctgggaggtcaaggctgcagtgagctgtgatactgcactccagcctaggtgactgggtgagaccttgtctaaaagaaaataaaataggggaaatagatgcccaaggtctgacaggggagatctcccaccccactatggaggtcaggggttagcttggaaaaatgcataggaactcggctgggcagggtggctcattcctgtaatcccagcactttgggaggccaaggcgggtagatcacttgaggtagaaaccaggagttcgagaccagcctggccaacatggtgaaacctcgtctgtactaaaaatatgaaaattagcctggtgtgatggtgcgcctttaataccagctacttgggaggctgagacaggagaattgcttcaaccccagaggcagagattgcagtgagccaagattgtgccactgcactccagcttgggtgacagagcgaactcccaccgtctcaaaaacaaagaaaaaaaaaagttggggggaatagatgcccagggtctgacagtgcagatctccccgaccaccccatgcacgtcaggggttaccttggaaaaatgggacccgagtctctccccagcccccaatccaggcctcacccttcgtgtgcccacgcatggaagagtcctgagccttgctgggttgaggcggttggtcattgtagagcaggaaggcgagctgcgggcggataaacggaggcaacgtgaaattcctcccaggcagggcagccctagagtttcgcccctagttggcccggggcccccttcacctggctggtgttgctccggtacagcggctgcaggcttcggcccacggccccctccgggctgttgatgagtgccctgccgtcccgccagcctccggagctctcgtccagatacttgtactgcagccctctctgcgccgcctccccggaccctctaagagctggcagcttgtagaccacgaacctggaggtcggagaatgcacagaaataggagagagggaagagaaggcaccccagggttccccgaggaggtagccatcccggttgagtgaccgcagccggaccccggggcgatggtaggccccccgctgcgcactcaccagtctacaggctgcccggagtccccgtagcaggtcagggccccggcggggacgcacagcagcgctgccagcagcagcgggatcatagctgctatggggctgagatccaggaatctgtgtcgggactgcggggcgctgggttacatcagaggccaggactggcacctggcgcctttcacttccctaaacttgcctgggaaccggggcggggacatcacgagggtacagactcctcccccgagacgcgatgctgcgttttggagaggcaaaaggcaacgctgagtctgcccagaccacgcccacgacgggcccggcgctccagcgtctcctggagcctggccaccgttccttttcgtggtagctaatcccagcccacgctcttctgtctgacccaactcccgcccgggtttctggatcaggcacaagtttgtattttattttttattccagccctacaacctgggtccaactcttgggacctttgttcttcctctttttttttttttttttttttttttttttttgagacggagtttcactcttgtcgcccaggctggagtgcaatggcacgatctcggttcactgcaacctccgccttcctgattaaagcgattatcctgcctcagcctcccgagtagctgggattacaggcgcccgacaccacgcccggctaatttttgtagttttagtagagacggggtttttccatgttgactaggctggtctcgaactcctgacctcgtgatccaccagcctcggcccccgaaagtgccaagattgcagaagtgagccactgcgccccttaagaagcatttgtgttccagtgtatcttcccctttttctttctttttttttttccttccttttttttttttttttttcccggacaatatctcgctctgttgcccaggccggagtgcagtggcgcaatcttggctcactgcaacctctgcctccccagctcaagtgatcctctcacctcagcctcccgagtagctgggatcacgggcacatgccactatgcccagctaatttttgtagttttttttttgaaacacggtttcaccatgtggctcaggctgaactcctgagctcaagggatccacctgtcttgcctcccaaagtgctgggattacaggcatgtaatccacgccacccagactctcctttttcattctgcacgttttctccaggatcccctgagctagcaaagaggtgactgtatgtttgttttttgtcgttttgagacaggataatggtttctcacccaggctagaatgcagtgactccatcacagttcactgcagcctcaacctactgggctcaagagatcttcccaggtagctggtactacaggcctgtgccaccacacccagataattgttcattgcagagatgagggtctcactatgttgcccaggctgctctggaactccggggttcaagtgattctcccacctcagcctcaaaggatcatggcagggcaaagggctatgggaatctgagtactggcttgaaactgcctttgcaaaaattatgacagaaaattatgtcagtgaaagagctctgacctaaccaactccatcttgcctttaatctccaaactgcccttgcttggtcattcctggagtggggtcaagctaactttttttttttttttgacacgttgtctcactctgtcgcccaggctggagtccagtggtgtgatctcagctcactgcaacatccgcctcctaggttcaagcaatcctcctgcctcagcttcctgagtagctgggattacaggcatgcgccacatgcccagctaatttttgtatttttggtagagactgggtttcaccatttttggtagagatggggtttcaccttggggctcaggctggtgtcgaactcctgggctcaagtgatctgcccgcctcagcctgccaaattgctgggattaaagagggagccaccatgcctggccccaagctaattttgggaggaatttagtttatagcttaaatgataatagcccttccccaaactaaactgcctttgtagaaataatgaaagggcactaggttaggaggatgagaggagcctgaattctgctaaactgtaggtgtagtagttaaattatgaccagccatttttccggccgggtgcggtgcctcacgcctgtaatcccagcactttgagaggccgaggctggcagattacctgaggtcaggatttcgaaaccagcctggccagcatttcgaaaccccatctcttctaaaaatacaaaaattagcccggcatggtggcatgtgcctgtaatcctagctacctggtaggctgacacaggagaatcacttgaacccaggaggcagaggttgcagtgagccaagatggaacaactgcactccagcctgggcaagagcaagactccatctcaaaaacaaaaacaaagatggccagccattattctggaggtcacaaggtttgcaacttccccagttatttctgcaaataacatgactattgcaaaacctaacgctggcctttttagatgtctttttaggctttttgcatatctgacaactggatgactccacccagactagcgactctatggtccccacccagaagctgactcagcaactgttttccacagctccaggattgcagcaaggcacccattccctagccctcctgcccaccaaactgttcttgaataaccctagcctctgaattttcagggaggctgattcaagtaataaaactcccatctcccatttagctggatgtatgtggattaaactctctctattgcaatccctctgtctcgataaattggctctatctggacagtgggcaagatgaaccccctgggcagtcataggctgtgaactcttaaatccagggagatgtttgctgtcaatgtccgcagggttcaaggcagaagacaaggacagtgtagcctgaactgggtgggaaaagagaggacagcaaggcctccagtgcccaagggggcttgttggagttgaggggtgtcactgtagtttaggagatgagggtgtgtaaggccctctaatatgacctctaggtttacagcctcctgccatcttccagcctccaaaacccaaaaattcaggccaacgctgaagctttatctgggaggggcatttttataggacccataaccattgacagttaatatcagccacaataagggaccttcaggagccgctttctagacccagggtctctgggaagcctcatcccacaccctctcctgctgtccagggccatctgggagctggtctgagtgtccactgagtccgtttatttggcggtctgtctcactgggtttgcacgacagtttggacatctctgtgtggctccctgtggctgaaggcttgtcggattttccgtaagaggctcccccagggctgtctatgggtccgtgtttgatatttgggtggatctttgggaacgcgagtccaggagagggtccattcgtgggaaaaccacccagcattgtgtcacgcgcgtccgtgtgaagagaccaccaaacaggcttcttgtcccatccccagtcactaggagagtccaagtgccagggcagggctcaaaggtggcgcttcatgtgcaaggccaggtggtcagagcgcgaaaaagcacgtgggcagagctggcagcggaaggggcgctgccccgtgtgtttccggtagtggcgggtcagctcgtccgagcgcgcgaatctccagccgcagccttcccacgtgcaggcgtatggcttctcccctaggggacaaggaagccataagcgccactgtctgcccagtcatgtccccgggtcccctgcatctggccacacccctttactcagcctgggctgggactaggatgaacaaagtgaggcccctagggcacaaaatttaaggaggcactcactctcagaggccagccaagtccaagtcccgccctctgcaacccttcttcccctgtaactacagcgggcgccgcgccctttctcatgtccggggccccgccccctcacctgtgtgcgtgcgcagatgcgccttcaggtgggagctcttggtgtagctcttgccgcaacccgggtgcgcgcacgtgtgcgctgcctgcctcttgcgcgcccacgaacgtcggcctcgcttggatggcgcggtctcggctatcacacctggatcctctgcagtccccccgagtccagtgcccaccgtcccgggtcccaaacaactcaggaaggagggggacgtggcgggaccgggcgcgggtccctggagcccgcggaagagctggaagtgcccttggtactgaggcgccgggtacatcgcggggtacccggacagtagcccgtagggggcgcccgacgccgcaggcactgaaagcccggtccgcgggargtagccacccgaggagccggcgccgggccccgggtacaccggttgcagcgccagcgccttgggctcgggggccggggctggagccagggctgggcccacgaaggcgtcgggagcccgggctcgcagggcagggcgcacccaacccgagtgatcctccgaacccaaaagcccagccaccagccccgggccgccagcatatgcgcccagagtctcgggcggcggcggatattgcgccccggrggcctcgctgggcgccagagcgcaggtctggggcgcgccaccgggctccgggcccgagaagttggtgaggaggagatccaggtcccaggtggcgtccgcgcccctctcatcgtcctcttcctccccgggctggtcctcagacttcacgtggaggggcggctccgtggggtcaggaggacccgggcccatgtcctgcgcctcttcggagcgccaccactgcgggagggagcaggcagctcgaggttcggtggacactggggtgccctgcccagggacatcgcgggctggacactctgacgcagaggctttggaaaggggtcttgtttgcctgtctgtctgtcccacttccccaacactgcccctctaaccgcccctctccccgctccccccccagctccagggacagaaaccgatcaggtctggctggagacaggagataagacttccactatctggaaccacactcggggatgggggaaggggtagcagagctgctggagatggaaaactggcaggggacgggggagaggatgccagccttgacttagttttcccccagaacatccctctccttccctgtctcccaaaacaagattaattccgaaattttggatgtcccccagacacactcatcatttcccgctgatatctggaagattgtctgtgagcctagatctcgttcctttttttttttttttttcttgagatagggtcttactcttttgcccaggctggagtgcagtggtgcagctcactgtatccttaatctcctgggctctaatgatcctcctgcatcagcctacggagtacctgggactacaggcacacgcccccatgcctggcctaatgtttttggtattttttgtagagatagggtttcaccatgttgcccaggctaccttcgttttctattaccgaaatagatcacacttagaacctcaaacccctagaccaccctcctcaccccctgccagactaagctgagatctcctstcctggactgagcgtacctcagtcctggttaagtctcttgatttcaggtcaagatgcaggtctggaccccaagatctgtgactgtggccctggattccagccagcccacctagaccccaccttctaggccccaccttgaggaagtcatcctgtgtgtccgggaaggggcccagggcggtcagtgtgctgatggagggcaaggcggtctcggctgtggccatggctggctggtgcccaccctgggcctcaagcctcctcttcctcggctgcctcgtgaactctgaggctgtgatagccccttcgagggctcctctctgtccttagctgattggctgcagcctctgataaggcaaagcaaggcaaggcggcgggggggcactgtttctggggcacaaacttcacgttggcctgtctggggctggggttaaagactaaccctgtgtccaaagccaagtcaaatatcaagggttggggggttcagggtttgagggtccaggtgctgggtaaaaacagacattgggtctccaaagaaggagagacttgggggtcttccctcagttaactttcctggaaaaggcagaaagggtattctgggaagaagctgtgggaccccctgtccccctgattgaggctccacagccctccccctccccagtaaacagcaacaaccgtgctgatggcgggacttggcacgagctccccgccaagcattatcagacaccccagacgttggaggctgctatcaggtgggggcccaggccagctagagctctgtcctccggtgaaggggagggctgggagttgggtcttcaaattagcctggcgttcaatttgcctgggttgggacctcccagggtctcagccctgcagcaggaggaagcccctgacaactggcccaccattgtctactggggacccttgggtggcactgcatgggactgcatggaggctggttcagtgccagctgctttagtgcgatgggggcagccaagggaaaagtgaccctctctcctcctgggtgggataggaccgttggatcaagccacaggcagtacctgacctgcaggagaccagtgccctggctctgggcctggctgctccttgattctgcccaacatgaggagaggatctgagtttctacaacaggaacctccactctggtgccctgggagcctgggaaggggacatggatacgtattacagacacataactcatagtcactcattggaagactgaggcaggaggatcacttgacaccaggatttcaagaccagcctgggcaacataaaacctatctctccaacaaaaagctgtgagtggtggtgcatgcccatagtcccagctactcaggaggctgaggtgggaggattgcctgagcccaggaggtcgggactgcactgaactataatcacaccactgcagtccagcctggggcacagaaagcaagactctgtcgctggaaaaaaaaaaaagttgggtggccatctttattcctggcagatcaacctgggtgacacaaacaaaaacaaggccaggtgcggtggttcacacctgtaaccccagcactttgggaagccaaggtggggagatcacttgaggtcaggagttcgagaccagactggccaacaggatgaagccctctctctgctaaaaatacaaaaattagctgggcattgtggcacatgcttgtaatcccagctatttgggaggctgagctggagaactggttgaaacttggaggcatggggccaggcgcagtagctcacgctagtaatcccagcactttgggaggccgaggcaggcagatcacctgaggccaggagttcgagacaaacctggccaacacagtgaaaccctgtctactaaaaatataaaaataggccggggatggtggcatacacctctaatcccaggtacccgggaggctgaggcacaagaatcacttgagcctgggaggcagaggttgcagtgagccaagatcatgccactgcactccagcctgggctacagagtgagattctgtctctaaaaaacaaaaacaaaacaggcttggagcagtgagtagtggctcatgcctgcagtcccagcactttgggaggccaaggtaggaggaatgctcgagcccaggagttcaagaccagcttgggcaacatagcgagatcccatctctaaaaacaaaaacaaaaacacagttactcacaggaccatgcaattacataatgacatgagttcctgttccctcagtcacactgatcatataatccgtgcacatataattgtgtgtctgtctatgtatatggactatgcacagacatacaattcccaggcactaaaacacaaccctatgctatattggttacacaatgtcatagccaaacaatctctaaaacacagaattcataatccacaggcaggcacacagttatacaatcctactgacacaatttagccgtaattgagcagacacacatggggagtcagatacattgtcacagaactttttttttttagatagtgtctctctctgtcacccaggctggagtgcagtggcatgattttggctcactgcaacctccacctcctaggctcaagtgattcctctgcctcagcctcccaagtagctgggattacaggtgcctgctaccacgccacgctaattttttttttttttttttttttgagacagagtttcactcttgttgcccaggctggagtgcaatggcatgatctcagctcactgcaacctctgcctcctgggttcaagtgattctcctgcctcagcctcccgagttgctgggattacaggcacccacaagcaggcctggctaatttttgtatttttagtagagatggggtttccccatgttggccaggctggtcctgacctcaggtgacccaccctccttggcctcccaaagtgctgggatgacaggcatgagccgccccagccagtcaaaacctacactttatacagtcacaccaccggtcacttttacaatatgtaaagtaattatttagtcacagttgcatagctaccagtgcccaaccgtaggggatgcacccagttaaacacagacaaacgcaaggacatggcatcacaggtcctgagaatcaagacacacacatttctcaacagatacacaatcagaatgggtgcaccacaaatgcactacacaaaaagacaaaacaggcggggcgcggtggctcacgcctgtaatcccagcactttgggaggccgaggtgggtggatcacttgaggtcaggagtttgaggccagcctggccaacatggtgaaacccgtctctattaaatataagaaaaaaggccaggcatggtggctcacacctgtaatcccagctactcaggaggctgaggcaggagaattgcttgaatccagtaggcagaggttgcagtgagccaagattgcgctactgcactccagcctgggcaacagagtgagaatccgtctcaaaaaaaaaaaaaaaaaaaaaaaattagccaggcatgatggcatgcttcagtggtcccagctacttggaggctgaggtgggaggatcgcccaggaggtggaagctgcagtgagctatgatcgcgccactgcactccagcctgagcgacagaacgagaccctgtctaaaaagaaaaaacaaaaacaaaacaaaacaaccacatagactcacagaatcacacaagttcacacacacacacacatacacagacacagacacacacacacacacacacacacacacacagagtcacaagtatctacatgtgcttcctgggacagactggcagaaaggtttgctaagatcgcccacttggagctcgtcttccccacaaccagcacccaattagagaactcgagtctggcctcctgggttcaggaggacgcctagtgctcgcgccagaatttctttgtttaattcttgactccctccgcacacaccccctgcaactgaccaaccaggagtgggccgagccctttcctacggccaataagaggagaaacccagctggccaatcggtttcccgcactcgtcttccgcccctaccccgtccgcttcttaaaggggctagcctatctctgtctgggccccccgatttccacaggcaaggctaccttagcccttttaaaaggcagagctgcggagggggccggattctaggaggaaccaatgaaaagcctcactcggcctccgctcctcccacttcttgctgaggtcaaaggcctgcgtcagttgcactgtagcctcggcagtgaaccgggaggtactaccaggtaaggaaggtgcggtggccccagccgtgggtgagaggagctccgctctgacacccccgctcctgtaggtcgccgtcgttgctccgctcgctctgagagagcatggccctgagaggcgtctccgtgcggctgctgagccgcggacccggcctgcacgtccttcgcacgtgggtctcgtcggcggcgcagaccggtcagtgtggggtcgggagtgtggagggaaggagggaggaactgggggtttagggactttccggggtgactttcccgttctgtgcttgcagagaaaggcgggagaacacagagccaactggctaagtgtaaggacctctggtcgcaccgtgtgtctgctgcccctgttcagctgtctgtctgccgcaggtggactctgtcccagaatccgagagctgcccgagcggggtggcagggtcgtggccagggtcagaggcactaaggcagtgagtgcgctgtgcctgcggggccggagaaaagtcacctgatcagtctcgcttgcagctcgcactagccggggggcgacatgggtgttggggggtagggctgatgagggtccgagaagggagggcacagtgatcttgcggactggaccgaggcgaattccccttcccagcctcgcgtcccgagtttgactggcaggacccgctggtgctggaggagcagctgaccacagatgagatcctcatcagggacaccttccgcacctactgccaggagagactcatgcctcgcatcctgttggccaatcgcaacgaaggtgggcgggctggtgggtgccctgagactgctcctccgcctggagccatagccaccccacctcaaggcccctctgtccttggggctggggcttcctgtggcctaggcctgggcctgaatttgggcactggtccctttgcagtttttcatcgggagatcatttcggagatgggggagttgggtgtgctgggccccaccatcaaaggtaggaacaagtatctctccacacactgcagaaccctctgtattctgaaagcctcttcctccttccctccctccctttcttccttccttctctttcttttcttttccttttctttcctttcttcttcccccccaacagagtctggctctgttgcccaggctggagtgcagtggcacgatcttggctcactgcaaattctgcctcccaggctcaagcgattctcctgcctccacccctctagtagctgggattacaggtatgtgccaccatgcctggctaatttttgtatttttagtagagacagggtttcactgtgttggccaggctggtctcaaactcctgacctcaggtgatccgcccacctcagcctcctaaagtgctgggattacaggcatgagccaccacgttcagccttctttttgagatggagtttcgctcttgttgtccaggctggagtgcagtgatgcaatcttggctcactgcagcctccacctcccgggtttaagtgattatcctgcctcaggctcccgagtagctgggattacaggcgtccgccaccacgcctggctaatttttgtatttttagtagaggtggggtttcaccgtgttggccaggctagtctcgaactcctgacctcaggtgatccacccgcctcagcctcctgattacaggtgtgagccaccgttgcccggcccttttcttttttttttttttttgagatggagtttcgctctgtcacccagcctggattactggattacagtggtgcgatcctggctcactgcagtttcctcctcctaggttcaagcaattctgccacctcagccttctgagtagctgggattacaggggtgcaccaccacgcccagctaatttttgtattttttagtagaaatgggatttcaccatgttggccaggctggtcttgaactcctgacctcaggtgatccacccacctcggcctcccaaagtgctgggattataaacgtgagccaccgtgcctggcccctttgtttcttttttta

SEQ ID NO: 96403 - DNA, 17863 bp, Homo sapiens
ctattctcagcacattatatgcttcagctcatctggtacaacagatctgggaggtaaagtttagagatggggaaactgaggctccaggagggtcaagccccttagctatggttccctaaaaatggcaaagctgaggccggccgcagtggctcatgcctgtaatcctaggacttcgcaaggccgaggcaggtggattgcctgaggtcaggagttcaagaccagcctggccaaaatggtgaaaccccaccagtactaaaaatacaaaaattagccgggcatggtggtgcgcgcctgtaatcccagctactcaagaggctgaggcaggagaatcgcttgaacccaggaggcggcggttgcagtgagccaaaatcacgccattgtactccagcctgggcaacagagtgagactccatttcaaaaaaaaaaaaaaaagaaagaaagaaatggaaaagctagtatttgaccaaccccaggaatctgcttatgggcctgagcctttaaccactgggaggtatcaggagtcatccctcgggtgtttagtgaacccccaacccaggaggtcgccgcaggtaagctatgagccctcccacatcccccctgcagatgtgcaacatgctgggcctgggggacatgaacgcagaccagctggcctccaagctggaggagacgctgcccgtcatccgctcagtcagcgaacagttcaaggaccctgtgagtggtggtctggctggcggtgagaggcccgggggctgaggacaggggcagaccccgcccctcactgtcctctctcgtgccctgtaggagcagacaactttcatctgcgtatgcattgctgagttcctgtccctgtatgagacagagaggctgatccaggagctggccaagtgcaagattgacacacacaatataattgtcaaccagctcgtcttccccgaccccgagaagccctgcaagatgtgtgaggcccgtcacaagatccaggccaagtatctggaccaggtgtgcccacccacccagcactggctcagcagaggcacctctgcccctttattctctgatcttttgctccaccatctggccctctgccctctagcctcctgccctttgcccccacatttcagatccttcacccttattccggccatagaggactgtggctggcctggcctaggtccctgtgaccctggagagcagggggtctagcccagtgatctctgaccatagtgatgcagctcccacttatgacaccttaagctcctgccctatattctctccctgactctggaagctttctagctttaccgcttctattgatccacactctgtctctgccttcctgccccctgaccactgccttctaccctctgccctggctgcagatggaggacctgtatgaagacttccacatcgtgaagctgccgctgttaccccatgaggtgcggggggcagacaaggtcaacaccttctcggccctcctcctggagccctacaagccccccagtgcccagtagcacagctgccagccccaaccgctgccatttcacactcaccctccaccctccccaccccctcggggcagagtttgcacaaagtcccccccataatacagggggagccacttgggcaggaggcagggaggggtccattccccctggtggggctggtggggagctgtagttgccccctacctctcccacctcttgctcttcaataaaatgatcttaaactgctgtattgttgacattgggaggtgagggtaagcacctttatgtacagttgcacaggttgtgcactggacagaagtgtcacatctagaggggcccattcacaacagagacctaatagagatgcatgtttattgtggcaactttggaaggagggtgtcttgggtgagagatacctttgtctcattctgtgtgggttaaggtgtccctgttgggcctgtgaagcctggaatggaagacagaggcattttcccacttccttggaggctcagagcgtgggaactgggaggccccttggccagccccaggctggtggggagcagagcagattaggccggcagtgggcccggcactgcctgctgtttggtttgggaattagtgggcgccctggggagaggccaggcctgccagactggggattaacagtctccaccccccaattcctgcccccatgggatggcatcagcccctcccagcaaagggctgcagcaagggggctggttagtgggcagggtgacagaggactccggctggaggggctcctgaagtctcatcctgactccagagcggtctcaggctgtgggcacacaggcctggaaggcacctagtggacccccttatcccctgcccttcgctcctccctctgccactgcctgggctgctattgttgtccccacttgggagactcaggatggggtatgaccttgagagtttacaagttccaagccagagctggctaggggggacagaaagggggttcctgaggacacacgtgagtcggtgttcaggccgggcgcggtggctcacacctgtaatcccagcactttgggaggccgaggtgggtggatcacttgaggccaggagttcaagaccagcctggccaacatggcgaaacctcgtctctacttaaaatacaaaaattagtcgggcatggtgttggggtgcttgtagtcccagctgctccagaggcttaggtgggagaatcgcttgaaccccggaggcagaggttgcagtgagccaagacagggtaagaccctgtctcaaaaaacaaaagtggtgttcaggtccagtcatggtggctcacgcgtgtaatcccagcactttgggaggccgaggcaggtggatcacgaggtcaggagttggaggccagcctccaactactctctactaaaaagacaaaaattagtcaggcgtggtggtgcccacctataatcccagctacttgcgaggctgaggcaggagaatcacttgaacctgggaggcagaggttgcactgagccgagattgcgccattgcactccagcctgggcaataaagtgagactccgtctcaaaaaaaaagtgttcagacccagagtctgggtgtgccagggtgtgtgtgtaaggggaaccccaccaggagcctagacttgtcactccaactccctggggtgtgcacaagcaggtgtgggcctgttggggtggcatgtgtaaacaaacacgatggtacagccggctccgcgccaaactgccaggatccaaatcccagctgtgctacgaacaagatgagatgtgacatcggagcctcagtttccctacttagatagtaagatgaccaacttagcatgcccgtaaggattccatgagatgaaacacgcaaggcgtttataccagcaccagacaggaaaccgcaagaaatgtttgttatttttcgttgtcacaattagtaagcatatcaaatagcccaggaagcctgcccccagcccctgcgggaattcagcagtcggaagtgtgtggggatgcgggtgagctggggtagggaggatgaaaaggaggagcgggcttcagtgaatgcaaggacacttcctagggagtgagggctgctgatcgagaactgagctcatcagcaccgagcctgccaccgccttgccaggttccgcagctgacggcaccgccccagctgccccctcgcccccatttatgggctgtccggcagctggacagcgaaggcatgggtcacagggtgaccagcccaggcgggttcctaattactccgggcagggtgaacatctgccagtctgggaacacggcgtcccagcctgctgggcttggaacctcgggcggggctatgtagaatgcacgaggggctcctgagcactctaggatgcccatcccagggtttgacccctgaacttctgcccctcccacaccaatctgtgtgttaatgttcttcaggctgggcaatggagggggagtgggtactgtttgtaccaggctgggagtgtcccctttagaggtgtgtctgtgaagaatgaacatctgcccagaatccatgccaaatgcaggacaaggttttgtgtccccaagcttgtgtgttcatggcaatgctgagagtatctgagacctgtgggtgtgggtgtgggcctgccgccgggagggagcgttggaaagggggttgccttcacatattggtgtacaaatgctggtgaatttcaccagcggtgatagctaggggacccttgagggaggggtggctgttgtgtgtgtctttgcaagattggtgaacctcaggccccgctctgagcctgggattgtgtgccaccgcactgaggaaagggtttttgcatttggtgtgtgatcatggctgcatctttgcacagggaagatcgggagtaaaacctccttgcagtggagtatgactgtgtgtgtgaaggcattctgaggtctgggtggggtctggcacttggctggttgtgtgggtgtctttgttacatggcgtgatcatgacggaattcagaccgttgggagagccgtgtgtatgaaagaggagagcctagtatgtcagggtccacctgccttatatatgcgtgatggaggcaggaggggtcgaggtaggtgtgtcttgtgtgaccctggaaggttctgtgacagtgtgtactgctcctctgggtaaccatagttatgtgaggctgtctttttgttttttcaatagagatggggatctccctatgttgcccaggctggtctcgaactcctggctcaagtgatcctcccacctaagcctcccaaagtgctaaaattacaagtgtgagccatcgtgcctggctgaggctgtcttaagagcagctagatttgcttctgggactatgatgtgtgtttctgcgtgcatctctgtgacactgtgtgattacaggtgactgtgaagtgacccagcctcactgagcagtgtgtgtgtttctgggactgggaaaaagaccatccctgcctcctcccccaacctctgggttccagatccctaggacctgccagtgagcgactgggaggggaacagggaggggcgagggaggacaaggcggatttctccccccgtaccaggtaacaaacttgtgggactccaaacaaaattctgaagctacagcctagccgagggaggaggaccaggaaagggaggcacgcccactccccagccccacccaacgccaaagccacccgcccattccatccctgtccctgtgggtccttgcaccggccaccttcaacacaggtgagatgagcccaggcttggggaaatagggggccctgagggaagagggaacctgcgggcaggaatgcatccggagtcctcccggggcggggagtggagggcttggaaggctggaggggaacggagagaggaaaggtcaaggcggatccgggaggaaaagggagtggggggagccagggcaattaagcagaaggtgcacaggctggggcaggggggctaggggacctggaggcttagggacagggcttcagagggagtgcagggagcagaatgggtcaagactgggagctggggaagtggagaagggggagccagaaataggggctgagggagagaatttgggagaggtggagccttgagaacctagaaactcaggtgctggggacttgcggaatggggcatgctacaggtggcctctgggtgaaggggatcgggcagagggtgactcgggagctgactgcagggactcaagggtcttggtggtgggggacggcagttaccagagcccacggccaggagtccagggaaggggacagcctgagatgaaggtcagggaggggcactgggggctggactagactgagtaaagctgggaggagaaggcaactcaggcaagggtcaggactgaaggggtggcgggccggaacatgggtggaatccctgtgctcagttatccccgcacctctccacccacacccgcagcccccacccgggccacccactctcccttggccacacctgccgggtgccacgatgaccgtcacctacacagcccgagtggcgaacgcccgcttcggtggcttctcccagctgctgctactgtggcgtgggagcatctacaaactcctgtggcgagagctgctctgcttcctygggttctacatggcgctgagtgctgcctaccggtgaggctgccctgaggtgctcatgttctagcggagggggggcagctattatatatatataatatataaaaattataaaaatatagagatatataagtatatatatctatgttttttaaactgagatggagtctcactctgtcacccaggctggagtgcagtggcataatcttctcttacttccacctctgcctcccgggttcaagcgattctcctgcctcagcctcccgagtagctgggattatggrtgccagccaccatgcctggctaatttttttgtatttttagtagagatggggtttcaccgtgttgaccaggctggtctcaaacttctgacctcaagtgatcctcctgcctcggcctcccaaagtgctgggattacaggtgtgacccatagcacccggctgggggcagctattataaaagaagccagggtgaggggcacagcaagagagatctgaagctggggatggagtcacccttgtgacctgtgacccctcatctctatcccgcagctttgtgctgaccgaagggcagaagcgctacttcgagaagcttgtgatttattgtgaccagtatgccagcctcatccctgtctccttcgtgcttggtgcggtccaaccccaagtcccccgttcccatgtccctgagaaacccatatccattcatgccttttgaggagcccccattcctgcccctctgagatcccccccctcaaatccaaccccgacagcactgcccacccatttttggatccatatcatgaagatgccagatgtggctctacactctgagacctggggtgtcacctggggtcacagtgccccctgaggtgcccccaggagagctccatctcacacacaggacttattcctggtcaccctggggattctcaccagtgtctgttgtgttattaggggggacaaacccctaaccctccagggaccccataggactccatcctctcaattccagcctgggggcatttctctgacaagtcttggacccctagtgaccacaagtgaccctagcctgcccaaggctccctgatgtagaccctgtccccaaccccttcagaagttcctggctcaggggccgggtgtggctactgtgacaagcctgaccagatgtctctgatgtacacccccacaaaccaggcccctctccccttgttttaggtccctatgccttcacagcaagcaacagtctgcccacgtgcccctaacatgggctctgtgcctctatccccatactgggatcccaatgtcacatctgaggtgactcccaagtagccagtgacccaaagggctgctctgccttttttttttttttttttttttttttttttkgagatggagtctcgctctgttgcccaagctggagtgcaatggtgcgatctcagctcactgcaacctccgcctcccgggttcaagtgattcttctgcctcagcctcctgaatagctgagactacaggtgcgccaccatgcccggctaatttttgtatttttagtagagacggagtttcaccatgctggtcaggctggtctcaaactcctgacctcatgatccaccctcctcagcctcccaaggagctgggattacaggcgtgagccaccgcgcccggcaactgtcctttctgacctcagggctggacccccaagttcccagcccaaacgtggtcaggttggccagcacgctcgggtttccctgatgcagaccttacgttgccccctctcccacaacctgggcccccaaacccctggccctggtgtccccactgagcccccattccccgctcccctgcaggcttttatgtgacgctggtggtgaaccgctggtggagccagtacctatgcatgccgctgcccgacgcgctcatgtgcgtggtggcgggcaccgtgcacggacgcgacgaccgcggccgcctctaccggcgcacactcatgcgctacgcagggctctcggcygtgctcatcctgcgctccgtcagcaccgcggtgttcaagcgcttccccaccatagaccacgtgrtggaggctggtgagtactcggccagaggcagggcagagaccgggcaaggaccaggtggaggggggcaaggggcgagctatccctgacccctttcctccagggtttatgacccgcgaggagcgcaagaagtttgaaaacctgaactcatcctacaacaagtactgggtgccctgcgtctggttctccaacctggcggcacaggcccgacgcgagggccgcatccgcgacaayagcgcccttaagctgctgctcgaggtgggcccaaccaggaggtcattcatatagaataccagggaaattgtacccctggagctgtgtcaacggcggccctccaagcacccccacgaggccgatttcaaacaccctcaccaggtgcactcttacctccatggggctgattccaatgcccttgaggggcagctcctgggtgcatggtacctcatccaggtgcacactcaccaccaaataccctccctggaacccccaaagcacactcccaattcccaccaggtgaccacccacctccatcccacgtacctacacttaatatccctgtgtgagctcaccattcaggcctcctcatgacctgtatccacccccaggagctgaatgtttttcggggcaaatgtggaatgctctttcactatgactggattagcgtacccctcgtgtacacgcaggtaaccccatcatgcctctttttatattcggtgtcagtggccctgatgcctggtttccaaggggaaaccaagaactagctaagacccccatcataatgatgcctaatcctagmcttggaccccaatgacccccctgagccctgccccgccctgcccaggtggtgaccatcgcactgtacagctacttcctggcttgcctcattggtcgccagttcctggacccggctcagggttacaaagaccacgacctagacctgtgtgtgcccatcttcaccctcttgcagttcttcttctacgccggctggctcaaggtaggtgggtgatccaggctggaatttcgtgggtggggcgggcatggggttcccaagtttccacctaactgctccctctcytctcaggtagctgagcagctcatcaaccccttcggagaggacgatgatgactttgagaccaactttctgatcgatagaaacttccaggtgagactcagtttccaggtgagacttccaggtggcgaccatcccggagtgcccaacagggttctggtcccacccctgccaagtcttgccaggtctcaccccaaccatccttccctctgtggtccccacccacccgaaggggtccaccctgtggtcccggcgggttgccctgcccccactttaccctgtgtgtttgcacccgtaggtgtccatgctggcagtggacgagatgtatgatgacctggctgtgctggagaaggacttgtactgggatgcagccgaggctcgcgccccatacacagcggctactgtcttccagctgcggcagccttccttccagggctccacctttgacatcacgtgagccagttgggtgggcagggccgcctggggcagggcttatggctctgcggggcacatctgattgaaaaggttaagtggaatcaattctggagatggggataagagctaaagtctcaggactgtgataacgccagaagctaagataggagtcaggggacaaggtcaaggtctgagactgggccactgactggggacagagctaagggctgaggtcagcgaggatcagaccggtcagtggtgattccaaaggagatgagggctgaggccaggagcactggctcacgcctgtaatcccagtactttgggaggctgaggcaggaggatcctttgagcaagcccaggagttcagaccagcctgggcaacatagtgagacccccgtctctactaaaaataaaaaattagccaagcgtggtggtgcacgcctgtagtcccagctattcaggggctgaggtgggaggattgcttgagtcgaggagttcgaggctgcagtgagccataatgacaccactgcactccagcctgggcaacagagcaagagcctgtctcaaaaaatgaaaataaaggccaggcgcagtggcttatgcctgtaatcccagcactttgggaggccaaggcaggtggatcacttgaggtcaggagttcgagaccagcctggccaacatagtgaaaccctgtctctactaaaaatacaaaattagccgggcttggtggctcacgcctgtaatcccagctaatcgggaggctgaggcaggagaatcacttgaacctgggaggcagaggttgcagtgagccgagattgcgccattgcactccagcctgggccacaagagtaaaactgcatttcaaaacataaaaataggccgggtgcggtggctcacgccaaggtgggcagatcacgaggtcaggggttagagactagcctggccaacatggtgaaaccccatctctactaaaaatacaaaaattagccggtgtggtggcacgcacctgtagtcgcaggtactcaggaggctgagacaggagaatcgcttgaacccgggaggcgaaggttgtggtgagccgagattgcgccactgtactccagcctgggcaacagagcgagactccgtctcaaaataaaataaaataaaataaaaataaaaaaggaaatggggctgagccacgactgaggttgaagatccaagttgaagtgcaaacacagggtgaggccaggctctgggtttaggagctaagatctttggggataagtgggacaaagcggtgggtggagtcagggaaatcagcgcgcctgggaccctgctctgtcaacaagaggcgaggccgcagcgctggcccactgtcggtcccgcaggctggccaaagaagacatgcagttccagcggctggacggcttggatggaccgatgggagaggcgcccggcgacttcctgcagcgcytcctgccggcgggcgcgggcatggtcgcgggaggcccgctgggccggcgcctgtcctttctactccgcaagaacagctgcgtgtcggaggcgtctactggggccagctgctcatgcgcggttgtccccgaaggcgcggccccggagtgcagctgcggggacccgctgctcgaccccggcctgccggagcccgaggccccgccccctgcgggtcccgaaccgcttaccctcatccctgggcctgtcgagcccttcagcatcgtgaccatgcccgggccccggggtccggcgccaccctggctgcccagccctattggcgaggaggaggagaatctggcctgagatcttagagcccagccccctaaggacagggaaccaggtccctgcacggcacccacgcaggtgtcccggtctgcataagcctcgtgtgcctttgtaaagtccacctacacttttgaccagctctcgctgcccgcatgtgtttggcgctgtgctaggggcgggagttcttccagactcttggaccagcccgccctgaccaccagctctacttcccaacccccactgcctgagaggtctctatcagtgtcctgcctgaattctttccttcaagtgaagatgtgactgactacctcctcgagttgtcatgaggatgaaagaatggcattaaagcatttggtatacagtaggtgctcaataaattgctagtgatttttactcaaacgttgttagtctgatttctcctgccagacattatccattgtcctaagtaaaatttgggagttcttgcaggttcttttttttttttttttttttgagacggagtctctctctgttgcccagcctggagtgcaatggtgtgatttctgctcactgcaacctctgcctcccaggcccaagcaattctcctgccttagcctcccaagtatctgggattacaggcacgcaccaccacacccagctaactttttttaatttttagtagagaggggggtttcaccatgttggccaggctggtttcgaactcttgacttcaggtgatccacccacctctgccccccagagtgctgggattacaggcgtgagccaccaagccctgctgcaggtttcttctttcttcttcttccttctcctccttctcgtcttcctcctcctccaccacaaccaccaggcccagcttattctaggtttttttttttcctttgagacagagtctcacttcatcacccaggctggagtgcagtgccacgatcttgggtcactgcaacctccacctccctggttcaagggattcttgtgcctcagtcccccaagtaactggaattacaggtgcgcaccaccacacctggctaattttttgtatttttagtagagacggggtttcacctcttccaggttttatgatggtgccctgcttaattcttcccaaactctgctgtctgaaacacccacatcagtgccctggcattactcattaatgagccagccactgtcccaggatcatgggttcttcttgcctcaagcctctgcattctcaggccctcagggcttcaggttttactaatttaatatcacacggactcctgatgactcctgaatataaaagtccagccaaggcagtgagctctggtcatgccactgcactccagcctgggcaacacagtgagaccctgtctcaaaaaaaaaaaaaaaagaggcctggtgctgcagtggggctcacacctgtaatcccagctgggaggtggagatgggtggatcatttgaggtcaggagctggagacaggcctggccaacatggtgaaagcccgtctctactaaaaatacaaaaattagccaggcgaggtggtgggcacctataatctcagctactcagaggttgaagcaggagaatcgcttgaacctgagagatggaggttgcagtgagattgtgccactgcactcaagcctgggtggcaacagagtgagaccccatctgaaaaagaaaaaggaagaaaaagaaatccagccaggatcccttctctaactgtagacccagaaagccaactgcctcttggatgcctccttgcagagatgtcacagacacttcaaacataacacacttgaaatccagctcctaatcagccccccaatctgccccaccctgtgtgttagctttgtccttccaggtgataaggccaaaagaagtcatgtggattcctattcccgccacaggccatcacatcaacccagtggccacaccaacccagcagcaaatcttatcagctttgcctttatttttattttatttatttatttgtttttgagacggagtttcgctcttgttgcccaggctggagcgcaatggcgcgatctcggctcactgcaacctccacctcccaggttcaagcaattctcctgcctcagcctcccgagtagctgagattacaggcatgcaccactacgcccggctaattttgtatttttagtagagacggggtttctccatgttggggctggtctcgaactcctgacctcaggtgatccgcccgcctcagcctcccaaagtgctgggattacaggcgtgagccaccgcgcccggccgagatttgcctttatttttattttatttttgagacggaatttaactcttgtcaccaggctggattgcaatggcatgatcttggctcactgcaaccttcgcctcccgggttcaagtgattctcctgcctcagcctcccaggtagcttggattacaggcgcccactacacccagctaatttttgtatttttagtagagacagggtttcaccatgttggccagccaaagtgctgggatcacaggcgtgagccaccgtgccctgccagctttgcctttaaatcgtatctagaatccaaccatttctcactcctccaggaccccagcctggccagagccctcactatcacccacccacccacctggactaccaaccaggtcttcaagctctggccctggcctcctaagcctgtttctcccagagtggccaccagagggcgcctatgaacacccgagccaggtcacatccctcctttgcttagactcttccgtggctcccacagcacttagaataaaagttaaagtattctctgcagcccacaagtccctgaataatctccccaccctcatctgctttctttttctttttctttttttttgagacagagtctcgctgtatcgcccaggctggagtgccagtggagccatctcggctcactgcaagcaagctccgcctcccgggttcacgccattctcctgcctcagcctcccgagtagctgggaccacaggcacccgccaccacgcctggctaatttttttgtatttttatttttatttattattattatttttttgagacggagttttgctcttgttgcccaggctggagtgcaatggcatgatctcagctcaccacaacctccgcctcccagattcatgcgattcttgtgcctcagcctccagagtgactgggattacaggcgtatgccaccacatccggctaattttgtattttttttttagtagagacggcgtttctccatgttggtcaggctggtctcaaacttctgacctcacgtgatccgcccgtctcagcctcccaaagtgctgtgattacaggcgtgagccactgtgcccggccgcatttttttgtatttttagtagtgacgggtttcaccgtgttagccaggatggtctcgatctcctgacctcgtgatctgcctgcctctgcctcccaaactgctgtgattacaggcgtgagccactgcacccggccttctgctttccttttattttttgagatggagtcttgctctatcgcccaggctggagtgcagtgacacaatctcggctcgctgcaacctccgcctcccgggttcattctcctgcctcagcctcccgagtagctgggactacaggcacctgccaccacgcccggctaatttttttgtatttttagtagagacagggtttcaccatgttagccaggatggtctcaatctcctgaccttgtgatccgccagcctcagcctcctaaagtgctgggattacaggcatgagcgtgagccaccacgcccggccttctgctttcttattcactccactccagccactctggtccccttactgtccctccagcacaccaagcgaggtgtcatctcagggcctttgtgcaaactgttctgcctggatcttccccaggtacttacatggcctctccctcacctccttcaggtatctgcttcaataatgtcacttccttggtgaggcctcctttctgggcctttttattctttttttttttcgatggggtctcactcttgttgcccaggctgcagcaagctatgattgttccacagtggtggctcactctggtaactctgggcaccaaggtgagggagataaagtgggccagggtttagcccactgcttttaagaaaagcttagtggccaggcgtggtggctcactcctgtaaccccagcactttaggaggctgaggtgggcggatcatctgaggtcaggagttcaagaacaccctggccaacatggtgaaaccccgtctctactaacaatgcaaaaattagccagtcgtggtggcatgcgcaggtggtcccagctactcaggaggctgaagcaggaaaatcccttgaacccaggaggcagaggctgcagtgagccaagatcgtgccactgcactccagcctgggcgacagagtgagactccatctcaaaaaaaaaaaaaaaaaaaagcaacaacaaccaaaaaacaaaaccaccacacattcacagacacacaaacgtgatcctcacctacctctggttggtgctattggtcactcacattttagtaagaatgcaagccaagcttttctttctttttctttttgagatggagtcttgctctgttgtccaggctggagtgcaatggcatgatctcagctcactacaacctctgtttcccaggttcaagcgattctcccacctcagcctcccgagtagctgggattacaggcatgtaccaccatgccctgctaatttttgtatttttagtagaggaggggttttgccatgttggccaggctggtctcaaactcctgacctcaggtgatccacccgcctcagcctcccaaagtgctggggttacaggcgtgagccaccgtacctggccgctaagcttttcttaaaagcaatgggctaagcctctggcccactttctctccctcaccttggtgcccagagcacagccagggcagattgaacgcctttatttttctcaaatataaaatcagagtctcctgaggcagcacatgaactccagagagagaatcaacaacaagaatcacattgctaaaaagaacaggcctatatctacctcccgccctccctccccaccaatctgggagagggaagagcagagatcatggcctcaaagctctcgagcacctggctgaagcccagtgctgggcgccatgtgagctggaggaagccagggtgggtggagcccaggctggcttgattgtgaggtctgtcagtgcttgtcagtggggcgaaggttcagagatgccaggcgtcccaagggtccacggcgagaattggttgccagccgctgctgtgccaggaatgactgggcatgggcaggcgcccgctcctccccagctcgctgctgcaaggccatgcccttcaggaggaggtgtggttggggtcaggtgagctcacaggacccccccaccaatattctacccatgagatcttagagcccagaccccacacttaccatattataccaggcactgatgagcagcttttcttcctgctcccgctgacttcggcttttctcaaagtccatctgtcaaggaggcaagtgtcaggggcctagatacgttggaggcagcgtaaagggacgaggacacccacctccaggtgtcggatgcggacatcccgttctcggagctgtgtcctcagggaatggagttctggaggtgcccccgcagctggccgctgcttgggttccatggtctgcatgacctacaggttgaggaagtcatagccaggtgactttggccttgaaaccccctgggacatactggggtgtgtgtattcattcattctttcattcattatagagacagagtccccctatgttgcccaggatggtcttgaactcctggcatcaagcaattctcctgccttagcctcccaaagtgttgaggttacaagcatgagccattgtgcccatccagccagtactttatttttactttatttttatttttatttttgtgatggagtctggctctgttgcccagcctggagtgaagtggcgcactctcagctcactgcaacttttgcctcccgggttcaagtgattctcctgcctcagcctcccgagtagctgggattacaggcgcatgttaccaatcccgcctaatttttctatttttcgtagagacggggtttcgccatgttggccaggctgctctcgaactcctgacctcaagggatcagctgcttcagcctcccaaagtgctgggattagcggcgtgagccactgcgcctggctgtgcgtaattttttttttttttttttttttttttgagatggactcttgccctgtcgcctaggctggagcgcagtggcacaatctcagctaactgcaacctccgcctcccgggttcaaatgattttcctgcctcagcctcctgag

SEQ ID NO: 96404 - DNA, 16085 bp, Homo sapiens
catgcgccaccacgcccggctaattttttttaatagagatggggtttcacaatgttgaccaggatggtcttgatttcttgacctcatgatctgcctgccttggcctcccaaagtgttgggattacaggcgtgagccaccgcgcctggctttttttgtttttttgttttttgagatggtgtcttgctctcattgtcccggctgaagtgcaatggctcaatctcggctcactgcaacctccgcccccggattcaagcgattctcctgcctcagccttccgagtagctggaattacaggcgcctgccaccacgccaggctaattttttgcatttttaatagagatggggttttgccatgttggccaggctggtcttgaactcctgacctcaggtgatccacctgcctcgacctcccaaagtgctgggattactgtgcccggcccagttttcctatttctttctttctttctttttttttttttttttttttttttttttttttttttgagacactgtcttgccctgtcgcccaggctggagtgcaatggtgggatctcagctcattgcaacctccgcctccgggattcaagctattctgcctcagcctcccgagtacctgggactacaggcacccgccaccacacccagctaatttttgtatttttagtagaaacagggtttcaccatattggcgaggctgatcttgaactcctgaccttgtgatctgcccgccttggcctcccaaaaagtgctgggattacaggtgtgagccaccgtgcctggccttttttccttttttttttttttttttattttgaggtggagttttgctcttgttgcccaggctggagtgcaatggtgcaatttcggctcaccacaacctctgcctcccgggttcaagtgattctcctgcctcagcctcgcgagtagctgggattacaggcatgtgctaccacgccctgctaattttgtatttttagtagagaccgggtttctccatgttggtcaggctggtctcgaattcccgacctcaggtgatccacctgccttggcctccccaagtgctggtattacaggcatgagccaccatgcctggccttttttcctatttcttaagcacctactgcatgtcaagtggtttccaaatgttatctcattaataccggatgtggtggctcatgcctgtaatctcagcactttgggaggccgagggcagatcacgaggtcaggagattgagaccatcttctggctaacacagtgaaaccctgtctctactaaaaatacaaaaaaattagccaggagtggtggcctgcgcttataatcccagctactcaggaggctgaggcaggagaatcgcttgaacacgggaggcggaggttgcagtgagccaagatcacaccacttcactccagcctgggcgacagagcgagactctgtctcaaaaaaaaaaaaaaaaaaaaaaaaggccaaatgttatctcatgcaaatctcacaacagccctatgcctggcaaacttaccctagttcaattagaagctctctgtgccaaaagaaactcacagaattggtgtccaaccagccgggcgcggtggctcacgttcatgcctgtaatcccagcattttgggaggccgaggcgggcagatcacaaggtcaggagatcaagaccatcctggctaacacggtgaaaccctgtctctactaaaaatacaaaaaaaaatagccaggcgtggtggcgaccgcctgtagtcccagctactcggaaggctgaggcaggagaatggcgtgaacccaggaggcgcagcttgcagtgagccaagatcgcgccactgcactccagcctaggcgacagagcgagactctgtctcaaaaaaaaaaaaaaaagaattggtgtccaaccgcgaatctgaaatgtgagacaaacgtgttctcaatttacagcagcctcccttcccaagcctctcatcacactgtcccccgagttcaaaggtcagcacttcaactaacttaacacagtccccaaacgcaagccaacttcttcaccctggaaagcactagctgttttaaacaatggcagggttagattctatgaatattgcccttactttagaacttgactctagagatgcttctttattttacccctatttgatagatgaagaacctgaagtacagaaaagctaagtgacttacccaagatcacacagtcaacaggcactagaatagtcagaagccagggctgtgtgactcaccaaaacctggatatgattctcctccctcttcagacttttctcaggtcagagcaggtaagtactgtaaagggatgtgcctggactttcagcctctcctgcctcttgacactagaatagaggctgagatgctgcagggcgacctacttcccaggcttctgttgctttttaaagatccagtctctgctggtggctttgggggaggaggaggtagggatggctccattagcttcctgtgttccctccccccatactccacccccaaggccaaagtcacacctgggctagcttagcatccccaaagtaggagggagagacctttcagcccacatgcaaagtaaagcagaaaaaccttattgtgtgttagcaggaagcgaaagaggaaaggtatcctattcttttttttttttttaattttttgagatggagtctcactctgttgcccaggctggagtgtagtcactgcaacctctgcctccccagttcaagcgattctcctgcctcagcctcccaagtagctgggattacaggcgtgggccaccacccccagctaatttttgtatttttagtagatagggtttcaccatgttggtcaggctggtcttgaactcctgaccttgtgatctgcccgccttggcctcccaaagtgctgagattataggcgtgagccaccacgacagctaggctgtttgttttttttttttttgagacggaatctcactttgttgcccgggctgaagtatagtggcacaatcttggctcactgcaacctttgccttctcagattcaggacattctcctgcctcagcctcccgaatagctggtattacaggtgcgcgccaccacgcccggctaattttttgtatttttagtagagacagggttgcaccacattggccaggctggtctcgaactcctggcctcaagtgatccttctgcctcagcctcccaaagtggtgagattacaggcgtgagccaccacgcccagccaacttttattttttgtagcaagaaaggtcttgctgtgttgtccaggctggtctcgaactcctgggctcaagtgatccacctgtgtctcggcctccccagtcactgggattacagatgtgagccaccattcttggcagggcagggtttttgtctgtttaggtagctgacttcacatagcagatgctcatcatttgttacatgagtcagtgctccaccccaacctgcacagactgcatctggcaaaatctgagagcctgtggtgtaccggggtaggcccacctcagcccactcccaggaccacagccctgtgccttccaccctctacttgctgaggccgtgtttctctgagtcttggtcctcttttgattgaaagtggaaggaggggccaggcacagtggctcatgccagtaatccctgaggccgcagatcacttgaggtcaggaaaccccggctctaccaaaaagataaaaattagccaggtgtggtggcacactcatgtagtcccagctactcaggaagctgaggcaggagaattgcttgaacctgggaggcagaggttgcagtgagcccagatcgcgccattgcactccagcctgggggcggagtgtgcctctgtctcaaaaaaaaaaaaaaaaaaaaaacgggaaggagggggctgggtgcagtggttcacacctgtaatcccagcactttgggaggccaaggtgggaagatggtttgagcccaggagttcccgaccagcctgaacaacacggtgagacttcgtctctacgaaaaataaaaaaaaaaaaatgagccgtgtctgatggcacatgcctgtagacctacccaggaggctgaggtgggaggatcgcttcagcccaggaggttgaggctgcagtgagctgtaatctcaccactgcactccagcctaggcaacagagggagactttatctcaaaaaaaaaaaaagaaagtggaagagggcccagccctaagctgggtaggagtgccaaggctgctcagctgctgccattcttgcctgggaagactggggtgagcctatagctgggggaccccccaacgttgctccaggtccagcaggtttgaggagttgggaggcaagggcatcttaaaacctgtgtgggtttggtggagaacaggtggagccaggcagcttctggctccaacaggatgggcagtggagccaggaggagggcatggaagggctaggtctgtgccaatgatcatgttctgtaaggttggacagagaaccccctcgccctctttctcttgagggtgtatgcatacagaagggacagactccagcctccctggaagggcttcaagtagctagaggactgagtggcccttcccccagtggagcacacagccccatggaatccagctctcagcactcctcacctcctctactaccaagatgcagtcccctccactcccctcctcagtctcccaggttctaccctcagcccccttcagtctattccccacaggagccagagggatcccctgaagatataaaacgtatgatgttgctacctcaaataccccccaaagccttctcctcacttaagaataaaatcctgggcacaacgcagtggctcaggcctgtaatcccagcactttgggaggccgaggtggatcacctgaggtcaggagttcgagaccagcctggccaacatggtgaaaccctgtctctaccaacaatacaaaaattagccaggcatggtggcaggcacctgtaatcccagctactcgggaggctgaggcaggagaatggcttgaacccaggaagtggatgttgcagtgagccgagatcgcgtcactgcacttcagcctgggtgtcagagacaagactctcaaaaaaaaaaaaaaaaaaagaataaaatcctgggccaggaatggctcatactggtaatcctagcagtttaggaggccgaggtgagagggttgcttgagcctagcagttgcagaccagcctgggcaacatagggagaccccgtctctacaaaaaaattaaagaactagcagagcatggtggtgtgaacctgtggtccctactacttgcggggctgaggtgggaggaggccaggaagtggaggctgcagtgaggcagtgagctgcgatcgtagcactgcactctagcctgggcgacagagcgagaccatctcccaaaaaaaaaaaaaaaaattcctgaattctccccaccataatccattcatccatcctcctcacttaggaggcccccatcaggcccaagctgtctccaacctggctgttccctctgcctgggactctgcctcacctccctcaggactctaatcaaatgtcacctaaaagacatacccgcctcctccctagctgcaaaagggcttcccctttttgtttgtgtctgtctccttctgtaagggcagggagggtgtggtctgcgtgctcccagctgttgtcccagagccttgcagagccctggcacataatagatgctcctaagtgtctgctgaatgcacaatgcaacagctttggccaagccaaaatggaactgtgaagagaaagtgagcctaaggtggcacggtagagatgcagcagtgaggggagataggtcttggggaaagtccaggcctacaggaggggatgtgcccctgtccttcctaacccttccatatcccgctccttactgggtcaggcccaggctttgacaggtacaatgccagcaacagggggaaggcttaggtccgacagcgcaaagaagacaaaccaagcacacagctccggcactaagtcaagttctttacttcccaraagtgatggctaaggggagggaggagggtgagaagaggaagacagaaagagccagagagaatgaggaggtgagaagggggggacagtaaaccactgttctatgaagtctcacgaggcaagtgctcaaggtaaaaaaagagtcctggagaatcgtccacggctgcgggaagcatctcggtttccttctgcttttaagtcctctcagggaaggctgtcgccgctgccgctgcattaaatagttatgtacatcgcagagagtcccaggccatgggcaggtgggggaggggcgtcatttcaccaggggccgagttttatcatcgtcaccgcactggtgagctttgtactttttcacttctgccatgtacttggcccacgcgtcacctttacttgttaatacctgtggaaaggggatacgggttaggacgggggtgccaggaaccagggtcaggactgccctgagacaggtgacccattcccagtgtcacccagaagactctgggtttgagctraagattataaagtcaagttatctggggacccattgacagccctcctaccctgccaggcacactcataaaaggcctggataccagacagggagggagaaggctgggcgcaaaagctggaagggaaaggcaatgtgggtggaccccctgcaccaagctggctcacctcatcctccgtcttctgcttcttggctactattcccgtcttgagggctagtttgttcccgcctctgcgtttgcccacctgggtgaagggacagaagactgcaacggttacaggagccgggaccgcccttggcggcgctgaggcccactacaccttcctagcccggcctggtggcccgtcctgacgccgcgcccagctccgccagccggccgacctgcgcagcaatcagagaggagcacacgcgactcagcgcctgccctgggcccgcggtgccctcccagggagcaagaagagtgtccacctcagtagggaccagctctgttctcactttccacgccaaggcctcaccctccctagcagggaccacaagaggtggcaacagctccctttattgagcatgtactgtatgccaagccctgtgccaagtgctgtggatgtatcatctcctttcattttcacagctaccctaagatgaaagttagaaccaccccctttttgaccaggcgcggtggctcaggcctgtaatcccagcactttgggaggtagaatcgggtagatcacctgaagtcaggagtttgagaccagcctggccaacatggtgaaaccccatctctactaaaaatacaaaaacttagccgggagtggtggtaggcgcctgtaatcccagctacttgggaggctgaggcagaagaattgcttgaacctgggaggaggaggttgcagtgagccgaggttgcaccattgcactccagcctgggcaacaagaagtagactctgtctcaaaaaaaaaaaaaaaaaaagaaaagaaaaaaagaaccacccccttttcatagatgaggaaagtctttcaggagaggtcatgctaacaacaaacaatggagctgattcagggtcaggtgggtcgaagcctctggacagcatccttagacatcaagcaacattgccttccctgtgcctagcctggcatggcctctttgagggtgcagccaaaatggcccctcaatgaacaaatgaaaaagatgcaacgacgactgctactcccattcatgaagggactccactcgcaggtatcacaccaaccctggtcctgacgcttttccttccttacccttgcctcaaagagtcttcctctagcctttcatcctgtatcccaccttctcccattgattgagggcttcctgcgctccaggggctccaacagtcttcacagacaaccaggcattcagtaacctgtgctgctgggactatttccatttttttttttttttggagacagagtcttactgtcgaggctggagtgcagtggcatgatctcagctcactgcaacctccacctcccaggttcaagtgattctcctgcctcagcctcccgagtagctgggattacaggtatgcaccaccatgcctggctaatttttgtatttttagtagagtcagggtttcaccacgttggccaggctggtcttgaacccctgacctcaggtgatctgcccgcctcggcctcccaaagtgctgggattacagggatgagccacagagcctggcctgctgggattatttcacaccgattttttttttaagatactctcttgttctgtcatccaggctagagcgcagtggtgcaatcatggctcactgcagcctgaatctcctgggctcaagcgatcctcctgtctcagcctcctgggtagctggagctccaggcatgtgtggcaccatgcccagctaattttttaatttttttttgtagagatgcatttttgccatattgtccaggctggtctccaactcctgggcttaagcgatccacccacctcgacctcccaaaatgttggaattacaggtgtgagccactgcacccaacccacgcccatttttaacaaatgaagaaactgaggcttgcagaggttagatcatttgcccaaaatcacatgctggatccagaactagagcccccagtcttgttattctcaacactttttcctccacactacagggacttgatcttaacaccacagacatggcaagctcagagccaaaaatcaatatatgccctatttacttaatccagagtttctcaacctggcactaataacattttgagctggattattctttgtttgggggtgggagggcgctgccccacgcatggtaggaagttgagcagcatccctggcctctacccatagatgtcactagcaccccctcccgcagttctgacaaccaaaaatgtctccagactttgccaaatgtgggggtggagggaactgccccaattgagaaccaccagtttagcccttcctggaagacaggctctgtgctaaccacttttccaggatcacctcataaaaccctcaccacatcaagagatgctatgatgtctatttttgcaactagggaaaatgagggtaggcaaacccagaggctccaggaaagcagcgatcttgtctgtaagctcaccactgcataccagcacctagcacaatgcctagcacgaggtaaattgctcaataaatggaggttggtcgaataagatacaaggaagtcaagcaattgtcctagataagtaattgtccttacatagtacgtggtctgagtctaacacatatagctcagagtccagacttaaatttactccctttcctcacaattagtggtggtcccatgacccaaggtccgggtaccactcaaacaggaatcctgatatccacgtttcctcattctccacagtgctgattcctaggcaattcctcagctcccagttcccacgggcaagctcctggagtccccactcccgcccctagaccccagttgtcgggaatccaagttccacaccctcagcgggtgacccggacgggcccctcattcagaacggaaagtggacttcggtcccgatcccccttcacgggccccgactcccgctgccaagacaggccgtggcgcccgcccccacccccacggctccttacgaagctaagtgtggagcccggaccgcccttcctcttcggatccccggggccagcggcggcggccgactggtcgggtcgctgcggacccgggggcggctcctcctgccgctgccgctgctcctcctccatcttccgcttgaacagctccaggaagctgccgtcgttggcgaacaagttcacgccgcccgacaccgggctcgaacccgcgcccgacacctcctmgtccccgctctcgggcgacgtccccgatcccgactcagcccaacggctcccgccaccgccaccgcccgcggggcccggagcctcccggccctgaggctccgcccgtctccctcgggcagccattttgtcgccaggtgccgcgcaaaggactccgggaaggccgctccggccccgcgcttggcgcccgactcgcctcgtcccgaacaatgcatgccgggaagagcggtcaggccctccagcgcccgcagcgggggcggggcgaatgagggaaccaacccgaaggggcggggctagggggaggagcccccgtctcgcgggtttttttgtttcgttttttttttttctttttttttcagacggagtttccctcttgtttcccaggctggagtgcagtggcgcgatctcggctcaccacaacctccacctcccaggttcaagcgattctcctgcctcagcctcccgagtagctgggattacagacatgcgccaccacgcccagctaattttgtatttttagtagagacgggatttctccatgttggtcaggctggtaatctcccgacctcaggtgatccgcccgcctcggcctcccaaactgctgggattacaggcatgagccaccgcgcctggccttgttttttaaaaattagagacgggcgcctggctatattgcccaggctggtctcgaactcctggcctcaagcgatcctcctgccttggcctcccctcccaaagtgttgggattacaggcgtgagccatcgggcccagtcttgctgttttggtttttggttttttgtcttgttttggagacagagtcacactccgtctccgaggctggagtgcaaaggcatgatcagggctcacttcagcctcgacctctcagggctgaggcgatcctcccaccacagcctcccgagtagctggaaacacaggcatgcgccactacgcctggctaattttatttattcatttatttatttatttatatttgtggagacggggttttgtcatgttgcccaggctgttctcaaactcctaggctccagcagtcctcttacctcagcctcccaaagtgctgggattacaggcgtgagccaccgagccctgcctctcgggttttcaaaattcagcagtactcaggctggagttccccatacaggggctcccggagaatgagactgtcgtctgagactggggctgtagcttgctctctggagttggtttcacttggggctaggaacagattcgctttccagggctagaatccccgtctgacgacaccaagaataatctctatgagtggaaggacctcatctggggctgtgtgctcagctgacacctgggaacttgaatccctaactggggaatagagagcatgtctagtctgggccccccaagtagaaataggggtatctttgggttgggtaaccatctctgggataaagctcacatttgttggggacatagctggctctgtggagctgaagtccccgtctgagaatcagcttacttttttattttattattgttattattactttattttattttgttttattttattttttgagacggagtctctctctgtcgcccaggctggagtgcagtggcgtgatctcggctcactgcaacctccgcctcccgagttcaagcgattcttctgcctcaacctggtctcgattcctgacctcgtgatctgcctgcctcggcctcccaaagtgctgggattacaggcgtgagccaacgcgcccagcctattttatttatttatttagagacggagtttcactctttcacccaggctggagtggagtgaagtggcgcaatctcggctcgctgcaacctctgccctccgggttcaagcgattctcctgcttcagcctcctaagtagctgggattacaggcgcgtgccaccacgcccggctaatttttgtatttttagtagagacaggttttcaccatcttggccaggctggtcccgaactcttgacctcaggtgatccacccgcctcaacctcccaaagtggtaggattacaggcgtgagccaccgcgcccggcccgagaatcagcttattttatgagctgtagtattcagatgaagtcggggttatttctagtctgtagtctccctctaaagttaagagtgtcatgggctggggtctccatcaagggcctggaacccagcttctgttcctgctctaagacagaggttcaaacatgaaatatggtatactggagtcttctcttgaaatacaaggagacttttaggaattccttctacgaaacggagcgcaattgcaggaatggtgtctgctaggcatgggagatcagggcgtacaggacaagactctgtggactcgcccactctaagccactatcagcccggggacctatcgccaaccgagtcaattcgtctatgattggtttgcggcaagagccaagaggctcacagcctattgaataacagagggggcggacctgaggtgaggttgggacctaccgtgaagaatagagggaaaatgatggacataaagttgagcctatggagtcaggccaaggaggaccgggaatctaacttcaccgaaagggcatggactgggtgtttggctggttgctaaggtgaggttggcgctaccggaacataagagtgattggtgtaagtaagaaaagacatagccaatgaaaggagagctgcaagacctagggcccaatcagtgaaagggagtagcctagaccgtaccgatgtgttcattaggtagggggaacccttggaaaattatagaccagaggttgacaaagtgaaccctggaagcaaagaatagtgaaaatataatttatatttctcctaaaaggcaagtaatgaggaaattaactcatgctcctagcttcgctaggaatgtgatagagaatttcccctgtaggttcttcgtatggtgcgctccgctggatcacgtgagccagttccaaaatggcggcaggggtggccgggtggggggttgaggcagaggagttcgaagatgctcctgatgtggagccgctggagcctacacttagcaacatcatcgagcagcgcagcctgaagtggatcttcgtcgggggcaagggtggtgtgggcaagaccacctgcaggtaaggaggctgcggcgggggccaggaggcgtgtaggatataccactgggcgaaggggaggccaaggaccggcttttccaccacgaccggggcatgggggctggcgggggtctttgggtttcactctctggaagttacctggagcaaatgagaaagacctcaatgcagccctagcaccctctgagttggaccatccgtgttggggctcaagtgccgaaccacagtgaactcagcgcccgggggacggggaagcacttagatatccccatcagctggaccgtacctgagtgaatccagagttgtgggtgagggcggcaccagaacaagcaatcctagtttggtgaaccttggtgttttatgcccaaggcgagagtgagggtggaaagcgagggagagagcacgtgatgagactgtcccaggcagctacaggcaggaggtgtccgttggacagattatcctggacaagcagactgaaccatcctgtgcttactagggaatgcaggagaccccttagcttattaaggaagggggcacggagtcaagctatgctggctggaccgctgggccatgccactgtgcccagcaaaaaagaagcaggcactaggccagacagactcagtcagctgaaccttacctctctagtccacatagaggggtcaggagataaatcagagagggttcctttgtagggactgaggctcaatcccaccataacccatactctcctctcaaggcccctgctgattcgggtcacctgctccagggaacctaccactccccttgcagacccagggaacagagcccatcccctcatcccctatcttttgacttttccattactcagctgcagcctggcagtccagctctccaaggggcgtgagagtgttctgatcatctccacagacccagcacacaacatctcagatgcttttgaccagaagttctcaaaggtgcctaccaaggtcaaaggctatgacaacctctttgctatggtgagtggaacagggcttagcccccacttctgggaaaagcctcttccagcctttcttgtgcgcacacaccagcagccaccgtgtcctatccactctatatcctgtgtctctcgtgtttcactccttcctcaacatactcacaagggaaccaatgaggaattgcagagcaggaagcacaccagagtgcctgaagcttagtgagccagggtaggggaaggagaagttggagagaccaatcagagccacatggtgtgggaccttatgggccactaagaagtttggcattgactccaggttattaacgggaagctgtttgttttaagcagggcaatgtcgtggccaaattcatgtttgaaaagtaccctttgacggccaggtggagatttaattgtcagtcagggtagaagcagggaaactaacaaggagattgggggtgtaaccagttgagagatgacaacatcctggactctggtggaggcagaatgttgggggagaagtagtcagacttgaggttttttttttttttagacactcaagactcctctgtctcccaggctggagtgcagtaacccgatctaggctgactgcaacctccgcctcccaggttcaagcaatgctcctgcctcagcctcccgagtagctggcactacaggcttgcgccaccactgcctgttaattttgttttttttaggagacaggttttcaccatattggccaggctggtctcaaactcctgacctcaagtgatctgactgcctcggcctcccacagtgctgggattacaggcatgagccaccacatcgcaccagggatgtattttggaagtaaaccagtaagattacttgggtgagaaaaagaaatgaattgattacatgtctttcttgtctctctgagcagctgggatggggaaaactaggaaaggagtaggtttagaatgaacaaataaagaatttcattttgtccacagtgaatctgagttgcccactggaaatccaagtgtaaacatcatgacagtagcttgtttatgtgagtctggagcccagaggaggttggcattgatttggaagtcactgtctcaagggtggcatttaaagctgtgtgagggctgggcatggtggctcattcctgtaatcctagcactttgagaagccaaggtgggcggatcacttgaggtcaagagtttgagaccagcctggccaacatggtgaaaccccatcactactaaaaatataaaccaattagctgggcatggtggcaggtgcctgtaataccagctactcagaaggctaaggtaggagaatcgctagaacccaggaagcagagattctcctgcctcagcctccggagttgctgggattacaggtgcctaccaccatgcccggctaatttttgtatttttagtagagacgaggttttctcacgtctcaaaaaaaaaaaaaattggctgggcgcagtggctcactcctgtcatcccagcactgtgggagaccgaggcgggtggatcacaaggtcaggagatcaagaccctcctggctaacacggtgaaagcccatctctactaaaaatacaaaaaatagctgggcatggtggcaggcgcctttagtcccagctgctcaggaggctgaggcaggagagtggcgtgaaccccggaggcggagcttgcagtgagctgagatcgcgccactgcactccagcctgggcgacagagcaacactctgtctcaaaaaaataataaaggccgggcacggtggctcacatctgtaatctcagcactttgggaggctgaggcgggcagatcacaaggtcaagagactgagaccatcttggctaacacggtgaaacctcatctctactaaaaatacaaaaaaattagccaggtatggtggcgggcacctgtagtcccagctactccggaggctgaggcaggagaatggcgtgaacgcgggaagtggaccttgcagtgagccgagatcgcgccactgctttacagcctgaacaacggagcgagactcaacaaaaaataataaataaaaataaaataaaataaagagatgctgcagagtg

SEQ ID NO: 96405 - DNA, 17807 bp, Homo sapiens
ggatttcaccatgttggccaggctggtcttgaactcctgacctcaggtgatccacccacctcggcctcccaaagtgctgggattataaacgtgagccaccgtgcctggcccctttgtttctttttttagagacagggtctcactgtgttgcccaggctgttctcaagtgatcctcttgccttactgaaagcccccttctttccctaagccacaatttcccagtctgtaaagtggggctgttgtcccaccctctgaaagtggctgtggagatgaaatgaataaacctcagctagggccagcttggtgcctgcctccttgtgtgtccttattcagccctgtctcttgggtcttagctgggcagggccctgttctctattgtcctgctttcccctcctactaccaccaggatatggctgtgctggggtttcgtctgtggcctatgggctcctggcccgagagctggagcgggtggacagtggctacaggtcggcgatgagtgtccagtcctccctcgtcatgcaccctatctatgcctatggcagcgaggaacagcggcagaagtacctgccccagctgggtgagtggctgcccatggggcctggtggaaggaagacagtctctgaggtctggaactcaagggtggggctgtcccctgagcctattctgtccctatctcaaagatagcataagtggccacctggacccccgccagaccctgggcttcacctggagatctgatccctggccagcctgactgtccccctctgtgaccaccgtcatctccctatgctttctgtgttccccagtccagcccaaagtttaaagtccaccaggttcctgctggccatttgcagtggctcacacctataatcccagcactttgggagggtgaagtgagaagatcccttgagcccaagagttcgaaaccagcctgggcaacgtaaggagaccccatgtctattagaaaaacaaaaaaaggaaagagcctatgtgacctgcgctaagtggacgttggccctcttccgtggtgtctcggaggtgttcagctgcttcaagatgaagctgaacatctccttcccagccactggctgccagaaactcattgaagtggacgatgaacgcaaactttgtactttttatgagaagcgtatggccacagaagttgctgttgacgctctgggtgaagaatggaagggttacgtggtcggaatcagtggtgggaacaataaacaaggtttccccttgaaacagggtgtcttgacccatggccgtgtccacttgctactgagtaaggggcattcctattacagaccaaggagaactggagaaagaaagagaagatcagttcatggttgcatcgtggatgccaatctgagtgttctcaacttggttattgtaaaaaaaaggagagaagggtattcctggactgactgagactatgatgcctcgtcacctggggcccagtacagctagcagaatccgtaaacttttcagtctctctaaagaaaatgatgtctgccagtatgttgtaaaaaagcccttaaacaaagaaggtaagaaacctaggaccaaagcacccaagattcagcgccttgtcactccacatgtcctgcagcacaaacagcggcgtattgctctgaagcagccgcatattaagaaaaataaagaagaggctgcagaatatgctaaacttttggccaagagaatgaaggaggctaagaagcaccagggacaaatcgtgaagagacgcagactgtcctctctgcgagcttccacttctaagtctgaatccagtcagaaataagattttttgagtaacaaataagatcagattcgcaaaaaaaaaaaaaaacccacaaggccctgtgtgaccaggcctctgctgacctttccacctcatctctggccactcatgtgatcctcccagccagacttagctacttgaaattctccagaagtaccaccagttctttacacatctgttccctctcccagcactgctcttccccacagcctcctcctgcttaactcctcacacccttccagtttggccaactccttcctgattccctgggtccccctccccatcttggcattgtgatcatgactttggggtaacctgtctcttgaaagcagggccagatctaacttagttatgaggtctgactcaggggcgagggtaattttttttttctttttttgagacaaagtcccgctccgtcccccaggctgaagtgcagtggtacaatcttggctcactgcaacctgcggttccccagttcaagcaattcctgtgcctcggcctcccaattagctgggattgcaggtgcttgctacccgtgcctggctaatttttgtatttttagtagagatggtgtttcactatgttggccaggctggtctcgaactccagacctcaagtgatccatctgccttggcctcccaaagtgctgagattacatgtgtgagccacctcgactggcctaattttttgtatttttagtagagatggggtttcaccatattggtcaggctggattttttttcttttttgagatggagtcttgctctgttgcccaggctgtagtgcagtggcatgatcttggctcactgcaacctctcctgcccgggttcaagcgattctcctgcctcagtctcctgagtagctgggattacaggcacccaccaccacatctggctatttttttttttttttttttttaagtagagatggggtttcaccatgttggccaggctggtctggaactcctgacctcaattgatccacctgccttggcctcctaaagtgctgggatgacaggcgtgagccactgcaccccgccacgaggataatttttgagtaaggggatgtatcagggaccaggcagccttgtgactttgtcttgtgcctgcagccaagggggagctcctgggctgcttcgggctcacagagcccaacagcggaagtgaccccagcagcatggagaccagagcccactacaactcatccaacaagagctacaccctcaatgggaccaagacctggtaagggttctgggtggtgggcaggtggtgaacaggggcaaaggggcactggtcagacccctcaccgactgttccatccccaggatcacgaactcgcctatggccgatctgtttgtagtgtgggctcggtgtgaagatggctgcattcggggcttcctgctggagaaggggatgcggggtctctcggcccccaggatccagggcaagttctcgctgcgggcctcagccacaggcatgatcatcatggacggtgtggaggtgccagaggagaatgtgctccctggtgcatccagcctgggggtaagtggcagccactttgggaatgggtgttgggtcacctgcggatgcggctttgtcaggcaggctccgtgctggggacgcggctccctgtgcctgtggagcccacacagtggtgattcttactcagccggactcgctgacgtgctgaaaactgcccccatttggtgaccgtctcgctcatcccggctctgcccgggacacatgggcctgaaccagctcagtcatttgactcacagtgcatcttctggcatccgtcagcctcctggctctgagcatcgaacccagatgccaggctgggtgggactgtgtgcaaaccgagtgagcaggcaccgagcttcagtgccagggccatctgtgatgtgaaccacaacctgagtccccctgcgtggggtggctggggaggaggctttccctgcttcagagttggttctgcataggccctcttggtgtctcttgggtgggcctgaggcgccatctcaaccctacagggtcccttcggctgcctgaacaacgcccggtacggcatcgcgtggggcgtgcttggagcttcggagttctgcttgcacacagcccggcagtacgccctcgacaggtgtgtgagggctgcagtgagattctctgggggtgtggggcagcttgggtttcactctctataccatgggtgactccccagcccccacccaccaggcctgagttccttgctctggaatgaccagtgacgtccttctgagcagctgtgggctgagtcaacggcagggccagggcaagcttgggggcactgaggcagcctgggaaggcgtcctggagcagggggccccaggacagggacggggtgggagagtgggcctcccctcgctcttaccctgccattgcccatgtaggatgcagtttggtgtcccactggccaggaaccagctgattcagaagaagctggcagacatgctcactgagattaccctgggccttcacgcctgcctgcagctcggccgcttgaaggaccaggacaagtaggggctgtgtggtgggggcggggggatggcagcggtggctggaggaccttgtgtccttcctggagagaaaggtccttcctgcctggtggccctggggacctgaaccttctgctgtccctcttgtccttgatgggctgggctgaggacagccccactggtccctcattgggagcttggctgcatcagggaatccccaccccgggctaggtttgcttggagcatcgggatgccaggatccccagtccttgttaccctcatgtgccactcccagggctgcccccgagatggtttctctgctgaagaggaataactgtgggaaagccctggacatcgcccgccaggcccgagacatgctgggggggaatgggatttctgacgagtatcacgtgatccggcacgccatgaacctggaggccgtgaacacctacgaaggtaggagctggacctcagagggctcactgaggcctcagtgtctggggagggggtacagggaggtgggacggggacaggtctgagtccaactccacctatcactaagtgacagtgtgacctggggcgagccttacccctctgtccctcatctggagttactcacatggggactgtggaagtgaagtgcttcatgcagcacacagaggccccatcaggccttgcgaggggctcccagctctttctcccacatgctcgggaggagggatgttcctgagacaggtaagctccgaaggcagcccaggggtgaggcccgactcctagcaggctggtggacgcaagggagtgagcgaagctacacgcaggaatcaacgctccattttgttaagagacaaaagtcatcttcagatgacggtgtttgcaccctgtaactgatggtgatttacatgggggtccagaaccccttgcttggtgggaagacagatgtggaaaaagatacttaaaaaaaaaaaaaaagtgcaaacccagcatgcgctatgtagaaatagagggaggtatgaggaccccccgggcagagatgcttccagacagagagaacagcaaatgcaggaggggtgccttccctgcgcaccttgcaaccccagatcttgtctctatctggcatctggggggtggggggatcctacaaatgtgagaatgaccctgaggacaagcagcgggcgccatgagatggttttatgcagagaagggatgagtcagatttggtgctttaggggctcggcgcagtggctcacacctgtaatcccagcgctttgggaggctaaggcaggaggattgcttgagcccaggagttagaagttatgatgagctatgatcaccccactgcactccagcctgggtgacagagtgagaccctatctatatttaaaaaaaataggtttgtactttaggaagtaaacagaattggctctaaaaaggaggctacaatctgccttctgcttcaaggagctggggaggagcaaaggatgagacaccagggcatggggtgtgggattctctgggagaggcggcttcagatgggcagaggtcagctgaggcaagtgactgctcttccgatgtgctgtccctcctatccctcccgagggtaagaaagggcttgctgtgtttccttggagctcaggggtgctttcagcctctgtggcaaggaagcgtggccaggttgaaaatcaaacatttaataaactgtggggctgggggtggggagaacttgccaagggtggggagcacgaagcctgggcctatggcaggggctggacttgctacattttgggagttcagcacaaggagctttgggtttttgtttttttctgccaagatgcattatagaaccatgaaaaacaatttctcagtgtggcccaaatggtggcctcacagtcttctcctggagactgtcactaaggcgtgagtctcccggcagctgtcagcattcaccatctctgttggtctgtacttctgaagcagtggcctggggatacatgaaaattgattttaaagggaagttgtgagctatgaaaactccaaaccgactctgtattaatcttgtccaggtayacatgacattcacrycctgatccttgggagagctatcaygggaatccagghgttcacggccagcaagtgagccgctccatcaggggcccgaaactctcaagcccctttctggagagatgcctggctggaccgtaggagcgctgtgctctgagcttagaaagggaggtggcggatggagtgggaagtgagagacactgatttttaaatatcaaaatttcccttctgaagtcgttcrgatgtgttccttaaaaagaagatggaattctctgtagagcgtctcaatccacttttaaccatggatgagagcagactccatttaccctgaaatagcagcttctcttgagaggagagtgacatkgaagcaactccgtctgctgcagctgaccccctcacactgagttcacagtgcgccctccctccctcccatctgggggtagtgccttatgctgggtgttggagcagagtgagggagaggaaaataaagacctgcacatctgaccccaaggtgtcaggccggtttactggtaaccacctgagaagtagtttcagccacagaagaaacgaacacgtctgggggctgtgagttgccgggacgtggtggggactttcccctagagtggtctggcccccatctgagtcttaggctctgctgtaaaaaagaaacccaggttagcagtgccggtctgtgccagggctgtgggcagaggggatgatttctgagtggcaggggtgcaagggactttgtcctttctgtcaccacagagctgctcatacaacagtgggacatgacaacggtttggcttctcagctcagacacaccatgttataggggatcacaaacaagatggtgagtgcaccaagggctttgcagggactgtggcctggcggggtcagggctgggtgcctggtttctgttcacatttactcttggctgggccatccctgtcctcttcctcaggcagcgccccccctgtgagtttactcatacctcaggctggagacacaggtctttgtacacagtctccacgctgtggcagacttgtttgagctctgtctccaaatggctgatctttgccattttctgggtgaactcttggagcttttcctggatgatcttgttgtggtcattataaatctgatagatcctctcctctaatttctctgtcagatccgaaacctgttaaacaataagatgtgttctcggaaaatcaaacaagaggtatcacaagacatctgtgttaagtgggtttcttagatttctgcaatttatcttatgaaaatgacaaaataggctgggcacggtggctcatgcctgtaaccccagcactttggtaggccaaggtgggtggattacttgaggccaggagttcaagaccaacctggccaacatggtgaaaacccatctctattaaaaatataaaagctaggacgggtgtggtggctcacgcctgtaatcctaacactttgggaggccgaggcgggcggatcacgaggtcaggagatcgagaccactgtgaaaccccgtctctactaaaaatacaaaaaaatttagccgggcgaggtggcgggcgcctgtagtcccagctacttgggaggctgaggcaggagaatggcgtgaacccgggcggcggagcttgcagtgagctgagatcgcgccactgcactccagcctgggctacagagcaagactccatctcaaaataaataaataaataaataaataaataaataaataaatacacaaatacataaaaactaactgggcatggtggtgtgcacctgtaatcccagctactcgggaggctgagacaggagaattgcttgaacctgggaggtggaggttgcagtgaaccaagatgatgccattgcactctaacctgggcaacaagagcaaaactccgtctcaaaaaaaaaaaaattagcaaggcataggtgacgcgcacttgcagtcccagctactcggaaggctgaggcaggaggatcacttgagcccaggagttggaggctacagtgagtcatgatcacactactgcactccagcctgagagaccctacctcaaaagaagaaaagaaaaacaccaaaaactaaaacccagtgcagtgactgggggtcagattgcctatattttaaatttttttgctttttttgttttgttttcttgcggcggagtttcgctctcattgcccaagctggagttcaatggcatgatcttggctcactgcaacctccgcctcctgggttcaagcgattctcctgcctcagcctcccgagtagctgggattacaggcgagcgccaccacacccagctaactttttgtatttttagtagaaacggggtttcaccatgttagccaggctggtctccaactcctgacctcaggagatccccaccttcagcctcccaaagtgctgggattacaggcatgagccactgcacctggcctgttaaatttttttaagaggcaaaagtatatacagtcgtgtgctgcataatgacattttggtcaatgtcagactgtatatacaatgatggcccataagagtataatgccatatttttactgtaccttttctatgtttatatatatttagatacacaaatacttaccatcatgttataagtgcctacagtattcagtatggtaacatgctgtgtgcaggtttgtagcttaggagcaataggctcttccacgtagcctaggtgtgtagtagactataccatctaggtttgtgtaaattcaatctatgatgttcagatgatgacagtgtcacctagggatgcatgtcacagaactgtacagtacaagctcagccaggttaggaagaaagtacacagaatagaagaggcatccaacaaagtggcctctgggtgctgtatcaaaataaataaataaataaataaatgtttttgtatcttttctactagaggccaaggcagcagggtgaggagttcaagaccagcctgggtaacatagcaagatcccatctctacaaaaaaaatgtttaaagaaaattagctgggcatggtggtgcacacctgtagtctcagctacttaagaggcagaggtgggaggatcatttgagcccaggagtttgaggctccagtgagctgtgatcgtgccactgctctgtaagcctgggcaacagagtgagacgccacctctaaaaatataaataaataaataaaacaagtgagccgggcatgatgttgcatgcctatagtctcaagctactcgagaggctgaggtgagaagattgcttgagcccaggagttcaagattgcagtgacctatgattccaccactgcactgcagtytgggcaacagcaaggcttgtctcaaaaaaaaagaaaaaggaaaataaagtcaatctgtcatcaagacacctagaaccagcaagctgtcccactcatgtgacccattatgtattttgtttgtttgtttgtttgctggaattataggcacgtgctaccatgcctggctaatttttttttttttttcgagacagccaagatcgtgccactctactccagcctgggctgggcaacagagcgagactctgtctcaaaaaaaaaaaaaaaagaaaaagaaaaaaccagaaagaggcagtcttctttttcttctttttttttttttttgagatgaagtcttgctctgtcacccaggctggaatgcagtggcgggatctctgctcactgcaagctccgcctcccgggttcaggccattctcctgcctcagcctcctgagtagctgggactacaggcgcccgccaccacgcccagctaattttttgtatttttagtagagacagggtttcatcatgttaaccaggatggtcttgatctcctgacctcgtgatctgcccgcctcggcctcccaaagtgctgggattacaggcctgagccaccacgcccggccctcttctttttttttttttgagacggagtctcacctgtcaccaggctggagtgcagtggtgcaatctcggctcactgcaacctccgcctcccaggttcaagcaattctgyctcatcctcccgagtagctgggactacaggcgcgcaccaccatgcccagctaatttttgtatttttcatagagacggggtttcaccatgttggccaggatggtctccatctcctgaccttgtgatccccctgcctcagcctcccaaagtgctgggattataggcgtgagccaccacacctggcccctatttatttatttttgagacgaaatcttgctctctagcccaggctgcagtgccgtgcagagccactgcactgagccaatttttttatttttagtagagacgtggtttcaccatgttggccaggctggtctcgaactcctggcctcaagtgatccacctgcctcggccttccaaagtgctgggattacaggcgtgagccactgtgcctggtccccccattatatattctgaagaggcatcaggtgcaaccattcatgtaggacctgaacatcacaccagcttttgcaagatgtaagccctgggcatgtggaagaagctccactcccccgtcacagaccattcgatggcttctgcaggacatatgggtgtgacaatgcaagttgtgcctcaaccccctactcccgtggctgctcgaccttgcgtgaagtaagagggctgcgtgttggaggcaggagggcatccaacgccccgctccctcagcctggctctctcgtcaggcaaatcattcatttccaagccttatytatatcatgggtccaatctcttctctgtaggactattctaagggtaaattgagatacagatggtcccaacttactacagttcaacttactacatttttgacttacagcattttcaactcacaatgggtttattgggacgtagccccatcataagtggaggagctcctgtgctgtgtgtgaatggcctagcaccgtgcctggtgtacaacagacaccatcagtggttcattccctccccttttgcataaggaatcccccctctcgctgggtggagtctgtcaccttggtcttcaggctgttcctgaagttggtcatgagtgcatggtccttttgccggctcttgttgatgttttcgatcagctcctgggctctcttmtgcaggatgtcaatgcttgagtccagagaggagaagtagagtcccgacttcccttccaggaccgtcagctggcaactggcactggaggtggcgacacaagggcaagaaacctgacttctcagagtacaggragcggccaggtgtagtcgctcatgcctgtaatctcagcactttgtaggccgaggtgggcggatcacaaggtcaggagttcgagaccagcctggcaacatggtgaaacctcgtctctagtaaaaacaaaaaaacaaaaaattagccaggcacsgtggcacgtgcctgtagtcccagctacttgggaggctgaggcaggagaattgcttgaacccaggggatgaagttgcagtgagccgagatcacgccactgtactccagcctgggtgacagagcgagactccgtctaaaaaaaaaaaaaggacaggatgctgagatcagcaccagactcttccaagagcggctgatctgagagagatcaggtgggaggggacccgcgttgttgccttccatgggtgacacgaggcatgcttcctaggttattccattcacacacacgccctgaatgatgagaatggcacccccattttatagctgagaaaacagaccaagaggcacgactaaatatgcccaaggttccagaccaaggaggtctgtctgtccccaaagcccactgttattttatgacaccaacttgcttctttggaattttggaataccaataatagtgtcaatgctttctttcttttttttttgagacggagtctcactctgtcgcccaggctggagtgcagtggcgcgatctcggctcactgcaagctccacctcccgggttcatgccattctcctggctcagcctcctgagtagctgggactacaggcgcccgccaccacgtccagctaattttttgtatttttagtagagacggggtttcaccgtgttagccaggatggtctccatctcctgacctcgtgatccgcccgcctcagcctcccaaactgctgggattacaggcgtgagccaccgcgcccagcccaatgctttctttcttattttctttttttttatagagacaggtctttctctgttgcccaggctggagtgcagtggcacaatcatagctcactgcagtgtcagcttcaagtgatcctcccacctcagcctcctgaataggtgggactacaagcatgtgctaccatgcacagctaatttttaaaatttttaaatagagactgggcttcactatgttattcaggctgctctcaaacttctggcctcccaaaatgttgggattacaggcatgagccactgcgcctgactgatgcaatcagcaatctcctgcaacctctgtctcctaggttcaagccattcttctgcctcagcctcccgagtagctggaattacaggtgcacaccactacacccaggtaatttttgtgtttttagtagagacagggtttcaccatattggccaggctggtctcgaactcctgacaagtgatcctcctgcctcggcctccaaaagtgctgggattacaggcgtgagccactgcgcccagcctgatgctttcttaagtgaccttcctgtcattaacctgctgcatccctttcccaacctactgggtgatgttgaccgcctggggctacagtgtacctgcacctccttgctcccaccaggtgaggtgaatacctgttgaattatatttaaagagcatttaaagaaatgcgcacacacaaaaagttgttggtcccatgttgtacatgtaactgtaattatgtaattcaaatattgtgttaacaagtgaaatagtggcagaagagtgacagctatctaaaaagctaaacagaatgaaaaattttgagtaatatgtaatgttccgtaacttcataatattcaatgtaataaaatggaacttcagttgggtatgggagagagaactaaaattgaagcaaagatcataaaaatctagaaaaattctgcatatagattgctctgccaaggccttgttctctgctttaaaaacagaactggggccgggcgcggtggctcaagcctgtaatcccagtactttgggaggccgaggtgggtggatcacaagggcaggagttcgagaccagcctggccaacatggtgaaaccccatctctactaaaaacacaaaaaattagccaggcgcagtggcaggcgcctgtaatcccagctactcaggaggctgaggtacaagaatcgcttgaactcgggagccgagatcacaccactgcactctagcccgggcaacagagtaagacttcgtctcaaaaataaataaattaattaaattaaattaaaataaattaaaacaactgaaaattgtgggtaatgcattgtgaatgaagtttatggaaaaaatgtgatctgataaggcaacccattggtattttaaattaagatatattttttcttcttctgatgctctggtttatttgaccggtttgacgtctgatcagttagcggttctggccaggtagagctgcccctgtgagtcacagctaacttttcctcagccatgttcccggcactgagctaagtcacatgccttgtcttggtgcatcctcacgaccacactcgggtcatctgctgttctctttacgacatgggcttagagtggttacaccaccttctcaaggtggaggacagtctgtggcagagctgggctttgtacccagaaggcctgacttcccagctggtatcctgcttcctactaaggcactcaggcgccactcccctcctggatcttacatttcctcgtcgccctctgaggtcctccagctctgaaaggccaagccttgtaggtgtggacagagcagttcctgaatgcagcaggtcacacttgtgtccacaagcaggttactgattacttacaaaaataaatcttggccaggcacagtggctcacgcctgtaatcccagcattttgggaggccgaggcgggtagatcaccagagatcaggagttcgagatcagcctggccaacatggtgaaaccccgtctctactaaaaatacaaaaattacccaggcatggtggcatgtgtctgtaatcccagctactaggcggactgaggcaggaggatcgcttgaacctgggaggcagaggttgcagtgagctgagatcgtgccactgcactccagcctgggcaacagagcgagactccatctcaaaaatataaaataaaataaaaataaatctcagctatctcaaccaggcacagtgggctcacgcctgtaataccagcacttcggggggctaaggcaggtgaatcgtgagctcagggttttgagaccagcctgggcaacatggcaaaaccccatctctacaaaaaacacaaaaattagccgagtgtggtggtgtgtacttgtagtcccagctacttaggaggctgaggtgagaggatcacttgagcccgggaggtcaaggctgcagtaagcttgatcatgccactgcactggagcctagatgatatcacgccactgtactccagcctgggcgacagagtgagaccctgtttcaaacaaacaaacaaaacaaccacaacacacatatacacccctcccctctccacccggtctcccccagccggccacctccctctttcctccccatcaaggccaaggttctagaaggagctgcttaaattttctgggcttttttttttttttttttttaagagagagagagagtctcaccctgggcttcttttcttttcttttgagacagagtctcgctctgtcaccgaggctggagtgcactggcatgatctcagctcactgcaagctctgcctcccgggttcacgccattctctttcctcagcctcccgagtagctgggactacaggcgcccgccaccacgcccggctaattttttgtatttttagtagagacagggtttcaccgtgttagccaggatggtttccatctcgtgacctcatgatctgcccacctcagcctctcaaagtgctgggattacaggcgtgagccaccgcgcccggccatcctgggcttattttcttacccccattcacttttcagtccattgtaatcaggttcctcccccggttctcaaatgaaacagctcctaccacagtcaccatgaccttgtggttagaccgatagacatctcagagtgacatgctgacctcttggcagcagccagcactgctgaccacccttccctgctactcccgacatgtggtatcccagaggtctgtgcttgggcctctgctgtcttcttgccagacaccgtcaatcacacacttgttctgcagtgaggcctccatgcctcctccctgctggcccctgcagctaatatcccagccaccattccacaatgcacaggctattattctccaaaggcattcattcccgtagcatgggatccctgaacagtcccctttcccacctacgtcctgtctcctccagaaagtgttccttggctggattaggtgcacacagcacctacggtttcactgtttacaccttggcctcccactgtagtctgctgaagggccagggccatccttcatctttgtatcttcagtacttacccctcatgagagaagcaataaatgtgctgctaataagtaaatgacttgcgagtactatccattaccatccacactttggattctatcatctaaattctatcatcccagcccatgcctctctcctgaggacccaagaatatatgaaacctcccagcctccccacatggctgtctcaaaggcatctgaaactccacatttgcacaaccaaaagcgtcatctcccaggcaacccgatttcatcttccattcccttagttaatgacataaaaagccacctggttcccaagctcaaaacttagcagcaagcctagagtccagcttctctctgtccctctgcatcctgtctcaaaatcccctcatttctaccttctttgtttttttatttttatttttaattaatttttttttcagatggagtttcactcttattgcccaggctggagtgcaatggcgcgatctcggctcactgcaacctccgcctcccgggttcaagcgattctcttgcctcagcctcccgaatagctgggattacaggcatgtaccaccacactcggcgaattttgtatttttagtagagacggagtttctccatgttggtcaggctggtctcaaactcccgacctcaggtgatccgccctcctcggcctctcaaagtgctgggattacaggcatgaaccactgtgcccagcctttttatttatttgtttttgagacagagtcttgctttgttgcccaagctagagtgcagtggagcgatctcaggtcactgcaacctccaactcccggtttcaagcgattctcttgcctcggcctcccaagtagctgggattacaggcacctgccaccacacccagctaatttttgtatttttagtagagacggggtttcaacatcttggccaggctggtctccaactcctgacctcgtgatctacctgcctcagcctcccaaagtgctgggattacaggcgtgagccaccatgcccggccctaccttcttaatgtctctaaatctaccatcattagcagctctataactttcacttctcaactaggccatagggacctttattttatttacttatttatttttgtaaaaaattttgtaataaattttatgttaaaaaatttttttttcttttgtaagaaattttcttttgtaaaaaattttgttattattattttgtttttgagacagactctcactcggtcgctcaggctggagtgacaggctggagtgtcgctcaggctggagtggtgcaatctcagctcactgccacctccacctcctgggctcgagtcattctcgtgccccagcctcctgagtagctgggactacaggcacacaccaccacgcccggctaatttttatatttttagtagagacagggtctcaccatgttggccaggctggtctcaaactcctgacctcaagtgatccgcctgcttcggcctcccaaagtgctgggattataggcatgagccaccacgcctgaccttttatatatatatattttttttgagatggagtctcgctctgtcccccaggctggagtgcagtggcacaatctcggctcactgcaagctctgcctcccgggttcatgccattctcctgcctcagcctcccgagtagctgggactacaggcgcccgccaccacacctggctaattttttgtatttttagtagaggcggggtttcaccatgtta

SEQ ID NO: 96406 - DNA, 53242 bp, Homo sapiens
ctgccttgacctctcaaacgactgagattacaggcacccacccttttaccttatcttttcaatcaagaggactcactccttaagaaatctcagggcctggctgggcatggtggctcacccctgtaatcccagcacttcgagaggccaaggcaggcggaccacctaggtcaggagtttgagaccagcttggccaacacggtgaaacaccgtctctactaaaaatacaaaatttagccgggcgtggtggcggaagcatgtaatctcagctactagggatgctgaggcgggagaatcacttgaacccaggaggctgaggttgcagtgagctgagatcgtgtcactgcactccagcctgggcgacaagagcaaaactccatctcaaaaaaaaaaaaaagaaaaaaaggccgggcacggtggctcacgcctgtaatcccagcactttgggaggccgaggcgggcggatcacgaggtcaggagtctgagaccagcctgaccaacatagtgaaacctcgtctctactaaaaatacaaaaattagccgggcatggtggtgtgcgcctgtaaccacagctactcaggagggtgaggcaggagaatcgcttgaacccgggaagtggaggttgcagtgagccgagattgcaccactgcactccagcctaggtgacacagtgagactccatctcaaaaaaaaaaagaaagaaagaaaagaaaagaaatcgcagggctatgaaaagccacattgccatatggcaggtatcttaaaagctgggggcttctcatgcctcgcccctatctacctgggctctaaacattaagctgcatctcttaaaccttggccctgttggaggccactcccctttacacagaaggccaagcaaactgcaggctccgccctcttccccgcccaagtcacaacccacgccccttgcccccgcgtctcctaccaggcctggcagagctcctcgcagagcggctgtgcctggcgtacccccaatagccgcaggcggaagcgactgcgaagggcacgttggaggtgttccaggaaggattcgcatctggacgttgggagagatagggtcggatgggtcaggacccgagggagttcctgggcaatgggcaaagtacgcgagaaaacggtggagggtgctgtactcactcagggctcggcactccacagcgttctggatggtttccagggcccgatgtctctgttgtgtccatctctgagggacaacaaggtcctggcaaaggggaaccctgtgagctagggtcttggatattcaggtaaggtttgggaactgaggcctggggatcccctggacaggggagacaacaattacatcaatcctcacaaacccataacttaagacccttcctttggaatgcaaatgcagcttcaagtagtaataatcatttcttgtttataataatcaacttacttgtcatgtgcctggtagtgacacatatacttaatccttttccttttttttttttctttttttcttttgagacagggcctcactctgtcacccaggctggagtgcagtggcgtgatcttggctcactgcaacctccacctcccaggttcaaacaattctcgtgcctaagcctcccaagtagctgggatttcaggcgcatgccacctcgtccagctaatttttgtattattagtagagacaggggtttcaccatgctggccaggctggtctcaaactcctgacctcaaatgatctgcccactgcagcctcccaaagtgctgggattataggcgtgagccaccgagccctgctcatatgcttatatgcttaatcttaacaacagctctgcgaggtatatttgttatttctctctttttgggggtccatgtgagacccagagaggttaaatgacttcctcaggatcacacagctacaaagtggcagagttgggatttgaacccaggcagtctaattcttatccaccattcttcagcactatccgtgcctcccaccttggtggccatgctaggcccctctcataaggaaattctaacattgtcatggcagggtaggtgtgggtttctgggtgttggtggtgaggcagggtctggggtgctcacctgccaggtgcagcttgcctttgcccagatcagctgccagcccatggtgttgctgggacctggcttggagtgggcggctccctccacaggcttctagcaggatccatgccaaggtcagttgcagcacccacgtcaggccgatgggtcgcatgtggaccctgcagtccatgtccacctgagataagagctggcaggcatagggtggggttcagccatccctttctgtgagcttagggtggcacccacccagtgcatacccaagaagcagtgccaggcagagtagggaaagtgcagctgaggaggaggctggggcagtggccaaggacgttcaaatcccaggagaccatcagggcctgcctccaacctaggagcccccctcccatcagaaccatgtcctctatgtcccttcagtgccaccccaaccaagcttagaccacagtggccctcctcccatccagcaggatctcccacctttttagtcttcaagagaccccttcttttctcagaatgaaggggacctccctaggtcttccaatccccctctcctgttcagtaattcctccctctcttctatgcggcctccctcctccctctctcgctccctgccggcccttctctgggtcaccttctctcggcccacaatcggcttaggggccacccagagctggacctttgggaccaaggctggtgtggcagggctcaggttctgtcactggggcccaaagccccgaggcagggacagctagcggtctgtggagacaagactgtccccttcccgcctccccgcattcagcccctcacctgttggctggattggggtctagaggccgctaagacacctcaggatccagtccaggaaactggctgctgaaaggggcgtggcttaatgcaggggcgggacctcccaccgtcctgcccacactccagctgaccaaaggctggccgacttggggctggtgtgtatatatccttgtgtttgtttttatgttcagcttgtggcttaagctctgtatctatatatgtggggagtgtgtgtgtgtgtgtgtgtgtgtatgtgtgtgaggaaggtgtgtttgtgtggcctatagcctgtgtgtgttcccaggcacctgtgtcttttgtttgtgtggctgtgtgtgtgttgagcatgtatgtgtgtttttgttgtatgaggttatgtttatgtgtgtttcttggtggagtggttgtgtgtgtgtgtgtgtgtgtgtgtgtgtgtgtgtgtgtatacgttcagaatctgggggaggattgtgtgtcccaagcaatgtgtttgcagttgaataaaacaggatcttaataaatgtgagaaggggaaatgtagcattgggttagtgtccctgcaaaaatgttggaagtcagtggataaaggtttttgaccatgaaggttgaccatgaatgaacaaagaaatgtcatgtgctgagcaggatgtgtttgtgtgcacacattatgtgtccttctgaagtttctgtgaatgtgtgttgcttgtgaacactcctttaactcatccattcattcaacaaacatttattgagcacctactgtgtgctagattctggggatgcagtagtgaacaagacatgaaaatttcagccaggcatggtggttcacacctgtaatcccagcacattgggaagctgaagtagaaggatcgtttgagcccaggagtttgaaaccaggctggccaacgtggtgaaaccccatctctactaaaaataatcaaaaatagctgggcatggtggcacatgcttgtaatctcagcagttcaggaggctgaggcatgaaaatagtttgaacctgggaagcagaggttgcagtgaatcaagattgttccactgcactccagcctgtgcaacagagtgaaactctgtctcaaaaacaaacaaacaaacaaaaactcaaaataaaagacacaaaaatctcaggtttcatagagctgacattctagggggagaatcagatgagaaaaacatccctgcagagggtatgggtgtgtatgtctatgtgttgtgttgggagaataatttgtctgttttagatgataatttgtgtgcaactggacatcccttggttttggaactatgtgactgtgcttccattggttaagtgtttatatgtgttgtttgtgtgtgtttgcattggatgactgtgtgtatgtctgtgtttcctaagtatgtgtttgtatggctgcagatgtgagtttgtgtgtatctgtatttttggatgtttgcgtgtgtctgcatttgctgagtatgtgtttgtatgtgtgttaatttgcagaatgtgtgggtctgtgtttgtggagtatatgtttgcagagtatgttcgaataaatgtttgtgtgtctgtgtttactgaatatgtgactgtgagtgttcgtgtgcctctcatctcagggcaagagaggcttttgtctctcttttattgctgtattccctcccagatcccaaaacactacgttgcacacagtaggtactcaatatgtggtaagtgaacaaatcagtagataccgtctctgggtccctctgtgtacacccagtgatgtgctggaggcctcagtaagcaagacctgccggacctagctttcccctggtccatcttgaggtggtccaggatgcttgtgggtcagatttgttcagcctctgggctatgcctcacgccagagcctccgcaccctttctccttccctaatctcagcccccgaccctgcgcttggatttcagcaccgcggacaggagcgcgcgagaccagcaccaaggagagctcccgcggtcgccatcgtgagataggtcgccaggggcggagtccgggccatggacggagagatgtgccagcaagggactcagcgagacggcgacacaaatgtgccgacaaacatatacagagacagacagagataacccaggcaaaggcgcggacttgaggcgacaagctcctggtgaatacccggacccagcctcgccgtcgcccccgtcgtccagcaggggtcgctgttacccagcgaccgcgccctccgggaccttggggccagatactggccaccaccccttgggaagcccttctgtcccccagtgccaagactgggagttcggagggctcggacactctcctctccaactttgggaagcatggtgggtttggcctcacctgtgtgaacatggaggagcggcgagggagctgaaaagcgctttaactgcccccctctccaactaccagctaatcgctcctataaatacagacggcctggcctggctccttaatcctgaccgtgagggaggggtcgctagaggggctgcagggttccctgaggaggctctgattgtggggcaggtgggtgggggggcataatatgtatgcacatgtttttctgaggttgcgtctcctgtgaagacgggtctcctcagtgaaaatgtttctctgtaagcatgagatctctcctggggctgtagaggtctcgtgggtggggacagtttcccacagaggatatggcttttaggggtctctgattgggggtatcctttacacgggaattgttactcctgggatctttctcttcggggaatgcctctttcgtggggagggggatggcttttgagaggaaagtcacctctcagggaccatatctattaggaatgattttcagggttgggggagttcttgattggacagggcgtccctgtggaaactatctccccctgggaatgtgtctcaccaagggggtctctgggggatgaatgtagagggaatgtatctcagggagaaggcttcctttggggtgtttcttgactgagggttctacccctgagaatatctctcctctggggtgtctctttttatagtggtctctcggcagcttggctcccatgggggcaccaggaggctccgcccccccgcccgccccttccccccgccagcgcgggcagcggtggctgagcccgggctcgggcgcccagacgcagtgacggcgccgggcccgccccacttcgctccgcccccgcccccgccacccctcccctcagccgccgccgccgccgccgccgcggtccccgcggcttctcactccctccctcctccctcctcccgccgccgctacctccctcctccctccccgggccgaagtcgccgccgctgccgccatggacgattcgggcctcatccgccgccggaggctgcaggtacgcggctgcctgggccccgggtggagaggaaggggtcggcgccctggggcggggctgggcaggaggcgggagaacttgcactagggtcagccgggacgcccccacccataggttcgggacgctaaccgcggggaacgctgtggccgcgcgtcccgccgcgctggggaccccgcccctcaggcgccgcccggcgatccagggagctgccggaggggtgcagcctagcgctccccctcgaggatcgcctgaggggcgcctggcccgccctagggggatggggctggggccgaagtcatcgccctggcgcctcgccaggctaggggtgagggggcgcagagcaaagttattgccctagggctcatgcccctcggggccatcggcgccgctggaggcgtaaacatgtttgtgcggcaacctcgcccctcaccaccccaggagccccctcccgaggcataggacgccctgcgtcccccacgcacctgcctggccatcaggattcttcctactgccctaattggacaggcacctagacagctttctcactcttcattccacctcctccactacaacatccgcccccccaccgcgatcctcaagtccagcccagcttgtgggtgggcgggagcgatttttagctccttgcagccttagaagatgctggtctcgaggctgcgcaggcgcaggagccgtgcgtccactgcacggagtgggacactgaggatcgctgtggagtgtggggaaggcggggacaaactcaggtgtcaggagctcctacctccaaggtggggagggattctgtagccgagaagcgtcctctgctcgtcttcagctgcgtttctgaggggttagtacggaagttcagggttaatacggaggtccggtcccaaacatcccagaggggaaggtgatgatatctgtgccccaaggccctgcctggggtctggcccttctgagcctccttggggctcagccccaggcttggtaatctggagtttagataaagccgagaatgggcccagactcaggctccatccccagcctgaatcttgggaaaagaggattcaaaccctcacctagggcttcgtccatttctagactcccctaatccatcattcccgaggttgaaggccaaggggagctgattggtcagtgcagcaggaaaaatggtgatcagactgcmggaaggaccttccaggcgtctgggtaacgccggagccagacatgagttggaaaactaatttgctttcagagcccakatggcccgatctccggagcctaggcctctctgaagtgctcccacattctctccgcctctcgggggtgggttaggagagtgggttccgagagaagggaggcagctgcggcaaagttagagcaagtactgcagcagccaggttgggtccgcgccgtcgggtttctgagaaaagggaggaaagaggcggggcctgcacggtgtgtccccgccctccaggccggcgtcaactctcattggctcagcgccacgmgggactttaaactcccgctcgagacaccgcccccaacgcggaatgcttccactcacccacccacccactcaaccccaggcttgctctgggtccggcgatccctgtcggagtcctgtccccaccgcttcccttctggcgggattaacyacttcgctgcctggatacacccacatacgttggtgcatcctcttaggaactgtcgcatcactgctgagcgcccgagggtcccctgtgtgcagctaggctcttttttttttttttttttttgaaacggagtctcgctctgttgcccaggctggagtgcagtgacgcaatctcggctcactgcaacctccgcctcccgggtttaagagattcttctgcctcagcctcgctagtagctgggattacaggctcatgccaacatgcccggctagttttgtatttttagtagagagtgggtttcaccatgttggccagcctggtcttgaacttctgacctcaggtgatccacccgcctcggcctcccaaagcgctggaattacaggcgtgagccaccacgccctgggatcttatatgtagacagcatcctgagttcgaatgccctgtctgcagtgtcaactattaatcctgtgcgggagaagcggaatccacttggccgagcggctctgcagctgagattggaggtggcgtctgtttacactgacgccaaagacccgaacttccgccgctccagtttgaccctttcttcgtccctagaatgtttgggggcgctagcgggtggggctgggttccaggtcttcttcgggtggtgcttaaaagccctccaggggcttaccctccaaggccggttacccggatctggacaccctgggctctgtggccagaaaatccaggtcttgatttcgcttgggccattgcagacacgcagccaggtcgactggtcctcattcactccggtcatgcaaagacagagggaaaacctggtttggattatcggtcacccgtggctcgggagggcagggctgccctttggccccgcctatatgtttgtccgttgtacaacggggtgggaggacgctgtggcccatcctctgtcatgcagcatgtccctccttaataacgcctgttctccagacttagtatttattgagcacttgctatgtgctaggcaccatgctaaggggctaggcatctgcatcaactcctaagatcctcaaggagacacgggactattggaaggtcatttgccaaggtcataaaaagcagaattgagatttgaacctaggctttttgcttttagagatcctagaaatgtctaggacatccctcattttccttttgttggagtcccctccaaaggccttttgaaactctcccccaaatctttccacctgcagccccactcagtttccttccttccacctcaccctgtggatagaaaactggctggcaggtgttgccccttgtaccccattcctttcctcagaaaaaagccaagaccccatatctcctgatccctacagtgacttcctaagagcttgacaaatggaaggtgaccttcttcaaatgcagacacataaagttaatactcactaattattattattgtcattataaaaaatgactacgcggccatcacctgaatttccatttttatttttttattttttaaactttttattatttatttatttattgttaattgagagggtgtcttactccagcagtggtgcaatcatagttcactataacctcgacctcctgagctcaagagattctcccacctcagcctccgtggttcccattttaaatctcagttgtgagtcactctacttacctaccccccaccccctaccccaactctatgactctagctgggagtcagatagatctgctgaggtgtagatgagtcattcattctttcaacctttcattcattcaacctttcattcattcattgagtacgctaagcttattcccgcctccaggcctttgcccttgcagttccctccacctggaatgctctctccacagatcctcccatggctggctcttatctttcagcaaccagcttaaaagtcacctccacagagcagccctgtctgacaatgtgtctccatcctagccattgtccatcacatcaccctgtttaatttattcataagactaattattgtctaaaatgatttcgttcacttctacactaatcttgtttaatgtcccctttaccctataaatactagtcccaaaaggccagaaacttttttttttttctccttgagacagagagtcttgctgtgttgcccacgctggtgtttccttggactcaagcgattctcctgcctcaacctcccaagtagctgggactagaggtgcacaccaccacaccggacttgtaatttattcactactgtgtccctagtgcctaggattgggtcagcatacagtaggtgctcaagacatatttttcaaataatgattcctatttcatttgcacaaacacacgctgatatgccaactcacttgcctttatatggcgccccgcctgtgtacgtgggcctctgttggtctctgagggtcaggagaggaatcacccagggatcctctcccccaagaaacttggcccgcagtgcatggccaagggtgaaagtgacagtgctgaagaggggcctgtcttaccctgcttctgctcctccagggagttgataatgcttgtgggcagcaacggcaggtccacgctgaccttcatcgttttgcccctttgccttccagaaggatttgcccctgccccggaaaagcagcaggtgagcctggggagagacgtggcgggggctggccgccccttctcccgccggggtgggggcgccaggcgagtgcgcgggcggggcctggctcgccggcacgcagcagcgccccctcccggccggctgcagccgcagggccctccccttccctgccctcccctgcccgctgcggcggctgcagcctccgccccgcgcgcttgctccccgcgccgccgccgccgccgcctccgccgctgctgccgcacctgccaccatgtcgccgccgccgggtcatgtctgactctctctggaccgcgctttctaatttctcgatgccctccttccccggcggcagtatgttccgccgcaccaagaggtagacccccgatcccctagacattgtcccggccctccccgcaaaagccgccgctccgggtactgctgcagggcggggcccgggatgctgcgcccggtccagctgcgccagaggtgccccagctgcgccttcccgccggggttggggttgaatggggggtggtgtgggccgagtctggggggcttgcacgctggagaggacggccgcggggggagggggctgcgccactgggggtttgtggcgcctttgtctgctggcgctgcgggctccaacagcctggtgggggtagaggaagaaggggaggctggggggcttggcaccctcagaacaatagccgcagcctggcctccccccacccccatgccgcgtgctcctggacgcgctaatatgctcagtcactgcggctgtgggtgaggggacggacggaggggcttggggctccctcttcgggagctggatgctgaggggtagaaaaaagggggggtttatcataacacaacccccccccccgaacacagccttacactgaaaatagtgacacacagcgtcacacaggacatgatgtcacacacatacacacaacagccctagtggcccagatacactgggaggtgccacacatacctagccttgcagctgccacaggtcagaaccatgcacagacacacaggggcaccacgtcgtgtacacctagtaagatgtcacttacatggcgatccacacacacacagttatgtcatccaagatgcaaacatgtgtttcaatatcccatccatgcatccaagaatgtcacaacacacgatgtcatatctaggtatctcacatactatgtcacactgacatcaggataaacagatgtagggatcttgcagagacagaaccacgcaaaatcacatgttatcacattgcaagactcacctagagaatgtcaaatgtggtgacatgtttggacacagtgtcacaagatgttaaattcacacaatagatgctacatacacatggacaagcatggtgaatgtcacacccagacggaaggacagtatcggacacagactcagaatgccacacaaagacatagatacatgtaggggggatcatgcatcctggccaggcatggtggcaggcacctgtagtcccagctactcaggagggtgaggtgaggcgggaggattgcttgagcccaggagtttgaggctgcagtgagccactgcacactgcactccagccgggcgacagagcgagacattgatttaaaagaaaaaaaataataataatacaacctgcctgtgttacagcacacattgttatggacaagtggcatttcacactgtgtcacatagacacacaaatgctcaaattgtatcacacaagataaacccacgttgtgtcacacgtatcacactagaatgcattcagcgtcacacattgttgaattcatacagtggataccacacgtggatacctacagtgaatgtcacgcatagactgagacacgctcagtatcaccaatggtgtcacctagacacagtgactatcacaccatgacagacactgccctacacataatccatactgagagtttctcacacacatgtcatatgcacatcccctgccgtacacagtcctgccgaggcctgcaccacctttcttcgagaaaccctcccagggagcctccaaacacacatggatgggagataggcggggatctgagacaggaggtcagctggtggggctcaagaactcactgggctgcggcccggcccggcccccctgccttaccttccccgcagctgccgcaccagtaatcggaaaagcctcatcctgaccagcacttcacccacgctaccgagaccccactccccgctgccaggtcacctaggtgaggccagtggtagagacttggtgggtgcagactggcctacagtaggcggggcctcaggcgaggaagcgtggtcatgctacagaaggggcgcagtttgaatggaggcgaaccagtttggataaggggcggggccatgcttgtgtgggtgtggtcagtcgcagagggacggtcattggggggcggagactcaggtgggcggagactcaggtgggacggacagaaaggaggagtcgtacctgaggggcggggccatcccagatgaagccagaatcgtcttggaaggggccaggctgactcggcaacgaaaaaatttagagaggcggggccacaggcgaaggggcgtggtctccccataataggcgggactagactaaagacaggacatgctgctgtttgcacgccgctttagggaacgagagacctgacaggatttgccccctctttctctcataggcagcagtcccctggacagcccccgaaacttctcccccaacacccccgcccacttctcgtttgcctcctcccgaaggtgagtccctcccctccagggccccagaaccctgggcagaccctccccaaccactgtctgggccgccatctgttctcctcctaattgcacccgagctggggcctgaggggaccagcgagtgccccaaggtctcagcgggaaggagcgcctagccttcggggcggggcctataagaaggcggggtccaatcgccgatctggaacggggaaggcggtggggctccctttgcggcaggtcgaaagcgcgtgcgccctgggcgcggggtcttagtctctccgagccttgctctcctggccaggtgtttccatagcaacaggacggggcagccaagatgacgtgcgcaagcgcagattgcgcgatgcctatcgagggactcttggtccccgaggtgggggaggacgactagggctgtttctcaaggggaggaatctcaggtttctttccaagggtctcttaaggtttctggggtgtccttaaatgaattttctatgggcctttggtgaaactgggggaggcagagaggtttctctgatgttttctggagaaacgtttctgggagtttgggcctgtctctttttctttgaactctattcattctaaaaatggtgtctaaacacctgctatgttcttaggagctgggcgtatggggtcaatgacgtcctgtctctaccctctgagtcgaatagggcaggcaggccagagaatggggatcagtgcaaaggctgatgaaggctgtgttgtgagagtcaaaggagactgtgaagacagacagctcccttgggaaagtgggggaaccgcctattgaccatggaatttagctgagggcaatagagagccaggacaaggctctgggatagggtctcacatgtttatccgcaagcggggaggactgagcgaggggactgctgggaggaagaaggaagggaggagtccaataaatggggtgtgtgtgtgtccttgtaactgtgcaaagtgtgctggtgtgtgtgtgtgattgtcactgtgtgagggattacgtgcctatgcaatggcacgagtctgcgaatgtgaacgtgtgaacatgtgtctgtaggattgtaagtgtctgtgaatatgtgagaggagcaagtcaggtatgtctccaggtgagcgtgcaatctgtgtgtgggtgtaagcgtgtgtgagtgtgtggctgtgagatagtaaacacagagtcacagtgtttactgtctctctctctctctctcttttttttttcttttcttgagacagagtctcgctctgttgcccargctggagtgcaatggcgggatctcggctcackgcaatttccgccttctgggttcaagcgattctcctgcctcagcttcccaagtagctgggattacaggcgcctgccaccacgcccggctaatttttgtatttttagtagagatggggtttcaccaggttggtcatgctggtctcgaacttctgacctcaggtgatccacccgcctcggcctcccaaaatgctaggattacaggcatgagccaccgcgcccgtccagtttactgtctcacagccacacgcttacacatgcacatgctaatgtgtgttgtgcactcacatgagcacgcgccgatgtgtgtccctgtgtgtgtgcatctgcgtgcgagtgtgaatgagtgtgtcgctgtgtgcaagtttcaatgtgtggtagtgagcgtgggtgtctggaaygtgcatctgtgtgaatgtggaagtgtggagtatgtttgggtgagtctgtgtgtccgagtgtgagtactgagtggaagcacatgtgtctataggtgagtgcatgtctggtcttgcacgcgtgattgtgcattagtgtgtgagagtgtgatatttgggtccatggatgggatagtcaatacgtgtgggtgtctgtgttgaggagtcatgtgtgagtgtgtgtcttcgtgtgtgtgaagtgtaaatgtgtgcactgccagtatgtgagcctgacctgatagtcacaccaacattaatggatttggctgcaacagtgactgtgtctgtgtgcacgagagcataaggacacaatattctatgtcagaacatgttggggggtgggacgggtcttttttctctgagaagatccaagggtctccctcagagctttctcatggagagtgttcacttgggggaaatttctagaatctctctggaaaggcttcactgggtgggggcttttccagttctcggtgtccactctgaatgataagagaggggacygtggggaggagagtggagayggatcctccctccaattcccggtgcctgcctggaagagtccctctttatccccttgattctgagggccttgaggaatcttagagtgcagatatattcccccaacccccaccctggccctggccagtggcttcacccacaccctgaggagttgggggaccgctggggccttgtggcctctgagcaccttggctgggttccagggcggacggacgccggtggtctctggcctcgctcccttcatctggctatggcaccaacacgcccagttccaccgtctcggtgagtgtggaaagtaggtgggtgggccggtgggtaaggaattcaggggccctccagcctgaagacccacacccaggccagcagtccaggctgggcttgatgacagtttagggccaggctcagtgactcaagcctgtaatcccagtactttgggaggccaagacagaaggattgcttgagcctaggagttcaagaccagtctgggcaacatagggagacccttgtccctacaaaaaattaaaaattatctgggcgtggtggtgcacacctgtggtccccactatttgggaggctgagaygggaggatcgctggagtctgggaggtataggctacagttgagctgagatcgcactgcagcattccagtctggatgacagagtgagaccctgtctcaaaagaaaaaagcaaaaaaagacagtttgggtttccccattcttcaaaggtgttcacttgtccatctattaaagagttatgggtccgccccactcagagcccaatgctctgccctcaacacatttctgggagggtccttcctactcatttctgactcactcatttacagctggtgacataaggctctgtgagttaagccatttactctgatatcagcagctgggctgggccaggccacagctttcacccagagcccacttgctcaccccttggaacacccaaagtcccttcatctgctcccttttctatccatgcccatagttcccttatccagccattggcatgatgttcagcagacatttgtcatgagattgtcatgtggtaggcgggttctgcaagctgggccagagtgtaaatattcacgcagccctcatgggggaagacaagccagtaagaaggcattcacaaaatagaatggtcagaactttgatgcaagtagcacaaggtgaggtgataggggagaggcatgtgactcagattggggggttgtcaaggaaggcttcctggaggaggtgacattgaaaccaagacaacagaccagcaggagtttggcagatggaagagaagggagaagagtgttccaggaaggggaagagcatgtgcaaacctctagaggccacagaacttgcagcatttgaaaagttgaaagtagctttgtggggctgaaaatttgggatgcgggggaggaatagagatgatgcaggcagtgaccttgatcaggctggaaccttgtcagccagggcagcaagggagattttattctaaatccagtggggaagccatggaatggttttatttctttatattaaattgtactaaaatttcagtttgaaccatttgaaattgtgattatgtaggctatagataatgcacactaattaaaaaaataaaagagatggatggggtggggaattttaaccagaggagtgagcaatgtgatgtttaaaaatatcattctggccgggcgcggtggctcatgcctataatcctagcattttgggaggctgaagcgggtggatcatttgaggtcaggagttcgagaccagcctggccaacatggtgaaaccctgtctctagtaaaaatacaaaaatgagccaggcgtggtcatggatgcctgtaatcccagctactcaggaggctgaggcagggagaattgcttgaacctgagaactggaggttgcagtgagccaagactgcaccactgcactccagcctgggtgaaagctatatgaccaggcatggtggctcacacctgtattcccaacactacgggaggttgaggtgggaggattgcttgagcccaggagtttgagaccaacctgagcaacgtgatgaaaccctgtttctacaaaaaaaaaaaaaaaaaaaaaaattagccaggtgtgatggcttgtgcctgaagtcccagctactcaggaggctgagatggaaagattgctcgagcccaggaggtgggggttgcagtgagtggaggtcgagccactgcactccagcctgggggagagagaaacaccctgtctcgaaataaaaaaaaataaaataaagcaagaggagagccaggcatagtggctcatgcctgtgacccagcaatttttttttttttttttttttgagatggagtctcactctgtcgcccaggcctggagtgcaatggcaccgtgccggctcactgcaacctccatctcctgggttcaagcaattctcctgcctcagcctcccgagtagctgggattacaggtgcccaccaccatgcctggctaatttttttatatttttagtagagacggggtttcaccctgttggccaggctggtctagaactcctgacctcagtttttctgcccgcctcagcctcccaaagtgctgggattacaggcgtgagccaccgagccctgccctcagtcccagaactttgagaggccaaagtgggagtattgcttgaagccaggagttggaagccagcctgggcaacatagagagaccctgtctctgcaaaaaagaattagccaagcatggtgtagtcccagctacacagaaggcagaggggggaagattactttagcccaggagttcaaggcttccgtgagccatgattgtactacatccctctagcctgggtgacacaaggagaccgtgtctctctctctttttaactttaaataattttaataaatagagacacagtttcactatgttgcccaggctggtctcaaactcctgggctcaaatgatcctcccrccttcgcctcccaaagtgctgagattacaggtgtgagtcaccatattcagtggagacccttctctaaaataataatgataataaagcaagaggaaacaagatagagtagggatagggaataatgggtgtgtattcagaggaggtcttcccgaggggtgacattgaagcaaaaatttgaaggatgagaaggagggatccatagtagatgtgttccaagcagaaagaatagctaatgcaaaggccctgaggaaggagcttgcctggcttgtccaaggaccatcaaggaggccactaggctgggtgcggtggcttgtgcctgtaatctcagcactttgggaggcagaggcaggtggatcacctgatgtcaggagttcaagaccagcctggccaacatggtaaaacactgtctctactaaaaatacaaaaaattagccaggcgtggtgacaggcacctgtaatcccagctacttaggaggctgagtcaggagaatcgcttgaacgcgggaggcggaggttgcagtgagctgagatcacactccaaactaggcaacaagaacgaaactccatctcaaaaaaaaaaaaaaaaaaaaaaaagaaggccactgtagctggagcagaggaagtaagcaggagagtgagaaaaatccacggcagggacccagggcaggatgaggcaggaccttgtataactggggaaggacttgggtgttcaccctgagtaaggtgggagccaccaagggttctgaacagaggaggctcatgacttgacccaagctttaacagactcactgtctccacccctgtctgtccctgtccacctgtctgtggccaagagtcccagccaagatcctaggatccaaggatcgtaaatcaggtcctgatcctggccttgcccagtgaccccatcggctttgggagtcccagctcagggtcctgagctgttggggggcccatggtggctctgaccccggccctgcccctgtccccagtcctcctgctcctcccaggagcgccttcaccagctgccctaccagcccacggtggacgagctccacttcctctccaaacacttcgggagcaccgagagcatcacagacgaggatggtggccgtcgctccccagccgtgcggccccgctcacggagcctcaggtgggcaggcatccctcctccttcgtaccaagctrgtggtcttaggacttgtgcttagagagacccctgtccccgcgaataaaagggttacatctyggggcgggggctctctgcgggcttggaggcagaggactcgacaaaatgggcttctctccccgcagccccgggcgctccccctcctcctacgacaacgagatcgtgatgatgaatcacgtctacaaggagaggttcccgaaggtgaggtgggacccgaggcggtcacggggtgaccaggcggcctgcactctcgctcgccttatccccgcgcgccccctggcggcctcggtgcgcagcgcaggctcctggcggccgcagccttcgggcacagccccgcgcccctcctccgtccctcccgcaggccactgcgcagatggaggagaagctgcgcgacttyacccgcgcctacgaacccgacagcgttctgcctctggccgatggcgtgctcagcttcatccaccaccagatcatcgagctggcccgggactgcctgaccaagtcccgtgacggcctcatcaccacggtctacttctatgaattgcaggagaacctggagaagctccttcaagacgtgagtgcacgcggaggccgggctgatctcaggctcagcaccgccagattgtgcccaatgcacccctttcttcaccccacatacattcagggagctcctaccacgttccaggcactggcgtggagctgaggactcaggggtggaagtggtcccttccctaggtctgaccgactgaagaggcaggaatttcacctcgctcatttcccttaggtctttactcaaatgtcaccttttcaggtggcttcttaggcggtccccagtcatttaaaatattaaactcggccgggctcggtggctcaggcctgtaatcccagcactttgggaggccgaggggggcggatcacgaggtcaagagatcgagaccatcctggctaacacggtgacaccccgtctctactaaaaamacacacacacacaaaattagccgggcgtggtggcggacgcctgtagtcccagctactcgggaggctgaggcaggagaatggcgtaaacccgggaggcggagcttgcagtgagccgagattgcgccgctgtactccagcctgggcgacagagcgagactccgtctcaaaaaataataatagtaaataaaataaaataaaataaaatattaaacttagccgggtgcggtggctcaggcctgtaatcccagcactctgggaggctgaggcaagtggatcacctgaggtcaggagttcgagaccagcctggccaacatggcgaaaccccgtctctactaaaaatacaaaaattagctggscgtggtggtgggcgcctgtaatcccaactacttgggaggcagaggcgggagaatcgcttgaacctgggagtcggaggttgcggtgagccgagatcacaccattgcactccagtctgagcaacaagagtgaaactctgtctcaaaaataaataaataaatgaaataaaataaaatattaaactctactcacatttawcacccactttctcctcagtttctccttgacactcagcaccatccatcatactgtgtatttttgcttattttatttcatgtctatccttctccaatgtcagccccatagttggtgagggtgggggggtggagttgtctgttctgtccactgctgtgtccctgctgtttggaacaatacccagcacacagtaggtactcaataaatgttgggtaaattgatgcttgaatgtccctttgcagtggcatgcacctgtagtcccagctagctacttaggaggctgagatgggaggattgcttgaggtcaggagcttgagaccagcttgggcaacatagcaggaccccatctctaaaacaatttaaaaaatttaagccaggcgaggttgctcacgcctttaatcccagcactttgggaggctgaggcgagcagatcacgaggtcaggagtttgaaaccagcctggccaataaggtgaaactctgtctttactaaaaatacaaaaaagttagccgggcttggtggcacgtgcctgtaatcccagctactcaggaggctgaagcaggagaatcgcttgaatccgggaggcagtggttgcagtgagccgaggttgcrccactgcactccagcctgggcaacagagtgagattctgtctcaaaaaaaataaaaataaaaataaaaataattagctaggtgtagtggcacacacctgctgtcccagctacttgagaggctgaggcaggaggatcacttgatcattcattaattccaccaatatttatttatttatttattttattttttttggagacagagtctcactctatcccactgggctggagtgcagtggtgcgattttggctcactgcaacctccacctctcaggttcaagccattctcctgcctcagcctcccgagtagctgggatcacaggcacccaccaccatgcctggctaatttttgtatttttagtcgaggcagggtttcaccatgttggccaggctggtctctaactcctgaccttaggtgatccacctgcctctgcctcccaaagtgctgggattacaggtgtgagccaccatgcctggcccccaccaatatttattaagcacctactatgggcctggcactagcctaaaagctgggaaatcaactggaaataaaacaaaaattcttgtctttggagagctgacattctattaatagcaggaagagacagaagataaacaataggcgttagaagctaacccctgtaatcccagcactttggggagctgagacaggaggctttctggagcccaggagttgcagaccagcctgggtaacatagcgagaccctgtctctacagtaaaacaagtcaaacaaacaaagacccaataggtattagggctgagaccaggaccagggtaaagcaagtaattatttcttcccccagaacattaaattaatttttgaaaaacttgaaaagtagataaatgaaaacccaacattattttaagtttacatattttatttataaccaagccagaatgtgttataattttactgtcctggttttaatgaaagcaaactcatcaataatactattttcattgaaaccattagacattttcaaagacacattaaaacacatataggttggtgcatacttttttttggctcaagttacaatatggctaggcacagcctgttggattctgtctttatttaattttctttttctttttctttttcatttgagatggaggactctctatgttgcccagggtggtcttgaactcctgggctcaagcaatcctcctgcctcagcctcctgagtagctgggattataggcatgtaccaccacatctggcttaaattttgatattttggcttatgatagatttttggcattaattttaggcttttcaagtattgcaataagatattagttttttcttttctttttttttttttttgagacagtctcactctgctacccaggctggagtgtagtgatgtgatctcggctcactgcaacctccacctccctggttcaagcgattctcttgcctcagcctcccaagtagctggcattacaagtgtgtggcactatacccagctaatttttgtacttccagtagagatggggttttgccatgttgggcaggctggtctcaaacccctgacctcaagtaattcaccctcctctgcctcccaaaatgctgggattacaggcgtgagccactgtgcccggcctctttttcttttctttttttctttttttttttttgagacagggtctctctctctgtcacccaggcaggagtgcagtggtataatcagctcactgcagccttagccccctgggctcaagtaattctcccacttcagcctcccaggtagctaggactacaggcacacactaccacacctggctaattttattatttgtagagacagggtctcgctatggttttgttgtttgtttgtttgtttgtcattgcttttgttttgagacagagtctcgctgtgtcacccaggctggagtgcagtggtgtgatcttggctcactgcaacttctgcctcccaggttcaagggattctcctgcttcagcctcccaagtagctgggattacaggcacctgccaccacgcctggctcattttgcgtttttagtggagatggggtttcaccatgttggccaggctggtttcaaacttttgacctcaagtgatccacccacctcagcctcccaaagtgctgggattacaggcatgagccaccgtgcccagcctcattatttttactgtgtggcttgggcttcagtctcctcacctgtaagrtgggacagtagcagcagtatgtactctgaggggctgagagaggggccgggctgaggcagagtgmctatgagccctgtccctctgtgtcccctgccacaggcctatgaacgctctgagagcttggaggtggccttcgttactcagctggtgaagaagttgcttattatcatctcacgccctgcgaggctgctggagtgcctggtgagggggctgggcatgggtaggggtgggttggtagaccctgggagcctgtggtgagcccactcctgccctgcctcaggaattcaaccccgaggagttctaccacctgctggaggcggccgaaggacacgccaaggagggccaccttgtgaagacggacatcccccgctacatcatccgccagctgggcctcacccgtgacccctttccaggtgccggctggtgggcgcagggggactgggggtgagcaggcccagaacccagctcgtgctcactctcagtccctccctagaygtggtgcatctggaggaacaggacagtggtggttccaacacccctgagcaagacgatctctctgaggtaaggctgggtggctaagcggtcagtaccctggttcctgggagggcagggtggggctcatctccggcttctttgycctcaggctttgtggatctcttggtcctacactctgagcctcagttttcccatccataaaatgggattaataatagctcttccagagcctggcatgctggctcatgcctgtaatcccagcactttgggaggccaaggtgggcagatcacctgaggtcgggagttcgagaccagcctaaccaacatggagaaaccccgtttctacttaaaaaaaaaaaaaatgcaaaaattagccaagcctggtggcacatgcctctaatcccagctacttgtgaggctgaggcagaagaatcacttgaatccaggaggcagagattgctgtgaactgagattacaccactgcactccagcctgggcaacaagagcgaaactgtctcaaaaaataaaataaaataaaataaaataattgctcttcccctgtgacctctttgtcatgttaaaatccatgaaacataaaatttaatttacttttttaaccattttattttatttttatttatttatttatttattttttgagatggagttttgctcttgttgcccaggctggagtgcaatggcactatctcagctcaccacaacctccatctcctgggttcaagcaattctcctgcctcagcctcccgagtagctgggattacaggcatgtaacaccacacccggctaattttgtatttttagtagagactaaaatttctccatgttggtcaggctggttgcaaactcccaatctcagttgatctgcccatctcggcctcccaaagtgctgggattacaggcatgagccaccgcgcccggcctttttaaccattttaaaatgaacaattcggggccgggtgcagtggcttaggcctgtaatcccagcactttgggaggccraggcaggaggattgtttgtgctaaggcatttgagaccagcctgggcagcataaaaaatcagctgggcgtggtggtgcacccctgtagtcccagctactcgggaggctgaggtgggaggatcctatgagcccaggaagtcaaggcttcagtaagccatgatcacaccactgcactccagcctgggcaacagggtgagaccctgtcttgaaaaatgaaattaaaaataataaagaataggccaggtgcaatggcttatgcatgtaatcctagtactttgggaggccaagatgggtggatcacttgaggtcaggaattcgaaaccagcctggccaacatggtgaaaccccatttccactaaaaatacaaaaaaattagttgggcgtggtggcacatgcctgtaatcccagctacttggaaggctgaggcaggagaattgcttgaacccgggaggtggaggttggtgtgagccaagatcccaccactgcactccagcctgggcaacagagcgagactctgtctcaaaataayaataataataataataataataataatgattaatagtaataaataaacaattctgcagcatttagtaattcaccatgctgtacagccattagatctatgtagttgcagaacttttttatcacccccaaagggaaacctcacacccattacacactccctcctcattcctccctccctgcagtccctggcaaccactaatctattttctctctctgtggaattgctttttctggatatttctttttttttttttttttgagacagaatttcactcttgttgcccaggctggagtgcaatggcgtgatctcggctcactgcaacctccgcctcccaggttcaagcaattctcctccctcagcctcctgagtagctgggattataggcatgcgccaccacacctggctaattttgtatttttagtaaagacagggtttcaccatgttggtcaggctggtctcgaactcctgacctcaggtgatctgcctgccttggcctcccaaagtgctgcgattacaggcgtgagccacatgcctggcctttttctggatatttcctataaatgggatcgtatgctctgtggcctcttatgactggcttatttcacttaacataacgtttctgaggtttatccatgttgtagcttgtgtcactgcttcattcatttttatagccgagtaatattccattgaatggtagatgcattcatccactggtgaacattgggttgtccatctttcatctgttgtaaatagtgctcttatgaatgtgggtgtacaaatatttggctggacaactgctttgagttatttaggatatacgtctagaggtggaatttcttggtcatatggtagctctatgtttaacttatagaggaatcctgcatgggctttcgagcaagctaactggctgtatgtgttaatggcagctcagcatggggaaaattgccaattctattcccaggccagccacactttggcagatgttccagatgtctagtggagagtcctaccccaatggccacacatgtgttttctctgaactgcctagtatttttcaaaaatttgggctgggcctgatggctcacggctgtaatcccagcactttgagagactgcggcgggtggatcacttgaggtcaggaagtcgagaccagcctggccaacatggtgaaaccctgtctctactaaaaaaatacataaaattagccaggtgtggtggtgcccacccgtaatcccagctacttgggaggctgaggcaggagaactgctggaaccagggagacaaagattgcagtgagccgatatcaaaccactgcactccagcctgggtgagagagtgagactccatcttgaaaaaaataaaaatagataaataaaagaagcaaaatataaaaattgaaagatttttgcttcaaaatctgggtttgggccttctcttgaaaaatcagaagttctagggctgggtgtagtggctcatgcctgtagtcccagcactttgggaagccaaggtggcaggattgcttgagcccaggagtttgaaaccagtctggacaacatagcaagaycctgtctctacttaaaaaaaaatagaagaagaagaagttctaataatactgtggtggaaccagctgagtgggggtggtcctgtgatattgggtacctgccccttcgtcatccatggcctccaccctggtctactggcccctgaagacgcttaagtttgtaatctttatttcaaattgtgtctatacagtcacacagatatatacacatacctttcctttatgtatatatttaaaaggaatctcacaatatatgccatttgtttaattttttgaataggtaatggaatgacatcactcaaaatctaaaactctaaaaaaaggtatttatctctcattgtttgtaggattctgttattccttttaatcaaacttgttaattgagtgattcaaatcttccatctccctattcatttatcttgcctgattaatctaatagtttctgagagaaatgtgaaaccttattttaagcaaattctccttgtaattctgtcaattttttttttttttttgccattttggtttttatttgattataggtaagagttccatacaatagtgtgcgaagtattgcaaacaataaaggaaaaatacagcataagatacctcttacactctgcccaattctgtcaatttttatgtcagatatttttaggctacattctttggagcatataagttcaatatttttatatatcatagatctttttatgtaatatctatgtaataaatctctttgtccctaagaaaaatcaaaataattttcaagaaagatatacagtgaaaaaaatcttactcctaccttttttccccattgccctatagccctgaaatatgattacatagttttattttgccacttttttttttttttttagacaaagttccactcttgttgcccaggctggagtgcaacagtgtgatctcggctcactgcaacctctgcttcctgggttcaagtggttctcctgcttcagccttccaagcagctgggattataggcaaccaccaccacgcctggctaagtttttgtatttttaatagagacagggtttcaccatgttggccaggctggtctcgaactcctgaccttcaggtgatccacttgccttggcctcccaaagtgctgggattgcaggtgtgagccaccacacctggcctttgccacatttttttgcacataaacgtacaatacatattgcctattgcatttttacacttaataaaatagaggactttctaaatccatagacagagagtttcctcattatttctaacagtggcacaatgtttctttatctaactaccccacatgtgtttgtttggctaatttaacgtatggattattatttccaatctcacaatgagcaagatagtagatataccatttttcacatgtgcaagtatatctgtagcataaattcaaaagtaaaattgctgagtcaaagggaacatgtatttgtaattctgatctgtatcaaacagtaatttacactcccaacagcaaagtatatatgttcacctacatatttgcccatagaggatatcaggttttggagttttttctcccaatctgctaggtgaaaaatggtattttgtggtagttataatttgcctttctgttattgtaagtgagattgagaattttttttttttgagatggagttttgctcttgttgcccaggctggagtgcaatgccacgatctcggctcaccacaacctctgcctcctgggttcaagcgattctcctgcctcagcctcctgagtagctgggattacaggcatgtgccatcatgcccagctgattttgtatttttagtatagatggggtttctccatgttggccaggcttgtctcgagctcctgacctcaggtgatccaccagcctcagcctcccaggtgatccgcccgccttggcctcccaaagtgctggggttacaagcgtaagccactgcacctggccaagaatcttttttttttttttgagacagagtctcgctctgtcacccaggctgaagtgcagtggcatgatctctgctcactgcaagctctgcctcccgggttcacgccattctcctgcctcagcctcccaagtagctgggactacatgtgcccgccaccatgcctggctaattgtttcgtattttcagtagagatggggtttcacagtgttagccaggatggtctcgatctcctgaccgcatgatccgcccaccttggccttccaaagtgctgtgattacaggcgtgagccaccgctccaggcccgaatcttttagtatgtttaagagctgtaactctggctgggtacagtggctcatgcctgtagtccctactctttgggaggccaaggcaggcagattgcttcagcctaggagttcaagagcagcctgggcaagatggcaaaaccaaaatactaaaattagcctggcatggtggcatgtgcctgtggtcccagctacctgggaggctgaggcaggagaatcacttgagccctagaggtggaggctgcagtgagcaccactacactccagtctgaatatcagagtgagaacctatctcaaaaaaaaaaaaaaaaaaaaaaaaaaaaaaagctctaactgtaatttacttacctcacccacttttttctcttcaattgttaggcttttgttattgatttttgggaactctttatatatttatatattaggatgactattttgttggtttcctgctatcttttctagtggaagaagatgagaatatgtcttcagagtcagtcttgggttcaagtcctaactttctctttcattatggcacttggatgaaggactctttcattctgtgcctcagtttccccatgtgtaaaatgaaattaaaagcatcctgctctcatgatgatgatggtggtgtggtctccatctttttcctgaagggccgcagcagcaaggccaagaaaccgccgggggagaatgacttcgataccatcaagctcataagcaacggtgcctacgggtgagccacccggggctctggcggggggagggtggyggaggccgggtgtctcggaggtgacggccggtcctcgctctctccccctgcagcgctgtctacctggtgcggcaccgcgacacgcggcagcgctttgccatgaaaaagatcaacaagcagaacttgatcctccgcaaccagatccagcaggcctttgtggagcgcgatatcctcaccttcgccgagaacccgtttgtggtcggcatgttctgctcctttgagactcggcgccacctctgcatggtcatggaatatgtggaaggtgtggctgcctgcggggctgcagggaagatggggccgtgctcactggtcagggctgcggggtggcctgcctgagccgcagtctccatattgattagtcggcctgtatgtttatccatctatttatttctccagtcattgatttgtccatccattctacctatatatttattcagtcatctattggtttatttgtttttcatttcattcagcataaaaacattcagtctgacccattatccatccatctatccttctatctactgatgtgctaatccatctgtttttccatccatacatccatgaacctgtttttatttatttatttatttattcatttattcatttatttattttttgagacagagtcttgctctgtcacccaggctgcagtgcagtggtgcaatctcggttcactgcaacctccgactcccaggctcaagcgattcttatgcctcagcctcccgagtagctgggattatgggcctgtgccaccattcatgggtaatttttctatttttagcagagacaggatttcgccatgtttgccaggctagtcttgaactcctgaccttaagtgatctgcctgcctgggcctcccaaagtgctgggattacaggcatgagccactgtgccaggcctattttattttatttatttatttttgagacaagatctcactctgttgctcaggctggaatgtagtggtgcgatcacagctcactgcagcctcaaatgcctgggctcaatcaattctcccacctcagcctcccaaatacctgggattataggtgcggaccaccacactcggctaatttttgggaggccaaggtggggagatcacaaggtcaggggttcaagaccagcctggccaacatggtgaaaccctgactctaccaaaaatacaaaaattagccagatggcacactcctataatcccagctactcacgtggctgaagtgggaggattgtttaaacacaggaagcagaggttgcagtaagccgagatcgtgctgctgcactccaggctaggctgagatcatgccattgcactccagccctggcaactgagcaagaccctgtcccgcaaaaaaaaaaaaaaaaaagttttttgttttttgtttttttttgttcgtttgttttgttttttatgcagtctccctgtattgcccaagttagtctccaactcctgggctcaagcaaccgtcctgcctcagccttccaaagtcctgggattacaggcacgagccaccgagcccatcccatatacctgtttattaatccacctttccatccatccctcacatcccgcaatttgtctttgtggttgtccatctgtttatccatccgtatgtctgtttaccattatacacctatttttcttttttttgggggggacggcgtcttgctctgtctcccaggctggagtgcagtggcgcaatctcagctcactgcaagctccacctcctaggttcacaccattctcctgcctcagcctcctgagtagctgggattacaggtgcccgccaccatgcccgactaattttttttgtatttttagtagagacggggtttcaccgtgttggccaggatggtctcgatctctygacctcrtgatccgcccacctcggcctcccaaagtgctgtgattacaggcgtgaaccaccacacccggcttatacacctatttttcctttttctttctttctttttttttttttttttgagacagagtcttgctctgtcaccaggctcgaatgcagtggcgctatctcggctcactgtaacctccaccttccaggttcaagtgattctcctgcctgagcctccsgagtagctgggattacaggtgtgtgccaccacacctggctaattttttgtatttttagtagaaatagggttttcaccatgttggccaggctggtctcgaactcctgacctcaggtgatcctcccacctcagcctcccaaagtgctgggattacaggcgtgagccatagcttgcggcccatatattgtttttaatccatccgtgcatgtattcacccaaatgttaatccatctattgtccaaaaccacacatgctgtggctattatgacacatacatgatccctggggcctcagctgtgcctcctccaagccttccagtcaaccatccagtcactcaacgaacacctcctcatcatctccctcgtgtcacatgctgtgctaggtgccagtgacacagaggagacccaggcacagacatctccccgccatggagattccattctggtctgtatagacagacaataaacaagcagagcaagccaaagagataaggacatttatttatttatttatttatggagtctcgctctttcacccaggctggagtgccgtggcgcaatcttggtgcacagcaacctccatctcccaggctcaaggattctcatgcctcagcctcctgagtagctgggactaaaggcgcgcctccaccatgcccagctgatttttgtatttttagtagagacaggggtttcaccaggttggccaggctggtcttgaactcctgacctcaggtgatcagcccaccttggcctcccaaagtgctgggattacaggcatgagccaccatgcccagccagggcatttcatagtgaggacatgaggtccatgaggctggaggaggtgatggggaggcaggcagggagcttctcagaggcctggattatgatggaataagtgacctgctagtacaaagtctcttaggtgacaatttagatttggaggagtggcaagcaggcccatggagccgaaggcaagtgagcaagggaggggagatgaggatgaaggggcgctgatgaggagggtattccagagactggaatggcattggatttcattctgaatgcaacagaaggtcactggagcattgttgtttttttctttttctttttctctctttctttctttctttctttctttctttctttctttctttcttttttgagatagagtctcgttctgttgcccaggctggagtgcagtggcgcatcctckgctcactgcaacctccgcctcccgggttcaagcgattctcctgcctcaacctcctgagtagctgggattacaggtgcccgccaccacgcccacctaatttctgtatttttagtagagatggggtttcatcatgttggtcaggctggtctcaaactccacacctcatgatctgtctgcctcggcctcccaaagtgctgggattacaggagtgagccaccgtgcctgcctttttttttttttttttttgaaatggagtctcactcacgctgtcacccaggctagagtgcaatggggtgatctcggattactgcagcctccgtctccaaggttcaagtgattctcctgcctcagtctcccgagtagctaggattacaggcgtgtgccaccacatctggcaaatttttgtacttttagtagagacggattttcaccatgttggccaggctggtctcgaattcctagccttaaatgatccatcagtctcggcctcccgaagtatggggattacaggcgtgaatcactgcgcccagccttgttttgttttatttttagtgcattgtccaggctggagtgcagtggtgtgatcacagcttactgcagccttgaactcctgggctcaagcaatcctcccacctcagcctccaaaagtagctgaaactacaggcaggcaccaccatgtccagctaatggagggttttaagaagatttgatatgatcagatttatgttttaagaaaatccatttggaggcccattatagtagcttacgactgtaatcccagcacttacagtgggagaccaaggcaggcagaacacttgtggtcaagagtccaagatcaacctacccagcatggtgaaaccctgttgttgttgtttttttcttttcctttttttttttttttttgagacagagtttcgctctggctaaactcgttgcccaggctagagtgcaatgacgtgatcttggctcaccgcaacctcctcctcccgggttcaagcgattctcctgcctcagcttcttgagtagctggaattataggtatgcaccaccacacctggctatttttgtatttttagtagagatggggtttctccatgtcagccaggctggtctcgaactcccaacctcaggtgatgtgcctgcctcggcttcccaaagtgttgggattacaggcgtgagccactgtgcccggccaatgaaaccctgtttctactaaaattacaaaaattagccaggagtggcggtgcacgcctatcatcccagctactcgggaggctgaggaacaagaatctcttgaacccgggggcrgtgagtgggcagaggttgcagtgagccgagatggagccactgcactctagcctgggtgacagagccagactctgactcaaaaaaaaaaaaaaaaaaaaaaagagaaaaagaaaaaaattaagaaaagataatccatttggctcttgtggagagagcagaatcaggagactaggaggtagatgactgctctagtccaggttcattgcagaggaggaggagagaagggggccaaatcagtatctctatggtgggtctgtgtgcacaatagatgtgctcaaatgcagattcctgggccccaccctcagagagtttctgaaaccagcaaaatctcgcagaaaagagaacagaaaaaagaaagaaatcattagctttcttggtcattggtgattgaaaaaccaatattaccttcaggaatggctggatgtaggtgctcaaaccattccatcaggaaactctccatctcttggctctgtactcccacatgtgggcttccttctagacaagccctcatgtagcaaggttgccatctagcagatctcagcttacattctatgagcttagcaattcttacaggaaaagagtgaaaattccaagggctaactcactggagcaacttgggttacatactgccccggttgctgcacatggaaggaaatctagcctttgtaggataaaaaggaaatagatattgagaaactgaaataccaatgccaattacagtaaatctggcagaggggcagakgcagtggccaacactttgggaagctgaggcaggaggatcctttgaacccaagagttggagaccagcttgggcaacacaatgaaactcgtttctacaaaaaactttttttttttttttttttgagacggagtcttgctctgtcacccaggctggactgcagtggtgcgatcttggatctctgcaacctctgcctcccaggttcaagccattcttctgccttagcctcccgagtagctgggattacagccgtctgccaacaagccaggctaactttagtattcttttttcagagatggggtttcaccatgttgaccaggctggtctcgaactcctgacctcaagtgatccacccgccttggcytcccaaagtgctgggatttcaggcstgagctaccatgcccagccttgaacaattttttaaaaatcagctgggcatggtggctcacatctgtagtcccagctactcaggaggctgaagcaggaggattgcttgagctgggaggttgaggatgcagtgagctgtgatcttgccaccgcactctagactgggcaatggagtaagaccctgtctcaaaaaaaaaaaaaaaaaatctagtgaagaccaagaatctgcatctaaggcttccagctccaaggttcagacaccaggagatagagggctgtgcttccagatgcagttgataagtgggtagcctttgttccccaactaaacctcacctctaccaacaactgcctgcatgacccatcctttctttgagtctccatccctttgtgtataagatgagctgatgacaccaactttggaggatggctaagaggacaagaagaacccagtagaggacctggagggagggaggcccctctcagagcctcagtttcccttatctataaaacgggtacaacataacatgagaagttggtgctatggtgcatgtccagagagaggaatgcctccctttttatrcgggcccayttcctggcctgcaggcggcgactgtgccaccctgctgaagaatattggagcgctgcccgtagagatggcccgcatgtactttgctgagacggtgctagccctggagtatttgcacaactatggcatcgtgcaccgcgacctcaagcctgacaagtgagctttgatctttcccatcactccctctgtccctcgggaggccaggaggcagaatggacgggcctcatccctgagatccccacctgtgcctacagcctccttatcacctccatgggtcayatcaagctcacagatttcggcctctccaagatggggctcatgagcctcaccaccaacttatatgaaggccacatcgagaaggacgcccgagagttcctggacaaacaggtgtgtgtgcgggcatgggggtcgctgagggtggagtgaccctgcaggacctcgggaacccagggcctggtggggggcacagctctcccttgagggccctcctctggctggggcgtgggctgacagcctgcccccaggtgtgtgggaccccagagtacatcgcgcccgaggtcatcctgcgtcaaggctacggcaagccagtggactggtgggctatggggatcatcctctacgagttcctggtgggctgtgtgcccttcttcggagacacaccagaggagctatttggacaggtcatcagtggtacgtggcttgrcagtgtacaggggcagagtgtggtgtgcacggaragatggacaggctcagggttccagggatttcaaaagcgaccccccagaggatcgcttgcactcaggaggtcaaggctgcagtgagccatgatcgtgccactgcactccagytgggtgacacagtgagatcctgtgtccaaacaacaacaacaamaaaaaccgcccctaagttccgttttgttttgcagatgacatcctgtggcccgagggggatgaggccctacctacggaggcccaactcctcatatccagcctcctgcagaccaaccctctggtcaggcttggggcaggtaagtccgccatgcagaggagctgagggcccactgatagagagcaggcctccaaaaccccaggcccagcctgtgctgtggccccggggcggaagacatggggggcggggctgggctgctgggttggccatcagctgtggctggaatcccttccgtcccaggcggcgcttttgaggtgaagcagcacagtttctttcgagacctggactggacagggctgctgaggcagaaggccgagttcatcccccacctagagtcggaagatgacactagctactttgacagtgagctgggacaccaggcacgacctgggtcgaggggtgggatccgggaagagggaccctggggtaagtaaagcctgggatagggcctggctaagtaccaagatgtgatgcctaggtgcgaaggtggtattttggtgggggcggggccaagtggggcggggctgacatacaggcggggctcaggctgaaatgtaggtaagaacctgagattgggctaggtgtggggcctggcctgggtgagttgtgagtgtgggcctggaactgaactagagagaggtactagcgctcagaatggcctggggtgatgccagggtgcagagcactgtaggtggagcgtggcctctttggaggcggggctagacggtgccactgagaatggggcaaggaccttgcctgggagcggagcctaaattaaatacactaatgaggcaggggcgtggcctgacctgaagacttgtaaacccgtcttgaaccaggactgggctcctgtggggatgtgatatgaggaggaaccccgtaccctcagtcacagcccatacccgctccccagcccgctcagacaggtatcaccacgtgaactcctrtgacgaggatgacacgacggaggaggagcccgtggaaatccgccagttctcttcctgctctccgcgcttcagcaaggtgggccaagtctgggtgtgggacagggcgagaccccaggagggatggggcttggagagacagtgagaaacaggttccctggtgcccaaggtctcaggagcgggaagttattgatggggcgggagtctggaaggtggtaaggccacgcaagaggcaggttcgggagtctatgggacgggcctttggcactgagtggaatctaacaggaatcaggacagttgtgcagattgaggccatggtggggcggggctaggtgtgggtggggcggggtcaggacgtgggaatgaggccagcagcgaaggcggagtaaagcccagcgaagtcttgcttttatttatttatttttattttttctaataacgggcagagaagccataggccttgctttgagaagcaacttgtagaggcgtgcagggcctagcctgggctaaggagacataaattaagggggttgctgggaagatggggctgtgtagagagcagattggtcagggcatcgtcggggcagagcctagaataaaacgcagtgcctaactttgtggtgtggggcctgaactgaagaattgtaggttgggggatcatgcacaattgggcggagccaggcctcggagggtggagtgcgttttgcgggggatccactgccaggaagctgattagctccggagtgaaagtggaacccgggctggacttgcctcccaccaccacctacaggtgtatagcagcatggagcagctgtcgcagcacgagcccaagaccccagtagcagctgcagggagcagcaagcgggagccgagcaccaagggccccgaggagaaggtggccggcaagcgggaggggctgggcggcctgaccctgcgtgagaagacctggagagggggctctccggagatgtgagcaggggaatggcggagtttgggggcggggtcgaagggggcgtgtcttccataaccacgccccctccatgcagcaagcgattctccgcgtccgaggccagtttcctggagggagaggccagtccccctttgggcgcccgccgccgtttctcggcgctgctggagcccagccgcttcagcgccccycaagaggacgaggatgaggcccggctgcgcaggcctccccggcccagctccgaccccgcgggatccctggatgcacgggcccccaaagaggagactcaaggggaaggcacctccagcgccggggactccgaggccagtgagtgccctatcgtgctgccttccccaatcttccccaatgtcctactggtcatatagtgagcatcccacgagcctggtgctgtttatgaaagatctcaggtcctattcacattgcaatttgggatttttttttttttttttttttttgagacagagtctcactccatcacccaggatggagtgcagtggcgtgatctcggctcactgcaacctccacctcccaagttcaagtggttctcgcacctcagcctcccgagtagctgggattacaggcgcgcgccactacccccggctaatttttgtatttttagtagagacagggtttcwtcatgttggcaaggctggtctcgaactcctgacctcaagtgatctgccttccttggcctaccaaagtgctggggttacagtcgtgagccaccacacccagcccaatttgggattcttaacattagaaacaccccaataccatggtcagtcagtgatacagaccgatacagactatgtctctatatgaggagcagtgaggcatgcaggttacctgctcagatgaaactcaccatccatcaagggtaaaaagtggaaagagcattccaggcagggaaacagtatgtgggaaatccctggccttggactaattcctaacacacttgctttctgttgcagctgaccgtccacgcccaggtgacctctgcccaccctcgaaggatggggatgcatcaggcccaagggctaccaatgacttggttctgcgccgggcgcggcaccagcagatgtcaggggatgtggcagtagagaagaggccttctcgaactgggggcaaagtcatcaaatcagcctcagccactgccttatctgtcatgattcctgcaggtaatgctgggccccacctggcaggggaggggctgccccccatttgaggcaggacagaccaatgaaaatgctgcattttccctgtccaccgtgattggctccaggctggaccaatgagaggctgctctgccactgccttgggaggagggaggagcagatacagggagatgtctatcttcttggttctgatttctgaccatggttgtgtgtctgtagtggacccacatggaagttcaccccttgctagtcccatgtctccacgatctctgtcctccaacccatcctcacgggactcctcacccagccgggactactcaccagctgtcagtgggctccgctcccccatcaccatccagcgctcgggcaagaagtatggcttcacactgcgtgccatccgtgtctacatgggtgacacggatgtctatagtgtccaccacattgtctgggtgagtactcatgggtggagtctccatcacagagtggagggtggtggggaaaaggcccctccagctcaaaccagttagcctgggtgagacacctctgtgaccctctatgcctcttccctctctaaacctgtttcttttttcttttacttttttattttaggcggagactcactgtgtcgccaggccggagtgcagtggcaggatctcggctcactgcaacctctgcctcctgagttcaagccattctcctgcctcaaccttctgagtagctgggactacagacaggcgcgcgccaccacgcccagctaatttttgtatttttagtagagacggggtttcaccatgttggctaggatggtctcaatctcttgacctcgtgattcacccacctcggcctctcaaactgctgggattacaggcgtgagccacggtgcctggccgagactgtttcttcatctgcaaaatggggagaataggccaggcgcagtggctcaggcctgtaatcccagcactytgggaggctgaggtgggcagatcactggaggtcaggagtttgagactagcctggccaatatggtgaaaccctgtctctattaaaaatacaaaaattgggccgagcgcggtggctgtaatcccggcactttgggaggccgaggagggtggatcatgaggtcaggagatcgagaccatcctggctaacatggtgaaaccccctctctactaaaaatacaaaaaattagctgggcatggtggtgggcgcctgtagtcccagctacttgggaggctgaggcaggagaatcgcttgaacccgggaggcggagcttgcagtgagccgagattgcgccactgcactttagcctgggcgacagagcaagacaccatctcaaaaaaaaaaaaaaaaaaaaaaaaaatggccaggcgcggtggctcacgcctgtaatcccggcactttgggaggccgaggtgggtggatcacgaggttaggagtttgagatcagcctgaccaacatggtgaaaccccatctctactaaaaatacaaaaaaaattagccaggcgtggtggcagatgcctgtaatcccagctactcaggaggctgagacaggataatcgcgtgaacccgggaggcggagcttgcagtgagccgacatcgcgccactgcactccagcctgggtgacagagmgagagactccgtctcaaaaaaaaaaaaaaaaaaaattagccggaggtagtggcgcatgcctataatcccagctacttgggaggctgagggaggagaatcgcttgaacctgggaggcgggtgttgttgcagtgagccaggattgcgccacagcactccagcctgggtgacagagtgagactccgtccaaaaaaaaaaaaaaaatgtggggggaggaataataactatttcacaaggtgttatgaggattctaatgcatgcagagctaagtgtcctgcatataagtttaggagctttccttgttaccaatcccactaaccctgtccctatggggtgctcttttcccagcatgtggaggaaggaggcccagcccaggaggcaggactctgtgctggggacctcatcacccacgtgaatggggagcctgtgcatggcatggtgcatcctgaggtcgtggagctgatccttaaggtgagtgcagggaaggaggcaccctgggcggagggtgggggaggcctgagcagcccctagcagagcattttcccgcattcttcccccagagtggcaacaaggtakcagtgaccacaacgcccttcgaaaatacctctatccgcattggtcccgcaaggcgcagcagctacaaggctaaaatggctcggaggaacaagcgaccctccgccaaggagggccaggagaggtgggcacagccgtaaacagcctggtctttgagcagtgggtggaacttaggcgggaggggcacagatgaggatggagaagggaagagcacgggaaaggtggcgggaacaaatgaccaacaagcaaagggaagaggacaattaagaggggctgcgggctgggcgcggtggctcacgcctgtaaccccagcactttgggaggccgaggcgggcagatcacgaggtcaggagtttgagaccagcctggccaatatggtgaaaccccatctctactaaaaatacaaaaattakcctggcatggtggcgctcgcctgcagtcccagctacttaggaagctgaggcagaagaatcccttgaacccgggaggtggatgttgcagtgagccaagattgtgccactgcactccaacctgggcaacagagtgagactccatctcaaacaaacaaacaaacaaacaaacaaaaaaagaggggctgggatgagtcacacctgtaatcacagcactttgggaggctgaggcagaaggatcacttgagcccaggagtcaagattaggggcaacatagagagaccccatctctacaaaaaacttaaaaaactagttgggtttggtggcacacacctgtggtctcagctactcggaggctgaagtgggaggattgcttgagcctgggaggtcgaggctgcagtgagctatgatctcaccactgcagtccagctgtgacaacagagctagactctttcaaaaaaaaaaaaaaaaaaaaaaaagaggggctgtaaaagtggaaggagccaagaatggaagctgtgccaartttctaggatcagagaaaagcattgtaggagggtcttgcacatataggcaggcccaggagatgtgaactggaaagggagatgtccagagacggagggggtccaggagatggtcctatcctgttagatgtgtttagacagaactgggaaaggctagaataagaaatgtctatctggaatgagcatgccaggcaaggttcagccaactgaaatcctattttcccttatagataggaggagctaggtgggaggtgggtggggccagaagggtattctgtttgtttgtttgtttttagtattctgttttgatcagtgagtttggcccagacaagtacagggatttgggtgagaggagccagacggggttgagataagtacatttcttcccactcttataggtgggttgtagtggaagaggcgggactagaggcaggtgggaccaagttggttttgtttggatgtgtttctagcctggactgggagtggccaaaaggttgggcaggacctgaagtgggaggagggaggagccaagcagcactgagttaagggaagttctgtcttgataggtggsttgtagtgaaagacggagggactagaggggtgggcaggactagaagaggttgtttttggccgggcgaggtggttcacacctgtaatcccagcactttgggaggcygaggtgggtggatcacctgaggtcaggagtttgagaccagcctgaccaacatggtgaaaccccatctctactaaaaatacaaaaattagctgggagtggtggctcactcctgtagtcccacctactcaggaggctactcacgaagctgaagcacggtaatcgcttgaacccgggaggtagaggttgcagtgagccgagatcgtgccattgcactccagcctgggcgacaagagcgaaacttcgtctcaaaaaaaaaaaaaaaaatggttttgtttggatgagtgtttgtagccagaattgggagtggcctaaagttgggcggggcctgaagtaggaggagctaaaggaagttctatcttgataggtggattgtagtggaagagggaggagctagagaggtgggcggggcagaacaggttggttttgtttggatgcttgtttctagcttggactaggagtggccaaagggggtgggtggggactgaagtgggaggagccaagcagcactgagctaaaggaagttctttatcttgataggtgggttgtagctggagagggaagggccagaaggggtgggtggttaccgttgtgaggcsgtgaaatgggaggagccctgagctctggcgtccaggtcaaggacgcttggccccctccctgtcccgcagcaagaagcgcagctccctcttccggaagatcacgaagcagtcgaacctgctgcatactagccgctcgctgtcgtcgctgaaccgctcgctgtcatccagcgatagtctcccgggctcgcctacgcacgggctgccggcgcgctcgcccacgcacagctaccgctccacgcctgactccgcctacctaggtattacctcctgcacctgcgcggggaccgagcagcgcggggtggcctggctggtgcttgggctgtactcactcgcttcacctcctgtctcccgcaggcgcctcatcccagagcagctccccagcctcgagcacgcccaactcgcctgcgtcgtcggcrtcgcaccacattcggcccagcacgctgcacggactgtcgccaaagctccatcgccagtaccgctctgcgcgatgcaagtcggccggcaacatccctctatcgccgctggcacacacgccgtcccccacgcaggcgtcaccgccgccactgccgggccacacggtgggcagctcgcacactactcagagcttcccggccaaactgcactcatcgcctcccgtcgtgcgcccgcgccccaagagtgccgagccccctcgctcgccgctcctcaagcgcgtgcagtcggccgagaagctgggagcctctttgagtgcggacaagaagggcgcgctgcgcaaacacagcctcgaggtgggccacccggatttccgcaaggacttccatggcgagctggcgctgcatagccttgccgagtccgacggtgagacgcccccagtcgagggccttggcgcgccccggcaggtcgccgtccgccgcctgggccgacaggagtcacctttgagcctgggcgcggacccgttgctgcccgagggtgcctccaggccaccagtgtcgagcaaggagaaggaatccccggggggcgccgaggcgtgcaccccaccccgcgcgacgacccccggtggccggaccctggagcgggacgtcggctgcacgcggcatcagagcgtgcagacggaggatggcactggcgggatggccagggctgtggccaaggcggcgctgagcccggtgcaggaacacgagacaggccggcgcagcagctctggcgaggcgggcacacccctggtacccattgtcgtagagcctgcgcggcccggggctaaggctgtggtgcctcagcctctgggcgcggactccaaggggttgcaggaacccgcacccctggcgccttcygtgcccgaggccccccggggccgggagcgctgggtgttggaggtggtggaggagcgcaccacgmtgagcggtcctcgctccaagcccgcctccccaaagctctccccggagccccagacaccctccctagccccagcgaartgcagtgcacccagcagtgcagtgaccccagtcccacccgcatccctcttgggctcrggcaccaagcctcaagtggggctgacctcccggtgccctgctgaagctgtgcccccagcaggcctgaccaaaaaaggagtgtccagtcccgcacccccgggaccatagccaagggggtcatcggccccgcgctgtacagcctccgtatacatatgtacacatataaataaagtgcgtccgtgctgcgtgagttttctggggctcactcctctccaggcaaggcgagacatcacacgaccccacccccatgcccaggtgctttttgggaggtgggactccagttctggttaccatggagagtggagggaattttggatagacacctcctgtggtcccacttctggtctcacctctgcaccaactgcccccaaacctttagggggagaattgaagctgcgatgctcttgtgtcccagcgcccacctgaagagaaggttaacagcctcgtccaccaatttccatttatttactcctcaacaatcctgatggcaggtattatgtttcccattttgcagacaggtagactgtgtcacagagcggttaaggcacacaatcaaggtcatacagctaggaaggggatgaactgggattcaaaatcaagtccaaactggttcctgagcccttagattttttattttttatttttttgacacagagtctcattctgtcacccaggctgaagtgccgtggtgttagctcagctcatgacaacctctgcctcccgagttcaagcgattctcctgcctcagcctcccgaggagctaggaccacagacgcgtgccaccatgtctggctaatttttaaatatttttaatggatatggggtttcaccatgttggccaggctggtctcgaactcctgacctcaagtgatctgcccatctcagcctcccaaagtgctggggttacagatgtgagccactgcacccacccgtcccccgccccccctttttttttgaaacagagtcttgctatgtgacccaggttggcgtaatcatagttcactgtgaccatgatctccctggttcaatcgatcctctggcttcagtggctgggactacaggcatttatcaccgtgcctggctaactttttttaagttctagtagagatgtggtctcactatgtagcccaggctggtctcgaattcctgagttcaagtgatcctccctccttggcttcccaaagtgctgggattacatacgtgagccactgcacctggccataagggttagatcttataagctctgctgggcttcctggccatgccattacagggctggtagttcttcaccagcggctggaaggctttccagagggctggcagctgggcacacagtgtgcccccaccccgttgctcctctccctggttccgattcatgtcacccacgcaggtccagggcccttttggggacacgcaccatttggagtggtcctctgtgctgttgaagcttgggccggctggtccagggaaagctatctggttcacattcagaacctgccagatatccgagcagttagagggcaggatgcctacagttttgtgccagaactggacctgcaggttggtaccaagggctgctgccaaccagccggagtacaggtctgcaaaggatggagagagggcacaggtagggtcagggccactgcgagggagtccctagtccacttcccctctctcagctcagtttccatatttccttttttttttttttttttgacatggagtcttgctctgtcgcccaggctagagtgcattggtgcaatctaggctcattgcaacctctgcctccgaggttcaagtgattctcctgcctcagccttctgagtagctgggactacaggcatgcacaaccatacccggctaattttttaataaagaggggtttcaccatattgaccaggctggtctcaaactcctgatctcaagcaatccgcccacctcggtcttccaaaatgctgggactacaggtgtgtgtcaccgcgccctgccacagtttccatatttctgagctcagttgtcaattcccagtcctgggaatgatgacattaatattaattgcccttcccaaatttgtttttgagacagagtctcactctgtcgcccaggctggagtgcagtggtgtaatctcggcacactgcaacctctgcctcctggtttcaagcgattctcatgcctcagcctcctgagtagctgggattacaggtgcccgccaccacacccggctaatttttgtacttttagtagagatggggttccaccatgttggccaggctgttctcaaactcctgaccgtgtaatcagccagcgccctccaccatgcccagataatttttgtacttttagtagagatggagtttcaccatgttggccagactggtcttgaactcctgggctcaagtgacccacccgccttggtctcccaaaatgtggggattacaggtgagccaccgcgtccggccctgagtgtttttaattaattaacttatttattttgagactgggtctcattttgacaccccagctggagtgcagtggcaggatcatgactcacttgcagcctcgacctcctgggctcaagctgttctcccacctcagcctcctgagtagtggggactacacgtgtgtgccactatgccccactaattaaaattttttttgtagagatggggtcccgctgtgttgcccaggctggtctcaaactcctgggctcaagcaatcctcctgcctcgactgggattacaggtgtgagccactgtgcctggcctatttatttgtatttatttatttatttatttattttgagacacagtctcactctgtcacccaggctggagtgcagtggcactatcttgactcactgcaagctccaccttccgggttcacgccattctcctgcctcagcctcccgagtaactgggactacaggtgcccgccaccatgcctggctaatttttgcacttttagtagagacagggtttcaccgtgttagccaggatggtctcgatctcctgagctcgtgatctgcccacctcagcctcccaaagtgctgggattacaggcatgagccactgtgcccagcctatttatttatttttaaataaagacagggtcttgctctgtcacccaggctggagtgcagtggagtcattatagctcactgcagtctgaaactctgggctcaatttatcctcctgcctcagcctcccaagttgcttggctaatttttaattttgtagagatgaggtcttgctatgtttcccaggcttgtcttggatgcctgtcttcaaatgatcctcctgcctcagcctcctaagtaactgggattacaggagtgaggcaccacctctggcacccaaatgacttacaggtaccacttcattcacaattttttaagtagatgtcagtatccccatttttcagatgagtagaccaaggctcaggtgaagttatacatcacacagcaaaacccagggtttgaacccaggtctgttcactgatcatgtgattatagctcccaaacagacctggtctctaccgctgacttgaactcagccatggccacaccagtcaccctgtctgcagagaaggagctctccaaccctcaaccttgagactcaccatctccaaatttgctgaacttggcaaagctctggaaaacagccccggcctgggatgtgagtgtgatgctgctgttccagggttcttggctaacgtggtggcccttgaccacattctccaagtcggggaattcctgggcaaagatcccttccagctggtagttatagacccaggggtaggtgtaggtcagctgcttgcctggaggacaaggggaggaggaaatgcaagatcgttccaggttctggtcagtaaacccaggactcatcctgtgtccctgactcgacttacccatcttcgagaactgagcgaagggaaaagacacacagagcagggtctgcccgtaggtacaggcgctatgaggccagctgtatgcagcagaggaggccggtggagggaagttaggtacactgtggaccagccagaagcccccatcgtggtcaaggagcaggacacctggaccaaaagaaggcattaggggaggtcgggcgcagtggctcacgcctgtaatcccagcactttgggagaccgagacacacagatcacctgaggtcaggagttagaaatcagcctggccaacatggcgaaaccccatctctactaaaaatacaaaaattagctgagcgtggtggtggacgcctgtaatcccagctactcaggaggctgaggcaggagaatcgcttgaacccaggaggtggaggttgcagtgagctgagatccaccactgcactccagcctgggccacagagcaaaatttcatctcaaacataagtaagtaagtaagtaaataaataaataaataaataaataaataaaaatttaaaaaaagaaggcaggccccacgcagtgtaatcccagcactttgggaagccgaggagggcggatcacctgaggtcgggagttcaagaccagcctggccaacatggagaaacctcatcactactaaaaatacaacattagccgggcatggtggtgcatgcctgtaatcccagctactcgggaggctgatgcaggagaatcacttgaacccaggaggcggaggttgcagtgagccgagattgcaccattgcactccagcctgggtagcaagagcaaaactccttctcaaaaaaaaaaaaaaaaaaaaaggcaattagagggtattgctccaggcctcccagcaagctcatctgcaatcaggaacaccctcagtttgcagcggggcttagagagggtgccagcagtgttagaaccacagctgagctcagtttttgcaggcataaattcttatagtccagaataacgccaagagtaatgtaaggtagggaaacaggccaggtgtggcggctcatgccggtaatcgcagcacattaagaggccaaggtgggtggattgcttgaaccaggacttagagaccagcctaggcaacatggcaaaagcccactctacaaaaatacaaaaagtaggccaggtgtggtggctcacgcctgtaatcccagcactttgggaggccaaggcaggtggatcacctgaggtcaggagttcaatatcagcctgtccaacctggtaaaaccccatctctactaaaacatacaacatttagctgggcatggtggcgcacacctgtaatcccagctactccagaggctgaggcagaagaatcgcttgaactggggagatggagattgcagtgagctgagattgcaccaccgaactccagcctgggtgatggagagagagtgccgcaaaaaaaaaaaaaaaaaaaaaagccaggcgtggtggggggtaccggcaggcccagtacttgggaggctgaggtaggaggatcacctgagccctgggaggtcaaggctgcagtgagctgtgatactgcactccagcctaggtgactgggtgagaccttgtctaaaagaaaataaaataggggaaatagatgcccaaggtctgacaggggagatctcccaccccactatggaggtcaggggttagcttggaaaaatgcataggaactcggctgggcagggtggctcattcctgtaatcccagcactttgggaggccaaggcgggtagatcacttgaggtagaaaccaggagttcgagaccagcctggccaacatggtgaaacctcgtctgtactaaaaatatgaaaattagcctggtgtgatggtgcgcctttaataccagctacttgggaggctgagacaggagaattgcttcaaccccagaggcagagattgcagtgagccaagattgtgccactgcactccagcttgggtgacagagcgaactcccaccgtctcaaaaacaaagaaaaaaaaaagttggggggaatagatgcccagggtctgacagtgcagatctccccgaccaccccatgcacgtcaggggttaccttggaaaaatgggacccgagtctctccccagcccccaatccaggcctcacccttcgtgtgcccacgcatggaagagtcctgagccttgctgggttgaggcggttggtcattgtagagcaggaaggcgagctgcgggcggataaacggaggcaacgtgaaattcctcccaggcagggcagccctagagtttcgcccctagttgg

SEQ ID NO: 96407 - DNA, 59064 bp, Homo sapiens
  misc_feature (1)...(59064): n = A,T,C or G
nnnnnnnnnnnnnnnnnnnnnnnnnnnnnnnnnnnnnnnnnnnnnnnnnnnnnnnnnnnnnnnnnnnnnnnnnnnnnnnnnnnnnnnnnnnnnnnnnnnnnnnnnnnnnnnnnnnnnnnnnnnnnnnnnnnnnnnnnnnnnnnnnnnnnnnnnnnnnnnnnnnnnnnnnnnnnnnnnnnnnnnnnnnnnnnnnnnnnnnnnnnnnnnnnnnnnnnnnnnnnnnnnnnnnnnnnnnnnnnnnnnnnnnnnnnnnnnnnnnnnnnnnnnnnnnnnnnnnnnnnnnnnnnnnnnnnnnnnnnnnnnnnnnnnnnnnnnnnnnnnnnnnnnnnnnnnnnnnnnnnnnnnnnnnnnnnnnnnnnnnnnnnnnnnnnnnnnnnnnnnnnnnnnnnnnnnnnnnnnnnnnnnnnnnnnnnnnnnnnnnnnnnnnnnnnnnnnnnnnnnnnnnnnnnnnnnnnnnnnnnnnnnnnnnnnnnnnnnnnnnnnnnnnnnnnnnnnnnnnnnnnnnnnnnnnnnnnnnnnnnnnnnnnnnnnnnnnnnnnnnnnnnnnnnnnnnnnnnnnnnnnnnnnnnnnnnnnnnnnnnnnnnnnnnnnnnnnnnnnntcttggtactagtgggtcttttttggaagtaaataattggaagaattatgttgcccaacatgaagaagggaaagtctcagtctcttcgactgagcgactcaagggggtagattcaagagagagtccagagcaaagaaacaaaaaatgcaaagcgttttgggaagaggaactagcgggaggaggcctctggaaaggatactgatgcccttgaatgctagggcatgtgtagtaaaaaacagaaacaaaaacaaaccctggtctcccctaaaattcttcaataagatgttttacttactcgagcaaagtattttattttactcgagtaaaataaaatttcttgctcgagtggaattcttttgtgggaaaatgaagaaattttggatcctacttgaggcctgatcagggtgggtggaaacacagactgcaaagggagtacctactatatgggtttaacgaaaaatcttatgggtaataagggaggcgagtcatggttttaaaaaattaggttgcatttctatggtacttttaatactgtatagggaattaatacatagtcgtattgatcttccgaactaccttgtgaagtaagtggtatcccaggtttacaaatgaaaaaactgtaactcaaagagatgtattaacctaaccaaggatatgttagaagacaggaatccatgtctttctactcctgagtccagtgctccttctactatatgattgctacctccactagtcccattaaatcagctgtatttctttaggattatgtctttaaagtctatctttaaaaatatatagatctccttcccaacttctgaaacctagctgttttttcccaaagacagaatcacttttattttatgcatttctactggcagctaccccctcaacattgctaaatgtttatgccactggataccatgataacagtgaaattaagtttctgatatctctgctagagtgaatttgtaattaagtttttagctttgaaaaaaaaattagatcctaagaaaagttgcaggaactcccatatattcttcagctagattcagccattgttacctttttctcacatttgctttatctttctttacatatcttacctataatacacatattatattcctagtattttctgttgtaaggccttttgagagtagattacagatatcatgactcttcagtcttagaaacaagacattcccttacttagtcccagtttaattatcaaattcaggaaactgaaattgacagaatactattatttaatatacaaattttgtttaattcccaatactgtcctttatactaatgatttttttttctaaattcaagatcaaatcttgataatgtcttgcatttgttatgtttctactttctttaaatctttaaatcgtcagccttggtctttcacgacattagtattttttaaatgtatagtcccatcggtttaaagcagggtttctcagccttggcacaattgaacttttgggctgaagaactccttcagcccgtcaggccatcagatgattgcagccttggccaatatctgactgcaacatcaagagagatgatgagccagaagcacccagctaagccacttctaaattcctaaaccacagaagctatgacagataataaatgattgttcctgttttaagccactaaatttgatgtaatctgttacacagcaactgataactaatataacagccaagtaaagcatagagagttggagtgtggagtttcagaggaaaggtgtggaagtttgataaccttaagaatataggctgggcgtagtggctcacacctgtaatcccaatattttgggaggccaaatcgggagaacagcttgagcccaggatgtttgagaccagcctgggcaacacagtgagactctgtctctacaaaaacatgtttttcttgttgttgtttgttttttgtttttgtttttgttttttaatttgctgcatgtagtggtgcatgctgtagtcccagctactcaggaggatgagctgggaggatcatttgagcccaagtgtccaaggttgcagggagcggtgatcacaccactgcactccagtccaggcaacagagtgagacaccgtctttaaaaaaaaaagaaaagaaaattaaagaagttcgggcacggtggctcacgcctgtaatcccagcactttgggaggccaaagcgggcagatcacgaggtcaggagatcaagaccatcctggctaacacagtgaaaccccgtctctactaaaaatacaaaaaattagccgggtgtggtggcgggtgcctgtagtcccagctactcaggaggctgagtcaggagaatggcgtgaacccaggaagtggagcttgcagtgagccgagatcgcaccactgcactccagcctggtgacagagctagactccgtctcaaagaaaaaaaaaagagagagaaaatatagatggaattcaaagctctgagactaaggctgggcgtggtgcctcatgcctgtaatcccagcactttgagaggccaaggccagtggatttcttgagctcaggagtttgacaccagcctgggcaacatggtgaaaccccatctctacaaaaagtacaaaaattagccagacacggtggctcgtgcctgtaggtcccagctactggctgaggtgggaggatcgcctcaggctaaagcctgagaggttgaagctgtggtgaatcgtattcgcaccactgcatcccagcctggctgggtgacagcaagaacctgtctctcaaaaaaaaaaaaagaaaaagaaaaaaaaaagctataagacaggatgaggtaattaaaaatgtgactgaaagagtgaaggtagaaatatgaggatcaaaatacataggagaaagaatattttgtgaatatctttcattttaacatgcatttaactctccaccaggtggtgttttatttctagaaccttgttaggcttggtatctaacatgaattcaacacatgttaaattaatgggtgaatgaatgagaacaaaagtagaatgggatttagactgtagttaaggaaaatgaataaatacattgaatagctatggcactatgtatttagatgatagattgctgtttggatactaaaagtacaaaaccatccccttgcctctactctttccctattttagtgtaaagaaaagttttgaaggttaggtatggatactatatattctggaaaatttgaaacttgcaatccaattagtggtgcctaagaaccttcatttacatgtgaaagtagaatcaaaaatagagccagaaacctttagtaaaaactaaaacacttgtagtacctccccagtacacttcagcaacaaaggccttgtttctgcactggcagtttgttcttatctttgcccctgctaccattcctgtgccccagatatttgcataactggctgctgcttatttttcaaatctcagatcaaataccatcttagagagctcttttcagatccccagtctaaataagctcacactatcctcaagtccctctatcacatcaccctgccttaacttttctcatggcacttctggctggctgaaatctcatttgtctttaacaactaacttaagattcaaccgtcctctaggatagaagttcctgtctgtcttgctcacaagtctagagcaatgcacatagtaggcaatcaggatgtgtttgttgaataaatgaatgaatcctcactggcactgatacgattttaaaaatgtttaatttgcaggccaggcacggtggctcacacctgtaatcccagcactctgggaggccaaggctggcagatcacttgaacccaggagttcaacaccagcctgagcaacatagtgagaccccatttcttaaaaataaataaaataaaaatgtttagtttgcatttcttggattaagagtaaagtttttacttaagaatgtctgtgtttcttcatttgataccctttccatttcttctgtaattaaaaaaaaccttcacccatttttctattgggtgtttttttttttcttatcaatttaaatgaacttaagaggccaggcacggtggctcacacctgtaatctcagcactttgggaagccaaggtgggtggatcatctgaggtcgggagttcaagactagcctgaccaacatggagaagccctggctctactaaaaatacaaaattagctgggcatggtggcacatgcctgtaatcccaagctactcaggaggctgaggcaggagaatcgcttgaacccgggaggcggaggttgtggtgagctgagatcgcgccattgcactccagcttgggcaacaagagcgaaactgcgtctcaaaaaaataaaaataaaaaataaatgaacttaagatactaactctgtcaggtttgggaccaatatttttcccaatgtgttttattgattttgtccctgtttccttgggaagaagttctaaattatcgagcagtcatgtatcaatattttccatagtgttttgtttagctgcaggcagcatggagtagcaagcagtccagcctgcactttgaggttagtttacttacaatttgtgtgacttcagaaaagtaggccaattatttagcttccaaatctcatgttactcaattgcagttttcatttgtaaaatgggtatactggcaccaaatacatcacagaatcatgaggattaaaggtaatgaaggatataaaatgtccttggtagtgtgcacattaagaatgccctaaataagcatataagcatggttaacagctaagatgtatttcgctattttcatgttgataatttgtcttggtaacttttttttttttttttaagacagggtctgtttgtcacccaggctggagtgcagaggcacgaacatggcgcactgcagcctgagcccgtgatccttctgcctcagcctcatgtgtagctaggaccacagtcgcgtgccaccacgcccagctatttttttttttactttttgtagcggtggagggggtctcatttttttgccccaggctggggctggtctccaactcctgggcacaagccatcctcccacctctgcctcccaaaatgtttggattacaggtgtgagccactgcgcccagtcttctcagttcagatatggcataaattttctcaaatatttaaattatttaatccttaaggaatttattttggtgcaccaaaccacttaccttaaagtcagttttgccttttcagtaagcgactggcctccagaatggcctcgaagcgccagcctactggcaaggagctgacatgcagcccggagtcagctccctgcggatgggctgatcnnnnnnnnnnnnnnnnnnnnnnnnnnnnnnnccgcccctccccgccccctccccgccccccttgctctgccagtccagccctaggttctcctgaatccctgcggtcccagcgtcgctccggacgctgccaacctgttctccaccgtcgctcgacttccacctctaagactcccacgtgagtgcgggcgtctcccaattcctgggccggtgaggcagcagcccagcaaccgtaccgcccgggggaaaaggaaagtcctggcctggaggatccgagcccgcaggctccgtgcggcaggtcccgccgggccctgctgctggaagtgctccgtgggcttcgcgcagctggggatcggcaggtcgcggggaggctcccgagctaggtcgcggcctggctggacccaggcaccgccgacgcctcctggaggagcccgggctcggggctcagctccgggccgcaaggccccgcctgggcctggcgctcgcgcacctggggctggggataggctgggatccgccctccttccctgggcggagagggtcgggcttgtggcccagagaagggtgacaggtcccgaaatcgctgcagcaccacgcggggagagggatagggtacccacaccacgtccgtggtgaagccaatgcccagttgagcggggggcgcgcgcttcagagcacccgagaagctggcagatggagtgggaagaggtgactcttgatttcagggtaaacaaggagattgtgagaagtagtctagcagctcccgtttctcctccagcttcaagattcttctgtctagtgttttgggttccctacaccaggattgtggaggaagcgcacggccagaacccgttgggaccgagcagatcaaccatttatgttgcacttaatgatcatctgcactttttgcatatccttagtgttgtctttgtgaggccacctctataatggataatcaaatagagggaagggcgggattgaatattgtgacttgatttcaatgtcccacaacaactgtgctagacagtttttatatgttaggttatttaacgctcccaagcacttattaaagtgatgttactctgtttcattctccaggaaactcaggttgaataattcatcaaattacacaactggtaagtggtggcattagggtttggaattcaagtccgtatggttttagggcacaggctttattgcttaatgtaaaagaacattattctttgggataagccagatacctaggtttcaaatctatgctatgagggctgttagctgtatgaccttgggcaggatacttcaccttttagggcctgtttctgcatttgtgaaatagagataaaatgtcacaaggttgctatgagaattaaattagatcctacttgtaaaacatttagcaaagtgcttgacacgtagttagtggtaagctatatatagccacatatatcctgatgtcattaataagggtcagcaaactagctctctgtgtgtgctgccagccagagccaaacagaacttgtgcaagcctagaacataggtagagggaaacagcaaaggatgggaaacgaaaagggaactgaaaacagatgacatatataatggcaattatagtgacaacaatagatgtctcagtcattgatctgtggtacccagggccactttttgcctttgcgagaattattaataggtcagttccttttggctgatgaattggaaaaatacatcccactctgggctgaaaaatttcaaactctgggactggatcattttgagactctagatgtgaggtggagctgaattttaggaccccacagaccaaaaggtgcctggcacaaaccccacaatgaagtctgcagttctctttcaggatttcttctttcaggtctagtccctgaagaataggaagggagaggaggctccaggacgggagaaacagaaggagtgtttgccattaagggttgcataatgactggacacctcttctaattttacctataactgtgaacactttatagacaatggtcttcattttcatataagtttatggcaacctattatacattttaaaatattttattttctatgctctttatgatggtatcactgctgccctgggtatttcccttgcagcatctgtttcggtacctagttcatattgtactccaacacctatcaattcttttatttacttatttatttattttataataaagatgagatcttactatgttgcccaggctggtcttgaactcctgggctcaagtgatcctcctgccttggcctcccaaagtgctggggttacaggtgtgagccaccacacccggccctatcaattcttggtatggcttatccattgtttcctttgccttctttattttttggtactatcactgggctttttttcttactattgttagagttttctcttttttcctccctttcaaatgttctttagtcagtgatttattatgctagaaagtatgcctgttagcaaaactataaaagttaatgttagatgtgaaaaatgattatatgtcatttgaccttcaaagattcataatgccaccactgctcaccaaagcatgatatttcaggtggatcttttagcaagactcaatgtcacttccattggtggtactcagtgacctgcaggagtcctaactagagcattcctttactgtacccaccattaccttcagcctacamtctagcttccttcccaccaatattttcccttcttgttcttgcttgtgagtgggaatcatattggggttttttttggagagactatttattcttttaatataacagcttagcagtatgcaatcataactttttaaaagacattaaaattcatcagtattatggtcacatttaccaatatgaattaggtggatagcatattagtaagtttcctcataaaaaaaaagaaggaaatactacatactcattttagtaaatcattttgaaatgtctcttgcaaatggttgtattatatctagttcctgtgaaaattaccagagcaactgtgtggttttctggacacattgttatccggctatttcaccttccctggcttttagtttaccacgcctttagacttcaaggtgacggtcagtacctgttaaaagaggtacctgcaactgtaaagaggaacttacttatctgtccacattttcatgtttatgtgtcagaattttttaaaaagaagtgaaaattaagacaaatacttcctgatggtattgtcaaaacaattttataaaatatgtaaaattgcaccccaccttcagtacttcttgttctccttctttattgttccctgtagcacttactgccacctaatatactatatatgttacttatttgtcttcattgttgtctgccttcctgcagtgtaactaacctctccctgatggggatggtggcctgctttgtttattgttggctctccagcaccttagaacagtgcctgacacacagtaggcaatctataatatttgttcaataagtgttgaatgaattaatagtactattaaactgctcatgattgggaaatataaagggatttgccctaattaaaaacagctgaaacgatgtgttaagcaaccaggacatgaatattcttgaaatcaggaaatgtataaacatctcaacagcctttgcccaatatacaaactttttaaaccttgagaaccacatggttgtggttgttgctgctttaaactgaaggcatttttagattatttgttcaccgtgaactagaaaggagcacacggtgatgaattgtgaagtgcccatcttgcccaattaaatatacatgctcccctacaaagaaaaggaaaggagtcaaattttggaaagcatgcatttagagtcggggcatggtggacaccagggcaggtgagaggttctggtggctggttcaacatctgggaaattccagaaggggggaaattcttaatgtggtctgaggggaatgagaaccccaggagacttcagtcttcacaggttggtgtaccttaatatcagatccagcctgcctgctgcacagctggccagcagctttacttagtccttataatggaaaacttttcaactgaacacttgggattttcagctaggggatgcagcactgattttcattgagggtaaacggtgattcactttgtagacatgtattttatagccagctttgccaagatgcatgttccataaagtgggacagtagtgagacatcaccactgcttctttttttcttaagccagtcaaatttagcagtagggggtgtataccaactttagcaacactgatgttagtaagttcttatttttaactttttaactttaattttattttttctgcttaggtagctaataagttctgatagcccttcttttttaaaaaaaaatatttatttatttatttgtgagatgggacctcactctgccacccaggttggagtgcagtggcatgatctcggctcactgcaacctccacctcccaggctcaagcaatcccacctcagcctccagaatgactgggaccacaggcacaccccaccayacctggctaatttttgtatttttggtagagatggggtttagccatgttgtccaggctgctgttgagctccagccatctgcctgcctcagcctcccaaagtactgggattataagcatcagccaccgtgcctggcccaaccctgcttctattaataacttttattaatacctcactaaatgaacctatgatgaactgttgaattgatggacttgaaaatacaatcagtgatacttccaaaatgtatatacagtagccaagggattagaaaagtggtaaaacctgaaacatatgttaagtaaactttgtagccagttatgaatcatggaatagaacaataccaggattttagagaaattaatgaagggtctttagttgattgcttactttgtaatgataaagagaaggtaaaactgcacctactttttatttttgaagttagagtgatcacacctgttaattcctgctttcctccgttctgcatgtccaagcatcagcaatggtatcactatttagatcctgctcaagatagtttaagaatctggaaactttttgaagtgtggctaaaagctgatttattttgctgccatgatagatgctaagagcttaataatgtgagatttcatggatgctaataaaatttatttccttattgtgctgcatctacttaatagactgggccctgtggtttgtttgtttatttaagtcatctgagcacttaataacaattttgagcaaaggtacctaactagtggagaagtttctagatacatttttttcagatatagctttttttgttttgttttgaaatggaatttggctctttttgcccaggctggagtgcaatggcacgatcttggctcactgcaacctccgcctccctggttcaagcgattctcctgcctcagcctcccatgtagctgggattacaggtgggcgccatcatgcccagctaattttgtatttttagtagagatgggtttcaccatgttggccaggatggtcttgaactactgacctcagaccatccgcccgcctcagcctcccaaagtgctgggattacaggcgtgagccaccgcacctggccccagatatagcttttttgatagagatggagactgagtttggaaaactttatcctttttcttccatttctcctttttgtacttataaatattctaatgttttctattcattttaaaaaatcctttagtaccacttcctaaacaagttccatattcactgtaattaaattagggttatagtacattaatggaaaagaccttaagaattacttaaagaaagggattgactcaactcttaggtttaacagctgaaggctgggcgcagtggctcacgcctgtaatctcagcattttgggaggccaaggtgggcagattacaggcggattacctgaagttcaggagttcgagaccagcctggtcaacatggtgaaaccccgtctctactaaaaatacaaaaattagctgggcgtgatggcagcgcctgtaatcccagcaactcaggaggctgaggcaggagaatcacttgaacccaggaggcggaggttgcaagtgagccaagatctccattgcactccagcatgggcgacaagagtgaaagtccatctcaaaaaaaaaaaagatttaacagctgaaaaaacctgaagcctggagaagttacagcagttgcccaaatgcctgccattgtggtgtgactaacacagaaccaggcatttctttttttttttttttgagacggagtcttgctttgtcacccaggctggagtgcagtggcgcaatcttggctcactgcaacctctacctctgggttcaagtgattctcctgcctcagccttccaggtagctgggactacagtgcaccatgcccaactaatttttgtgtttttagtagacacagggttttgccatgttgaccaggctggtctcaaactcctgacctcaggtgatctgcccagtccatttcttttgacacctgatccagtgattcttcctttttgtttcttttttgttttgttttatgtatatttatgcttgacattattccctatcttcatttctggtatcctgtggtagtgattaaaaaaatacatctgggcatcactttgttactaaatacagaacaagcgtagtttaaattcttttaatgtgagttttttactctcagagtctggatattaagtgcagtatattcctgagaataaatgttgctgctctaagacgatctaatggcacctacacacatggcagacctgtgtgtgtagagacacactagcaaggagaacttgctttcttagccttaagtaatttacaatttaatgggttatcttgaagaggaactgctatgaggtaaataaaatataaaccattccagttcttccattctttggcaagcttttgttattctggttacgtttgtttaagaaccatataactagttttagcctcagtattaaccttgtaattttaaagttcctattttattaatttgtgtcaggctgaatattacttttgatattaacaagacttaaggaaattaatagagaatattgctgttatactaagtaactattttttgatattgtttttaattgaaaaatcataattgtttacatctatggagtttatttatttttactaatactatttttacttgacagctaattaactattaattagaggctttagtgctctgaagggattttggcataaaggggaaaatacctgggtttatgctgtggtggtgacacttactagctttgtgatcccatgtaagtaatttaacctttttgaagaaatttatatttttttcctaatatatactatgcattattttgaagattaacaatgtgctgaaaattatcaacatattctgggtcaatcaattcagacactggagtgccttatattatagtcatacctgtgacatatggaccttccaccatgtagtaatcattatcctgcctaactcacagagtttttgtaaggttcagaagataatatattatttggaagcactttgaaaattgtaaaaaaaaacaaaatctgtccagttgtatggaattattaactatcttttctttccccttattcttctactccccactttcttactgtctacccttgaatgtaagggtgaaaaagaaatctggtagtcagtagcaataatactgcaaattctttttgtagtggagtatagttttaatcgtcagtaaaagtagaaatctctggggagcttcttcagctccaagagcactttgattgttccctgtctgtaccacacaattttatactcttgtatactatttctatgtatacatagttagctaagtagctaagtatttatttcgtttttgcctcccccaaccctcacttttggaacacctagaaagtattcagtaagtaattgttttatgaatgggtctccccaatttgattataatgagctacaagcgcttctgttgctgtataatgtccctgctgtccttagcaaaataatgggtttacagtaacctggtaataaatacatttgctagtctgacctgggaactctgaggagcatagcagcctttggatttacagccatattacctgacgcccgctgctttttttttttttttttttttttttttttagtaggggaacacttattactattctgagcaacacaatttgagaaacactgcctagggtgtgttttgctgatgttgctgggccggttccagctgccccagggttgcccttgcttgctttcaatagcggtcaggcaggatgtactgcagaatagcagttagtgaatcatggtattagaaccagaaagaacttctgagaattttttacattaggccagtctcttcatttttcagctgaagactgaaggaactttactaaagggatttgtagataggcaccgacttctccttcacaattgttttaggacacattttgagtcactgacatgagcctgcgctcccctcacctgcgtaccttatctatactcaaggctgactatttcaccaaattaattttatgtaaatcccaaaaatcattattgtttcaagaagcttttcataagtaaggatgagaaagctgctttatgtcttactacttaataacaagccatctatgctgagacaatcaattaaaatccctgactcagtaataaaataattgctacaattcatagagtgtctattatatgctgagcatgctayagacctacagttgtcagggtttttattaagtttatttttctctcttagccttatttacattgaaggactagtgtcagggttttttaatatccccattttataaattaggaaattgaagttcagatagacaatttggcagaggtgacacatccaaattagtgatgggaaagaaatttgaatgacacacrctgactccagcattattgctctttctgctacaaataacctgtgccagatgtcatgcttcaggaagaagaggaagtggtaaaatatgttcgctgcccacagttcacagtatatagacggagtgatgagccacaaatacaagtaacaatagtggaaagaaaatagaatcagtgccataacagcatgaggggtatcagcagggtatcagcaacagctgtatgaatgaagtatcatttgaagtgtttgttttgttttgttttgagatagagtctcactctgtcgcccaggctggagtgcmgtggtaccatctcggctcactgcaaccttcacctccttggttcaagygattctcctgcctcagcctcccgagtagctgggattacaggcacctgccaccacacctggctaatttctgtatatttagtagagacagggtttcaccatgttggccaggctgagttcttgaactcctgacctcaagtgatccccctacctcgcccacccaaagtgctgggattacaggtgtgagccaccgtgcccggcctgaagtggatcttgaagaacttgggtgggcagaggtagctgttcaggtagattaggggtagatgttggcagagccatgaattccaggcttagttcattggactatcactttttaatcagaagtgataaaaccataatgtgaatggagagaaaatggcagtgggaatacccattaggagactattatataaggcaggtgagagatacagaagacctgaagttagggttgtgactctgggtatgggaaagcggctgtatctccatgtttgggagagatttggggttctagtaggcagaatctctatgacatctttactggataaatctaagagtaggtttaaggaggaatgggaaaagaggaagtagataagacttcaggattttcagccagggcatgggaatgaccagatgccttaaatttcacatatcaggtaccactttaaatattaggtcttaattctcagctccttatgtttatctctgttataatattgattcagaacgttagggtgactgggagaattattgatatatttggtgtttctagggattatttgcatttcagaagacgtgtttggatcaaattttgtccaacaagtaataatctgtacagtagggaagctgttgtctaatcctagggattatttgtgttttctatcctgctctttaaggagtaaaatactacatagaattcttctttagttgctcatgcattctttgccaggtgacttatcccagccaaatctttcatactaaaagagtataaaacgtttgttttatttttcctcatcataattttttttttttttttttttgcgacagggtcttgctctgtcacccaggctgcagtgcatagcttactgtggcctcgaactcctgaacttgagtgagcctcctgccttagcctactgagtagctgggactacaggtgcatgccaccttggctggctaattttttcatttttctttctttctttctttcttttttagacggagtcttgctctgtcgcccaggttggaatgcaatggcgtgatctcactgaccgaaacctccgcctctgaggttcaagtgattctcctgcctcagcctcctgagtagctgggattacaggcatgtaccaccatgcctggctaatttttgtgtttttagtagagacrgggtttcaccaggttggccaggctggtctcaaactcctgacctgggataatccacctgcctcggcctcccgaaatgctgggattacaggtgtgagccactgcrcccagcctaaaattttttgtttttgtagagatgaggtctctgttgctcaggctggtcttgaactcctgggctcaagcaatcctactgcctcagcctcccaaagtgctgggattacaagtatgagccaatatgcccagctcccattatgatttgtggataaagtatactattgctctcttaaaaaattgtatatcatgtactggataattacattaaaaggaaatgaaaacagtatcttcatgaatattaccattaacaagattccagaccctagtgtttatgtaatttcttccatttgccattcagccataatgggtttcaggataacattgagaccagcacagagtcatttttcagagaggaatgctgctaatagaagaaatttgtttcctggcagcaatgcagtagtataactgtcagcaattggttaaataatcagctgtgcctggcatgttgtttttgtagcttttgtataagcatttttagggaaaaaaataatgctcttctgatatgtggtgtctctttgctgtgagactgacttcacatgtagatgtcttcattctctgttgaattcttcccatccttggaaatttgaagacttttctgctggctggtagagaatcctctacatgtttttttgggggaagctttagctattgttgctcattctatgttcatccacagggcactgcattatgcttgatattgctgacatacaacttacaagactctaaactaccttatgcaaaaaaaaatcatacaactcacatttattttacagattctgtattagatgcaaaaaaacagtatgcctggcacgtgccagatttacaaatttacttgcattatctccatttttactgatgaggaaatctaggcccaggaagttgaagttacttatacgtggtcacacagcaagtgccagatggagggttcaaccgggcggtggcgggcacctgaaatcccagctacttgggaggctgaggcagagaattgcttgaacctgggaggcggaggctacagtgagctgagatcgygccactgcagtacagcctggacgacagagcaagactccgtctcaaaaaaaaaaaaattgggtgtgtgcattaccccaaatttgatcttgttcctgtaatgcagtaatctgttactattagtgcaataggaattcaaaggaacaccttagtatggattggaataatcaggataatcatggaatggaataataaaaaaatatgaaacatgggatagataagataggatcagaccctagaggcagatagtgataaaatgataataaaatgtgagcacttactgtatactaggcacatatataaatatataagatacatattttttgtttgtttgttttgttttttttttgagatggggtctcactctgtcacccaggttggagtgcagtggcatgatcttggctcactgcaaactctgccttccagtctcaagcgatcctcctacctcagactccagagtagctgggatcacaggctcatgccaccacacccagctagtttttgtattttagtagagacgaggtttcaccatgttgaccaggccggtcttgaactcctgacctcaagtgatccacctgccttggcctcccaaagtgctgggagtacaggtgtgagctgccgtgcccggccagctttgtttttaaacgggttttctagctacttctaagactatgcaacctacttcatttttcttagtctctatttatttaggaatcttagtawtgatttttgacatatgttgaggactgctactgtttttagagagttcaatagaattatcaaaatttttaaataagatgttagttgttttttgacattacaaagggctcttctaatgataatctttgttacttcagatttgcttaggcattttatacagcacaggaatcttactgccatatttaaatataacaagataatgagtggatttgtttctgtggtcctagaacttcagctaaatctcaaagtggagggcaaagggcattaaatactatcccattgcaaggatgtttgccagcagctctagggtagtaggtaccttccctcctgcagaacctgccctagcaccatcaacctccactggctaagtggacatccagatgggaaatgcaatgcctagttccttttcatggtgacacctgcagcccctttcattccctgggttcatggatgaaggcagctcaccagcaatactacattccttctcaagtccagcccctatcatatgctccatcccatccccagtccttttcatatattgattggagactggggaaggaggggtctatggaagttaagctaactctgatatttcttagcaagtcataagggaagatgggccacaccttctctctgtagaatagtaggcttgtcaaccttgtctacacattagaatcatccaaggaactgatgtcagggttgtaccctaaaccagttaaaatctctttaagtggaactcctgcatcagtagctttgaaagctcctccagatgattccaggaagcagccaatattgagaaccactgctgcaaaatattgggagctgggggtagagtggagggaaagggggctttgggggcttttggttttagtcaaaaaatcttgaaaacagaaaatatcccactcagtgtcttgttaaataaacaaataaaaataaaacttaatctgttttgtagtataatgctatgcatacctttaagtgaagggtcaagataatacttggagtttttctgaatgataaaatttatagttaaggtaaaaagaaatttttttttttttttttttttttttagacagagtctctattgcccaggctggagtgcagtggcacagttatagctcactacaggctcaatctcttgggttcaagcaatcctcttgcctcagccttcctagtagctgggattataggcacacaccaccatgcttggctaattttttttatttttagtagagacgaggtcttgctgtcttgcccatgatggtctcaaattcctaagctcaagccatccttctgcctcagcctcccaaagtgctgggattacaggcatgagtcactgagcctggccaagaagattagtatgtcttattagccatcttaaaagctgtattttactgtcattcagtaaatgaattttatcctagcaagagaatctgatgcaggcagtatcattggaatgagctaatagacacccacatcctgaggaggtgcatataacagtctgattctggcaagttcactctataagcctattgtgacaattggtcttaagaagtcacctgtttttgttaggaatgagtgtgcttcttaaaggcactgttttacttgctttctctttttattggttttctcagaactcaagacatggctgcccagtgtgtcacaaaggtggcgctgaatgtttcctgtgccaatcttttggataaagatatagggtcaaagtcagaccctttatgtgtgttrtttttgaatacaagtggtcaacagtggtatgaggtaatgtcaaatactttacctaaaaagtaatctgaattacccttttaacaatgtgaagagtttttttaatgttaaaaataacaacactatctcatctgttaatggagttttttgtgaaagtttgtccttgattgtagaatttttcatacacatatagaaacttcctttagttgtcatgcctatgtttatgtttagtatataaagatgtgaaaatccaagtgcacctttgatctgaagaaacttttttgtttttgcggatgggtgtaggttgagcgcacagaaaggattaagaattgcttgaatccccaattttccaagacatttattattgattactactttgaagtggttcagaaattgaaatttggggtttatgacatcgacaacaaaactattgagctgagtgatgatgacttcttaggggaatgtgaatgtacccttggacaagtaagtataaatagccactgtactctattttgtctaaattttaatcaatgaatttggtggtgtttttggtaagcagcatttaatttttaaagttgaaaaacatgtaatcactttaaagacagtttatatattaatatgattggcttgaacattatagaattcatcttatattttgtatgggcaggaactatgtatttatgaaaaagcctgttaattcttttgagtaagggatgcttcatgaggcattttattaagtaatacctccgctttagctgctgcagagttctctacggttttgttatgttcaagccataaatgcattcaagataacagcaacttctctgatcttctaactagtgagactggcacctgctgactcgcaatgccccaataccatcccctttacctggcttgctcttactcaaccttattccccctgataaaccttctctgaccctctagattagtttggaatcctttcctgagctcacttggtacttactatctggtacttctcaccatactttttaatagttgcttaattatctgtcttcccagtatatgataagtttggtcagggtagggacgtgtctcatggctccccattttgctcctaggttaatctgattcataaggagagattatgaccatttgcatagactgaagaaagttttaggagggaggagtaatttttttttcaatatgtgacatttgtcactcacatatgtcttttacaagtttatttttcaaggttgaattgtttggagattatggtattttctgtatctcaaaagcaatatgaaactgatcagttttctgaaactttgataaataatatcaaagaaaaaattgaggaagtatttctttttttggggaaaaaaatcccagtgtagctaaaattcctatgaatttgatatatctttcaaacagatacatcagatgtatatctgtttgaaagaacctaagtatactatattccttaaagcaatatgacatttttggggagttaaatattgaagttgtgtctcagtagaaaaattgaatcctttttttttttttttttgagacagggtctcactaagtcacccaggctggagtgtcgtggctcaatcacagctcactacagccttgacctcccgggttcaagtgatcctcccacctcagcctcccaagtagctaggactataagcacacgccactgcacctggctaatttttgtattattttgtagagacaggttttggcatgttgccaaggctggtcttgaacttgtgggctcaagcaatcctcccacctcagcttcccaaagtgctgggattattggtgtgagccactgcacctggccttgaatcttatttattgagtgttctgaagcccatcttttacctagaaggtttcagctaagtgatttgtttatgcgatgagaatccagtcctctttttccattacaaggaacaatttaaactttcacatacataggaagttaagaaactagtgggtaggtagattgtatctgccagggtaggctccttagaagttttttccaatgagttttaaatatttagattttttttttttttttttgagatggactctcactcttgttgcccaggctggagtgcaacagtgcgatcttggctcactgcaacctctgcctcctgaattcaagtgattctcctgcctcagtatcccgagtagctgggattacaggcacccaccaccatgcctggctaatttttgtatttttagtagagatggggtttcaccatgttggccaggctggtcttaaactcctgacctcaggtaatctgcccgcctcagcctcccaaagtgctgggattacaggcatgagccactgcacctggcyctaaatatgtagatgatctaaatctttaagaaaccaactgaatgtttctatttctaatgactttaagtgaaccttatactcagtcttttttgctgaaactatttcatttaaaaattcttaggttgaagggaaatgactctgtatcactttctaattctaacagattgtttccagcaagaagctaactcgaccactggtgatgaaaactggcagacctgcaggaaaagggagcattacggtaaaaataagatatttgtcttttgtctcaaaagatttagcataacaggacatgccgaaactgtccatatcagagaaatattctacagccatgctttgtcactcaatcttgaatgttgcattccatccacccatgtcttgtagttatcacaaatggaaaatgtattgtgcaaaccaggggaaacatgcagtgtagtaatcccttctttcagtttttctaagttgcccgtagaggtcaagtgcacctttagcgatacctgccccttctctgtggaagtgtctattcttacgtgagagagaaactgcttaataatctgtatcagtttggttctctactggaggaacatagtcctctcaacatgacagaaattttccctagtggattttattccagaaggatgttatattatgacatggtcaatgaacctataaactctttaccatcattttttgtgcttgctatctgctgcccatccttccacctgggcttttcattgctgattactggctttaagcaaatgaatatatgctttattgtatttcacatttcccattatataatgccaagcctgtaaaccttatcttctagagtgtctgtacagataactgctgcctggagtgatagtattttaactttagctccctctgagaatgtaaggctagttccctgagagagctatgtttcaaggttatcatgattatcaaatacatttctctragcagctgttttgctatagtttaaatctccaaaggcataagaatgttcagggtgttgatttttgtgggaaagagaacattatcagtagttagcttccttgttgtagggcatgatagactgatacttatttttaagaagaatgagtttttcagttacactggatgaaaaacattgatctgataatatcaatgtatagagtattctaggtatgatttattcatgcttctcagtgtttagggaacttcagtattgtgtagagggtattctcagtcttctggggttttgacatttctcttgaatagggaagatccaatttgggcaaccacatttcaaaagacattgcttaatgcagacctgggcatattttgggaaaatctttatttcacacacataaaagaaataatggtagatcttttttaatgatgccattttcttatgaaacattttagaattcatttatattagtgtaggctttatattagataacagaataaatcagtgcttaagtgtctatcagaattcctaaaacatattttctttcacttacctgatctactcatagatttcagctgaagaaataaaagataatagagtggtcttgtttgaaatggaagccagaaaactggataataaggtgggtagactatgcagatttcaraaaggttgtcatgttttgcctcttttttaagaaaataaaaatgcagttaatatcatgaactccatcattgagcatcacatagggtactagttactttcaaattttgcatgtgtgtgtgtgtgttgtatgtttaagcagaacccatttctcttcacctctttcatctagatgtaatcaaaggatttgtttaggttaagagaggagttgaatagaagcattaatgttactgtaaaaggcatgaaagaatacagttgaattatctttaggaaaaaagtgaaaactctgtgctttattaattataggtcaattatcctctttgcattcaaaggtcaatttttttttatgaaggatgagtgccaatacataataacacaacaatttagtatatagcatggattataataattcttttatctatcttatctatctatctatctatctatctatctatctatctatctatctatcttttttagagacagagtctcactatgttgcctaggctggtctggaactcctgggctcaagcaatcctcccatctcatactcccaaagtgttgggattgcaggtgtgagcccctgagcccagctttttgtacttaattctataatctagtcaatattcttcattgtttgcaattcagtttgaaaacattttagggctaggcatggtggctcatgcctgtaatcccagcactttgggaggccgaggtggggagatcacttgagctcagaagtttgagaccagcctgggcaacatggcgaaaccccatctctacaaaaaatacaaaaattagctgggtgtggtggcatgtgcctgtaatcccatgtgaggtgggaggattgcttgagcccaggaggtcaaaactacagtgagcagtgatcatgcattctcacctgtgtaatggaacaagactctgtctcaagtaaaaacaaaaacaacaacaaaaaaacacttaaagaaaacattttagactataggctggggactttttttttttaattgtggaaaaatttaaatatatacaaaactagaagactctttttaaaaaatttcatgttctcatcacccattttccacaattataactcatggccaatttcatttaatctctacccttatctactttctctcctcccagacttcatatcatttcatccatcaatatgttgatgtatctctgaagacactttaaaaaatataattgtttaaagtgtgtcttacgtccttttaaatctgtaaatttcttcctttcttttatttctttcttcttttcctccctcccttccttcctttgtatctattcttccatccattgtggaatttattcaatggagaaaactgatttctttatcctacacaagtttccacgttcaagttgggcacaggtgatgcacacctgtagtcccagctactcaggagactgaggcaggaagatggcttgatcccaggagttcaaggctgtagtgcattataattacaagactccatcttttttttttttcaaaaaagaattttccatattctgcatatggctaattaaatcctgtggtgtcatttaacatgtttctctctctacttttattttctgatttctgtaacctggcaattgaatctagaagtatgatctgctggcatttttaattgttggcaagacagtttcatcaatggtggcatgtaattccatcaggaggctcacactgacttgtgtgttttcgggawgtttgtgatcattgatgataactacctggttttattattaagagtctgtaggcccggtgtggtggctcatgcctgtaatcccagcactttgggaggccgaggtaggtggcttacctgaggtcaggagtttgagatcagcctggccaacatggtgaaacaccatctctactaaaaatagaaaaattagctgggcgtggtggtgcgtgccagtagtcccagctacttgggaggctgaggcaggagaatcacttgaacctgggaggcggaggttgcagtgagccgagatcatgccactgcattccagcttggcgagagagcaaggctccgtctcaaaaaaagaaggaaaaaaaatttgtaaaatagtgatatcgtcactctatcattgcttttgtttcttagcaagaatctttctatagagagaaacttccccacattaagtatttatttactttgtggtatagtttatataggaaaagyaagttaaaatgtttgacttttcccccatatttaccatttttcaaaattataagttggttccctagcatccactaaatgtgaccagtgaagtttttatgtttgtgtgttttgttctgttttagaattgctgtaaagtaagagatttaaatatttataactgtaatggattacttctcatagatacttaagttattccaattttggcctgagggaattcctttaagcttgtttgtgagaccatttarcacaactccaggagtctttggataatttcttgctctgtgggatgacaagagcttcaaagaacttctttttgaagttctttttgtctttaataagccatgtcccaagcttattttatctagtttctgccttagactggcagattaaaaggaaccttactttattttggtggaattggtatttagagaccacagtccactgctaggggtactcactgttgtgggttattgtcattcatggtttctagggcttttcagtggacagatacagaaaagacttttttttttttttaagaaaaactaaatcatgaaattacacaactatttccaattcaaatatagaattactggccggccatgatggctcacgcctgtaatcccagcactctgggaggtgggtggaacacttgaggtcaggagttcaagaccagcctggccaacatggtgaaaccctgtgtctagtaaaaatacaaaaattagccggtcatggtagcatgcacctgtagtcccaactactcaagaggatgaggcatgagaattgcttgaacccaggagggggaggttacagtgagccgggatcgtaccactacactccagcctgggtgacgtctccaaaacaacagagataattaaaaaawatatagaattacaggcacttattttatattcatacctcatttctcttggtttttaaatatattaacacaattgcttatctgttttgtctcacacaacgttaatagttttagaataaaaatatcaatattattaacagtatttttactgaaaagtttgagctttctttgaagttctttttgtctttaaggtgtgtatattccacttttgttacatagtcacattcttatgatttaaagaaataattcctttgtgtggttatgctgtcacagacctactttcattttgcttttgatatttagggattgcttttttaaaaaaccattttgatttaattttgttttataatcacgtaaaaaatttacatggctctaaaatctacaaaacaaggtacttaagaaatttaacatctctcctggtctaccttgcttccgctttcctccatgtagataataatttttaaaaagttgtgttttataatttaatcattctgtttcctaaatatctaagggtttttctgtgtgtatgtatactcatgtgtgtgtatgtgttcatatgtatgtgtgtatgtatgtatttgtatttatgttccccacccccagcccttgcataaacatagcatactagatgtacactttcctccactttgcttcttttacttaacatatcctggagatcagagccagggagtttaattattgttttagttctaatactagcaacttaaccttcaaacaagtattggtttttagccttcaaaataataacaaggatattctgcttttatttcattcacttaagattcttcttagagataaggttaaacacagtctttgtgtttatatttttgactgtaccaaatatcttatttgcttgacattaaactttgtgttcaagagagaaataattttattttagttcttaatttaatactgaagttaattcaggactaaagaaatcttcagctcagggatgtatctgcatatattcctgtgggattaacaaatgtcctttcattttcaaaaataacaagtcataaatgttaacgagtatgcacatttcaaaatgaagatacatgaaaaygagaaaaaatcatccatagtcttaccacctgagtttaacctctgtgagtgattcgtacatttttcctgaattttatctctctgtatgtgtgtggttatgtgtgtattgaggatggtgataacggtatttttgagcatttagtgtgcttgagcattgtataggagttctgtggtgaattacaggagaaatagaagatgtagtttgtgcccttgaagtgtttctattatgtgttccacatatctacctctggtcatttgtgtatgtaaagaaatgtgtggttttgatgaaggagttttggacatagaaggctgagatatgaagttaaagcctggatccattaattaattagatatgtgatcttgggaaaatcatttacccctctgaatccattttctcactgataactgccctgtctccatagagttggtatggctaatgtttgtgatatcatttatataaaactactcagtgatatgtgaatgaaaatggttaaaggtgaaaacaaggcaaaaacatattttatggtatatttgaccactgtattttaaaactgtcatgtttttgagaagtcagggtatgatatacaggattatgagcatttatcacaagcactttgataattctccctagtagacttccgtaagtttctaagttagggagaaaggtgatgggatgtatatttactatcaatactatagagttagacttcaggtggttgccaacatgtgtaaagtatggtcacacatggtttcatgggttcagaggagaacaaatgctttttgttgtttgttttaaatgtaggatctatttggaaagtcagacccatacctggaattccacaagcagacatctgatggaaactggctaatggttcatcggacagaggtgaatatttgaatttgaaaagcagagtggaggtgttctttgaaattattgtaatctgaattttaaaaagcttatatttataaaagtatcaatctgagttcatacttacatatagccagagacacaagatcaccatgttcatatttttttctttcaatgaggaggtgctaccgtactttatgatttttattttgaaaaattttaagtcctataaagaacactaaatgtattcctctgcacccctcacctagattcaccaaatgaacacacactcccacatacttgtgctctctgtctttctctatctctgtccctctctgtctctctctctctctctctctcacacacacacacacacacamttatgcacacatgtattttccttttgcaaaatcatcctaatggagctacagatataataactcttatctttaaatgctacagcagaccaagtgtggtggctcatgcctgtaatcccagcactttgggaagccaaggcaggtggatcacttgaggtcaggagctcgagaccagcctggccaacatggtgaaaccccgtctctactaaaaatacaaaaattagccaggtgtggtagcacttgcctgcagtcccagctactcaggaaactgaggcacaagaattgcttgaacccaggaggtggaggttgcagtgagctgagatcgcaccactgcactccatcccaggctactgagcgagactccacctcaaaataaataaataaataaatgctacagcaggtagtttaaagaacagggacattctatacaataatacttgagaaattaacatttgacatagctaaatgtaacattatttggtataccattaatcttcagatttcctcagttgtcccacaggttttgtgtgtattttgttttgctttgttttgttcagaatccagtcaaggctcaaattttggatttgactattatattcccaatagaggactcttctccctaccttccttataccttgatgccattgaatctcttgaaaatcaagaccagaatgtccaacattctggattcttctgtttcctcacaactagatccagatcaaacatttctgtcaaaaacactatgtgtgttccttttctttacattttcaggaggctcatggtgccaggctgcccagcattgatgatgtcatgcttggctacttggttaagctggtgaccgccagatctcaccatgataaggtctcatttttcccctttttaattaataagtgctatgtggtgtgaaactatgagactgcatgaattacatgttctctagcacttcaaccagtggttttagcatccattggtgatccttgcctaatcaattattgtattatgggtagtaaaatagtgatttttcaaaatctttcatcctttttagttatattagcaggcattcctctttcatctctctctttctctgcttttatttttagtatcattataaattcatggattgttataacagtgtatgctttgtatttaactcattattgtatttttgctgctcagattcatccatgtttgactagagagagctcgtagtctctaaaatggctcttggtttttctttttgacttcattcatctttgagcagtctcttaagttagagtatgttctcagttccccttgtactttttctgtcccagagctggtatgagccatgtctcttaataagccctattcctgcaagagggtagtagtatttagacactgacatctgagtgctgaatgtgctcattgctactggatatcattgttttatgccttttaagtggacacagctaagaaatatgtatatttgtgtttatctgtttattatgtatgtatatatggkattaaaattttaaattataaatgtggacttatttctccaattcaattccaacatagtttcttattctatatttaccttttcttatttcatatttgaatcttctgtgccctgcaatgaaaccctcattgctattaaaatcaataatcctccgcagttttttttttttttttttttttgagacgttgtcttgctctgtcacccaggctggaatgcagtggcacgatctccactcacggcaacctccacctcccaggttccagcagttctcctgcctcagcctcctgagtagctaggattataggcatgcaccaccacacccagctaatttttgtatttttttagtagagacaggttttcaccatgttggccaggctggtctcaaactcctgacctcagatgatctgcccgtctcggcctcccaaagtgtggggattacaggtgtgagccaccgcgcccagccatcctctgtagttcctaagtgctccttgtaataggtagatatattttccaaatagttttctacttttcctcagaatgtatcacaactggacaatttattacatttttcatgtagcagttgtataatattgttctaggtagtttttttgtggaaatagttgagttgatgaagaggtggaggacgaatggtgagagtatagcaagaacctaggaagggcaggagcaaaatgttaaygaactgraagtttttctaacagctttttgaaaccacatttttataggttgttaaaaacaacttgaatcctgtttggaggcctttcaagatctctcttaactcactgtgttacggagatatggacaaaaccattaaggtaagttgaaattatatatatataaaatacttaaatatacccatgttcacctattttataaaattaatacataagatagtatttaaagaaagtaaatgatgtaagacacctacagagttaaattttatgtgtgtagaatactaaaatagaaatgtcttctggtaagtgacacagtttgaggagtaggcatgtttgactaatctgttgacctaatgcttagtcaaacagtgtcrtttctattttattctgtattttaaaaaataaaatgtccagtttaatatttttttccttttaataagattcctctgctctgctaataggaacctcgaactacattatttgcctttggtatgtctgttgcagatagaagcagatgttaccgtaagaactcagagcttgcttctgcccttagcaagggagggcagtattgatggcatttttcttccttattttcagaatgagataagtaattaattgaaagcttttagaaggctttagttttagagtatcagggaagtggagtatgaacagcaaatagcagatgtcagtatttttttaaatgtttttattcataggcatttatttaaaaaaagagtaaaaatataaataaaagaaaactcatggagtggtgttgagaatgaaaaatatatacatacatatacataaaagaaacttttgtactagaattattaactttacatgattacagatagaggtcttttttatgttcagacwtcagtcgatcaaagggattttttggtttgtttttctctttttctgataatgaatatggtaaaagcaggcaggataatgaggagtaagtataagatttggagtcagaccacagttcaagttttgacttagtcctttaactggctaagggatcttgggcaggtaaccacacttcttcacatttacttatttatttattttgcttattagtaggaagcttcacctggattcttcacttttataatagagttaagaatttctaccttccagaaaagcaaaaattaaattagcagaagtgaaagttttgtaaaaattttgtagaggtgccattgttactgaaaaactgcttcatttttgccgggcatggtggctcaggcctataatcccagcactttgggaggccgaggcgggcaaattgcctgagctcaggagtttgagaccagcctgggcaacatggcaaaatactgtctctacagaaaatacaaaaatgagctgggtgtggtggcgcatacctgtgttcccagctacttgggaggcttaggtgggaggatcctttgatcctgggaggaggaggtctcagtaagccaatattgcttcacactgcactccagcctgggtgatggagtgagaccgtgtcttaaaaaaaaaaaaaaaaaaactgcttcattactgagatccataaaaaattgcttccagtttgtaaagaactttaaaaatcaatctaagtatgatttgtaaggtatttgaaacagtagtgaaaatccaggtccgaaataaatagttgaaaattagctataaaaattattttttatcattttgccaaatccagacttttgcttttcatattaaaaatagtaaacatcattagatgtcagaaggcaggtaaatctaggggaaaatgtctaagccataactatttgattgtgtgtaatgatatgttaacaacaaaacaatatcttttaaacttttttgctcacagtggcatgcttacagggctattttattatagtaagtaaactgattttctgagctttctctaatgaatgtcttccattcttaaaactttcttggtttgtttttaactatacacaacttggtttgctacgtcatcactgactttatttcatttagttctgcatttctttgcaatatcaaaaagtcatacatttgtgattctcttactgttcgaaaattgcttatagggatagtaaagagttatagagcagtgaatagagtcagaatcctcagtagtttctttgccatgttgtgttatcattctagcatgtattattttcattaagatcaagtgaatacgaaaaataatcatgcatgctgccactttgcctaaaatgggagtgccttactgaatgtagtatctgtgtggtgtgtgcattctctttcatatatacatatgcccatgtgtatatatgtatacatttatttatttattacacatatgtttattatgtatactatatatgcatgtgtatatgtatattatatatccattaaatgtatatgaatacatgtatatattatatacttgcatatacatatgcatatgtatatatgcatatattgttatgcttaccattgtttaaaaagccaataatactggtctttgaattcttgaaaagagagaaattaaatgacacgaattgtcttacctcataccrtatctgaacatatgccagcattataaatatcatgtctgccttcaaggggacaagagggagctttttctatatatttattatagtgagtaatcaaaatttttagtttaaaaatattatttacatttcctgaaattttaacgtatgaatagtctaaagatatgaaccgttttagcccttcataatctttactcaaataaaatcttggccttgtcaaagcttaatcttgtcttagatataaattggtgttccctgattgcaaatctaaaatgtaaagttctgttttccataattgaaaaatgtctgtttaaaaaccatgaacttattaaaatattaagatagtttgttttctaccttatctaaatattacttcctctaaaaattatggaaattattaaatttcttttcccttggcacattaaagagtcatataaaaggtttttggtttaaaaattggatactgagtagggcaagagtcaaactgtcagacttggtcagtggccaaaatgcctgcaaagcattttcttaaaaaaataaaatccctttctgttactcaaaattgaaattctcggtcttgactgttttgattgattgatttgtagtcttcctgaagaataatgaaaacataagtagggaatgaaagacttccagttatgataagcattcatttcatagaactgaggggaaaaatagtcactttgccaagtaaacataaaaaatcctgagtattttagcttggcagttaatctaagtttgagaaggatattagcaagataaagctctctattggctgatggtaaatgcaaattgcttcttagttacaagtttttattttagattacaggctctaggatttcaaagtgtccttagcacagcgttactttacctgtgttggttaccacacaaggcataccgtcttctaagactttttatttaattcctgtaagtcttagttctgcaaaatgggcatcatagtaacaggattccaactctgtctacctcacaagactatttagagaatgtgcacagtgtacataataaatgtttgcagaagtgaaataatctgttttgagataaaatactataaaaacattggtgttaaatgttcacaatcacagtcaattttcagcttcccttgaacacttctgcttggcaatagttcatgccacctaatttttcccattgcaaagaatattctagtattctggtgaatatttactctttgactgtctgtcaacctgtcacgaaattacatgcatctcaaatactctcacctctcttctctctcctttcagagagagaaagcatttaatcagagccagatctaagactagaactcaccctgtctcacatggaaatagagtaaatatgacccggtgtrgatacttcctcagtggactaagtactcttagcctggaattgttcctttcattgtaagagttgtgatcttcacaatgatgcaaatctggcttcatcatatctaacttataatacaagccaacctcaccagattgcagctaatgaaatatatttttcataattctaaagtatctaggatttaattatataaattttagctttctagaatgttgacttcctttctttctccatataatggcttttagccattgcatagtaataaggcaaagaagtggatgagaaagaagatataactccattttgccctttatcagcacttatagaaggcatgatagaggagctgraaactgcttaatgtggaattgaaacagtatttgtgtttttcatctgcctgtgatctatcttagatccccatyccaaggatagctggggtttgaaagtgtttcartattgcttctctaggatgttaattcctactgtcccaagtagggactgcatagtacacattttcatttactttaattaaaagggcacttcatgataggttatatttattrcagccaatactttttaataaaactatattgatttttatatatttttattatatttaatttcaggtggagtgttatgattatgacaatgatgggtcacatgatctcattggaacatttcagaccaccatgacaaaactgaaagaagcctccagaagctcacctgtaagttacatccttgcatttgcatatactttatagtttggctatgtatttattactgtatttcatttttttcccatagcatcaaayggtttactatgcttttagtctatattgcataatgctccgaaatgtttagtaatcacataatccacaattcatacttggggcatgaattttattgagcagaacaccacgtaacagttactaatgccagatgaggactccaactacatggaggacagcaaagatgatcacagtgtcagtcattaggaatagaagtccaatccttttgcctattgtatcatcgtattgaagkcaaggcaaacacaatgcaggcaagcactagagggaaccacactttacttacagagagaagaggcagagcaatatcagctttaaaagtaggcattggtttccgtggccagcagttccatccagcaaccaatgcagggcagttggccccagtgtgcttatctagtgctgtagaagaatgaccctgcccctctcaagactatgaaatactgaaagctgggggcagacctgagagtcattaagcacaggcttcagcaggaccaaagagcacttatggagcctgaaggtataaatgaataagtgaagtaatctagccctttttcaatgagaattcggtttgtggaatttctttagctctaatatataataattttttattgtttttcctttctttaatttctaatactcaayaattaatacttatgattgtgactgagactccagcaagatcctgaaccatcaaagaatttgtttaacataattttgtttcacatcattgtattataccacgtgtattttttagtgtttgattcttggaaaactagtaatgactgtctgaagtacataagtggctttgtgttaaccagaagaggtgacttatcaagcatttattgaatatctcttatattattattaggcaagacagtgagaatttgaaggtataagttggaggtgattataatgtcactgtgaagaaaaaattaaatgagacacttgaaaataacacagagtatgtaactaaatttcatatagttgtagraatktaaagaggtagatagagatcagagaagactagagtagcagtggaagttacagaggagaacaacttgakccaagccctaaagatggatagggggataggaaggggaaggaagatcattcttttgggggaaggaaatataaamaagaggaggtgttagatcaatttttaacatgtattcccagtggaaagagaagatctttgatgcatattttaccatagagttgggcttcatatatttgttttatgatgttatttttttttcttttctttgcagcatattttcgttctttatgttggtaacagctaggagtaatattttatttcctttattataccatgttatatcatagggcccaactctatggtaaaatatgcagcaaagagaaaaaagattatgccttggaacatttgcaaggaaattacctgcagaggtaaaatttatttgggagaaatattttgaaaggtatgcaattttaggagtgccttaattgttggaaatttacctgataaatattccacatacttaacatattatgtaattgtttcagagttatattttgcaacagacctacatcagtaggtagtttgattctaaaggaaaaaaagtcattcatttaaagtcacattggcatttctaatattgctaataaaaagtaacatttttgtcttctcttcctacaggttgaatttgaatgcataaatgagaaaaaaaggcaaaagaaaaaaagctacaagaattcaggtgttatcagtgtgaaacagtgtgaggtccgttggccttggctacttatttttatttatttatttattctttttgagctggagcctcgctctgttgcccaggctggagcgcagtggtgtgatctcggctcactgcaacctctgcctcctgggttcaagcaattctctgcctcagcctcccaggtagctgggattacaggcacccaccactacacctggctaatttttgtatttttagtggagacagggtttcaccatgttggccaggctggtcttgaactcctgaccttgtgatccacccaccttggcctcccaaagtgctgggattacaggtgtgagccaccgcatccgacccaagccttggctacttataatataatgagattatatttcaagttctcctgttagtatgtttatattaaacaaatacttgaatttcaggcagttgaaaatcacatgagcatctggtcacctttagcaaaaagaatcaagtagggaagaacaaaaaaatcaagtaacctgtttccaaggtttgacaacttatttgcaaaggacaaggataagtttttcgttatcttaggaaatataaagcatcatagtattttctcagctctttagtggaaatgaccttacccaatgcatttatcctcttcatactttcaatataaaatgttatgagtaaaggggaaaagccaagattttttagggtgaacaagtggaatggagtttttgttttttaaaatgttgactgctatgctttttaaagccctcaacatattggattcattactaatatcttaaaacttaaaatgagtgtatttcatctttcgccattagtattctaatcttaacattgctacaattatcttgaagcagaattttacagattcatggcacataggggaaggggtatcttaaacctgaatgcaggggtaatttccatgtttatatcatgtcctgttcaatttacagacttttaaaaatatatgccaaagagttttttgcttctcttgtatagtaggagagttgtaattttaagttttctcttatttttagattacagtagaatgcacattccttgactatataatgggaggatgtcagctgaattttactgtaagtaacacactgaatttttcagcataggctttttcctccatgttgcagtatattttctttcactgcaaaactgactttgtaatgaaattttcacaatctgtttagcatagtcctcttagagtcctcaggcaggttgtctgggctcatcaygaagctctcagttttgttgatgagatctcttcctcctgagagaaagcagatgtatacaaacctacaaactagtggttatcctgaactaatttaaggactagaaagcattagtgagacaaccttataaaagacaacccttaagcttaagtaatggatacaataattcattatttaagccatctagaaaagtagaagcatcaggttgtttcacatttaggctttacttgtttaattgtctatggaaatagtggtaggcatttgttaggaagtaggcgccaggatgcatgattgtatcccatctcttgaagttttcctggacatcaagcacaggtgtccctgccttctccttactaagggctgcaattgttatttggcaggtgggagtggacttcactggctccaatggtgacccaaggtctccagactcccttcattacatcagccccaatggcgttaatgagtatttgactgctctctggtctgtgggactggtcattcaagattatgatgcgtgagtatgactttggaaaaactaaaatacatgttttcacaattccccagaaagggtagtttgtttcatcggctagcactctgatataggtggtaggttgatgatgctttctccctaaaatccccccgtcttatcttctatttttctccttgtggcaatcttgctgtttaccttagatctctaatatctttctgtgattagttatcatatatggcatgtactttgctttatattacatatagtttgctacttacttcctgactgaatgtcagcaaggctcttgtttctttagtctggtttccttggggcttattcattaggcataagttgtatgagtgattgaagcccagatgacatgttttataaatactgtttataaatactaaatattatttatgttaaatactaaatactatttataaatactaaatactatttatgttaagaaataaaaactatttcttagcatatctatgtccttggcagttgccaaattatttttttaacggtgacttttaacaagtgctgaaggataactagatctaattgctatgaaatattctgaatggttatcaatggttaggttttgaaaagatttaaataggtcctattgagggtttactaaacaatagggaaaacatctgcattagtagtgtttttcctgatgtagcgttaagagtacagaataaaatttcacttgcttttgtctattattattttatttacatattgatggggcttttcattaatctgtagcatttaaagaggtgaaatttttaggcaaatgcaaagaaatctaaagtaaggtggcaattccaatttcaggctagtaagttttaaggtaaaaatcattaaatatatttaacatatatagaaagttactttattagacagtagtgagagcttagaaaggtggtcaaatataacataggattaaaaaattaataatttctcactagcagatattaaaagtattattgcaattatcttaagagtatggaattaggacatgaccagtggaaccaagcaaacagtccagaaatagacccatgcatataagtgaatttaggggagggggttgtaaaagctgtcaaactggacaagaattgaatttggatccctgactcatacttgcatgttttaggatattattctgtataaattagagtacagaccagactgctgaaatagacacccaaaaacaaagtggctttgacaaaatagaggtttatttcacttcacattgctaggggtaaatataatagttaagaactgataggggagttctgctgttctcaattcacagcttccctccsgggttccatagctctggttctcatcttctccagccagggggaagagaagaaagggaccagggagtgaatgtgcattcccttttaggggcatgattcagaagtggctggcaaatcacttctactcacatctccatctctagatcccagccatctgatcacatccaggccagagaagctaggaagagcagtctctagctcaggtgttctattattaaaggagagaatggatattgccggagagcagcaattcctgcttcatatcctacttcaaaacactttccagatgagttagaagtttaatrtcaaaagcaaactttaaagttttagaagaaagtgtatgtgaattgtttataatcttgtagtgaggaaaacctttaagcaagagagcaaaggcaaaaatcatgcagcttttttgtgttcatattcattaatattaaaaactatgaaaagaaagatgctttaaacaaagttgaagacagactacaaactggggaaaaatgtgtctttctttcttttgagaaagggtctcgctctgtcacccaggctggagtacagtggtgcagtcacagttcactgcagcctccacttcctggacccaagcaatcctcccacctcagcctgggggaaatatttctgacatggcataggctctatcttcagtgcaaaactaactgttaagaataaatatgaaaggaatattcctcgtagaaaaattatgttcattatggtgttttataatggcggaacattggctatcagacatctgggggaggatatccattttgtgggatactcagtggctattcaygtgatgttatatattcggtccactgtccctctccctaatgtatgaatgtttgtattaagtggcataaataaaagctaccaataacctctgatcatctgaggtcaggttttgctaccaaatgagtttgccatcaattagtaaaaaaagaattgtgattttcagggcttcatgtatttatttactcatttgatcactgaaatgatacacaagatttaagtagaacagagtaggttataaaacatgcatgtaaactccatttctacaaaatctatagaaagaaacatttttcttcctcagtgcacagaaaaatatttaggatgagagttgtcaaatattaacattgattctctttggcagttaatataggtaatctttgttttatcttcatactttttgaaatgagctcatatggattttattgtgggcaaagataaagctttttattttggaaaaaacagtattttattaaatatttttttctttttagtgataagatgtttccagcttttggttttggcgctcagatacctcctcagtggcaggtaagaggaaatctctattttaaagctttgcctcctagaaaagcagcccagccctcatcagtyctttgtccatctttgacaggtatcacatgaatttccaatgaacttcaacccatccaatccctactgcaatggtaagttaaaaaataaacatgaagacttcaaatggaaaggctcactagtctttgttattttgttctttgttctttgttttttttcttgtgattaaaactactcaaatttcatctctaggtttcattttcttacatatttaactttctgttgtataaggtagaagaattgcaccaggttggtggttagggtggtaatggtaattayggggcaaatcagtattatgatgatgaaggtggtaagctaaatcctcctaccttaagaactttaataggacaaaaacattctcaatctttggagtagatcagtaaaaatatcatatattaaaagtatttttacatataaatttatttaaaaacaaaccttcaataaaatgagtaatttgatatacagatcttttgaagcttttttcagagtrgtagtcactctctacgaagagaaaagtatccagcatctaatacttgttgctcacacagtattctataagtagctgggatgggcaaaaggaacaaagaattgatcttctatagcagctttcctctgtgtagagagcaggaggcaaatatttgtctttcatttcacttttttcttttatttatttaaaaaaatagagacaaggtctcgctatgttggccaggctggtcttgaactcttgacctcaagctatcttcctgccttctgccttggcctcccaaagtactgggattagaggcgtgagccaccrtgcccagccacgttttacttttttccttatacctcaagtatccaagtgctgcttcttttttttaccacattgagcaatcagccagaaatgccagctcttccactaaattatatatcagactaaagagtttggagaaggcaaggtaggtgtgggagcagaggcataatttaaaattctagacaatactctaattttctgcaaagggtccttttgacaattacaaatgtatagctttctaacagaagaaaatgttttttccttttcttcctaaacaatattcataaggtggaagagcatgaacaatttttgtggsggccgtttgcaatatggttttgttcttttccccagaacactttttccatactaattcagtgttctttgaggcactttcagtgactggtygtgacctcttttattccctagccatttgaaactgggaatgttattctttttaagaaatatgcttcatttttataatgaaagtggataatctttagaatttgttgtaattagctttcayttattgtaaatgaatatggatgacatatcatatgataattcattttagaagttcagtcactctgtgagtaatstaagcccatccttgggctgttcaccaagtggtttacactctggaaaaagcatcagtttggttttaaacaaaggagatactatacagcaaaaagctcagagccttattttaaggcaaggaagtttaatccccttttcctaactaatcattgaatctagttgccttagaaataatatgccttagaaataacttgttactttgatgcatagaaagggttttggcataattcagttttaattaaggaattgaaagctcttgatatttgtgaagaaattattattattattaattttttttttttttttttcgagacgaagtcttgctcttttcccccaggctggagtgcaatggcacgatctcggctcactgcaacctcctcctcccgggttcaagcaattctcctgccacagcccgcccccccccgccccccccacccacaaccgagtagctgggattacaggcgcctgccaccacgctcggctaatttttgtatttttagtaaagacagggtttcaccatgttggccaggctggtctagaactgctgacctcttgtgatctacctgcctctgcctcccgaagtgctgagattataggcatgagccaccgtgcccagccctaaatgaattatttatacctttgttactactggactgactactagtaacatggaccttctgcatgtaaaatcacccctgcctatgaattagttatgttctcaaaggttgttcataagactacctgttcctaaattcaaagaaactaagaggagtttattggaactcttacattttaagagaagagagttggtttcctgaagctttcaagccaagtatggtcatgcactaaaaatgacattttagtcaaggacagaccacatgtatgacagtaggcccataagattttaatattttatttttactgtaaagacatagaaaaggtacagttgctataattgcctacattattcagcatagcaatatgcagtacaggtttttaacctaggagtaataggctataccatctaggtttgtgtaagtatactctatgatgttcatacgatgatgaaatcacctaacgatgcatttctcagaatttatccccattggtaagtgacacatgactgtatatgcttctcctttttgttgatctgtgttctcttagacattttaaaagcaagagacctgttttgatttacattaagtttttttttttttttttgtggcaagtatctgtgatgatctcagcaagtattgttggaaattctttagaatttctgttatcctgtctgcatcctaaatgctgtgatattaagggcagattcaacaggtgcttgtgtgggatacaagtttcatcagcagtgctttgaccagcaatgtcagtcrrctttcactgggttgtgctgttgtaataaacaatctctaaatctcagtggctttaatgacaacagtttatttcttgctcattttacatgcagctaggctggagttctctccatgtttcttatattgggactcaggctgaaggaacagccttatctgggatgtgctgctcctacggcagaggaaaggagcaagagagctggaaaaaacaggcagtagttcttaagacatctccttaggtatgggtgtcacatgcattggtcaaagctaatcaaatggtcctgtccaactttctattataaaatgcaccagcaggtctaggggtagtacccctaaacaaacacatcagtgcttctgcagcaaaatggataagtaacctggaagtgaatatttggaactaatgcagtctgtgatacaatgattaacctttaacttattgaataaacacttgtatcagttaattaactagaattaatattaggtttatcgccatctggtatttttgtagaacctctggccatatatgcaaatgatttttcattttattaataactctttcttacctttcatcatcagttgtatgatgtgaaacctttttcatggttttctatcagagccacattcccaacatgtattaaaaattaagcacagatgtaacagtcctaccgtagactaataagtaatttgactgagatgaaagtaaatcccttctattgggggaggacagagcttataggtttttgcaatggatcatacctatggagttatgtaatacatagcttagaggaactactgcttatagaacttttgactatttaaagcactatatgttgatacatataatcaaattagccagtattgtgaataaacacattrtgcttgagaatttttagtactgttttttatttgtttgtttgttctaggaatccaaggcattgtagaggygtatcggtcttgtcttcctcagataaaactctatggaccaactaatttttctccaatcataaatcacgtggccaggtttgctgctgcagccayrcaacagcagacagcttctgtaagtgctctatggccagggaatgggaagaatgtggattggtagcagctcctggtgccatttttctatgtttttggttygtcataatacaamgtcagggcaagatacaataacacagtcattcttggtttgggagtaacttttgttgttgttatactagtgatcgttaaaaataagacaacagcaaaacaacacttggcattcatgagtcttttatccttggaattaactttcttagataggttctaccaaaaaaaaaaaaatgcctatcatctacctttttgaagtagacataacaaattaagcttaaggaaagttaccacatcagatgctgttgcaagatttcttattgtactaaagatatttgaatgaggtaaccattacctattggaccgtggataccaaatttctcttagcctcagcatattcagaagtaagttaggggaaactacctcatactgttgttgaaaaggttagataattcatataaagtacacaatgcctgggtcagagtaaacactcaacatatgttaactaatattgtaaatcttattcctattctagacttaaatggcccaaaagatggagtcactacttgatgtaacattttactgctctctgaaaaggtttatcttaggtgacacaatctgggggatgatttcatcacttaaaccatatctatttttttgtgtgtattttagcttctaaaatttttgtattctaatattctaattctaataatttttgtatttatttgatcttctgagaatgaagtttccacttgcctccttgatagatactttgacatatttaatacttgagttaaaactgtttattcctagccttactgaaaggttaatctttgacatttagatgtcctgcttccatatattttgccaaccctattttgtggtctgctgcgcttttaatgaacctgcagtttttgtaagagtcaatttccttgtcatcagagaagcttagaatattttatgtggtggtagctagggtagagactggcaaggaaaatgaacaagaaagactggatgactcatcaagccagagatgccattagccattgcttgacttgctcaggggacatgttttctttttctggcagcaatattttgtgcttttgattattactgatggtgtgatcacagaccttgatgaaaccagacaagctatagttaatgcctccaggctgcctatgtccatcataattgttggagttggaggtgctgacttcagcgccatggagtttctggatggtgatggtggaagtctccgctccccattgggcgaagtggccatcagagatattgtccagtttgtgcctttcagacagttccagaatgtgagtaccactcctccctactcaaacactaaagtgactgaacacagacctttgcccatctacaaccaggcagttgaktaggtgtgcagggttagaggatgtgtgaacactttcctttgtccatttgagagctccgatttggtttagcagtgttgcttcaggatgttcattatgtgcttcttgcaggctatatgataaattgttttaaaatagtattgtgactctctcaagtattttatctttacctttgtaacaacaggaaaaaactcttatgtaactgtatgccaaatccccctcaagctggaagtttagtttgatgaatatctcttagaagactattttacccagtttactccagtagtaacatattgcagagctatagtacagaatcacaaccaggatacttacagtggtataatcaagatgcatcataaggatccccctggttgcccttttataaccacatccccttctttctacttctagcccttccttaaccttggaaaccacttactaatatagtcttcatttctataatcttatcatttcaagaatatcatataaatggaatcgtacaatatacaaccttttgggattggctttttttccactcagcatcactctcgagaatcaccaagtttttgcaagtacttctttttattgctgagtcatattccatggtatggatgcaccaccatttgtgtaaccgttaccccacagaaggacagctggctgttgcctgtttttctctctgatacataaggctactataaacatttacgcatgggtttttgttgttgttgttgtttgtttgttttgtttttgttttgagacagagtcttgctctgtcacccaggctggagtacagtactgcaacttccgcctcctgggttcaagtgattctcatgcctcagcctcccgaatagctgggattacaggtgtgcaccactatgcctggcaatttttttctattttttagtagagacagggttttaccacgttggccaggctggtctcaaactcctggcctcaagtgatccactcgcctcggcctccctaagtgctgggattacagccgtgtgccaccgcacccagcctattcatggatttttgagcaaacataagtttttattcctctgggataaatacctaggactacagttgctgggttatacggtagttgcatgtttaattcttaaagcagttgttaaactcttctaaagtggctatatcatttaacattcccaccagcaatggaaggggaggaagtggagtgttgtgattataaagtagtaatgttaggtagggatctttgtggtgttgaggcagttctgtatctcaattgtggtggtggttaaacagatctatccagatgacaaaattgcatcgaattatacagaaacaaacacacacacatacacacacacacacacacaaatgagtaatgtaaaactagaaatcagagtaagttctgtgaactgtatcagtgtcagctgcctggttttggttttgatactgtactatagttatgcaagatgttacctttggaggaatctgggtgaagggtgcayggtacctttctttactgtttttgcaacttcctatgaatctataaatgttgtaaaaaaaagtaaaaamaaattaataccaagtaagtgaaagaaccacatttaaaagttataaaacaacaacaacaaaatcatcaaatgttagaatgctggcaccgaaaaaggacttgacaaatgttagcagggatagtaatagcaatcataagtaacattggctagttaactcattccatatttcatgggcggttcctaagaaaaggtacaggcctatgaattagaattgcttcattttagtggctgctgaagtatccctagtcttttatgaaaaagccaggaaaattcagttgctaataaagtcacttttattttgtttttcacaaggctccaaaagaagcacttgctcagtgtgtcttggcagagattccccagcaggtggtgggctacttcaatacatacaaactccttcctcccaagaacccagccacgaaacaacagaagcagtgaccacttcaacagaattcttttgtgttmtgtggagcaatgccatctctcaccccaaatcgtgtatctgtcattctacgtactttttacccycagcatttatgatgtaaatctctttctctatggattatatctgtttaaagcattctttctaggttattttggggggacagtgccaagtccatctttgcccagtcaattcagtgattgatagcaatttacattaattgcagtaaagctctttggattagaaattagtgtggggaaagcttattctgttgttgtttttgtttactttcatatgatgaaaatgctgtgtttaagtgtttgtcaataggaagaatggaaaactgttgggatgatgtggtttgcaggttgctgtgcctgattcacagtgtatgttgtataagccartgtccatacctgattatgagagcttcttaaattatatgatatcaaatttgttcctgtaactctgtatacagtgcttttctgcaaggtaaaaataacctgtctatgcatctgatttttgctacagtttagacactgtggtttacaaaacagcatgcactcaacttgggactttatgaaaagtactgaatgagcaggaaaaggcrcatactcagttttttaaatgtacaatcaacaagtaaaaataacctcatgtaagtaagccatttttatttgcctttctagatattttattttattgtggaaaactgtaaacatggtcagatttggctttttttttcattaactgagcaagactttcaggatattgtagatgcacagatggtaggttgtcctgaattctacattattagattactttaattgagatttgttaaaacggttaggactgttttgtccaggaaagataagaggaccaaacatataargtgaaattcagaattccgtttccttctaactaatgaaaaactgcttactaaaaaaaaattttatactttccttgctaaggtcccatatattgatttgtacagawccacttagtcattttctcctttttttaagaaccattttcatctgatttttaaactcacgataccagttatctgttaatcaaaattgcattttacaatttaataatgtgatatttcctatgtctacagcataccttattaggtataaaacctactgcaacttagaaaaaggaaagaaaaaagaaracttttccaactgctgcattaagatagggtggattttatgtgctttttttttttaagagttgaatttcttttcctgacttttaccttttacagcgtattacttagtgaacattacattttcagaatagatcctaatattttattgagggcctatgtgctaaaaactatgcatatctatatattggccaattatctttaataatttaccttttgaaattgcatgtttatcatatatccttaagtggacacatacagtgccatgttgatgtgcctctcagttttattgaaaagctgccccacagcccatgtctcttgttctctgcaatgcctcaagggagtgagctctcaaccacagatagctgtggcttctcagaagcagctcattgccaaggccaggctgagaggggacctgcttgctgtggtggttgcctagcccagatgagcatttacctaccaccttcccacttggctagctgtcctttggatatgtgctgttaactggggaaggcatctaactagtagcctgctactccatagtatggctcaatagatgacacatcattttgacattatcaataggagaaaagaaaactaacccttcttctgattgtttggagccatagttgtctcagatgttctaattctctttgtatgcttggaaacagcatagatatgttgctgtggttttcagaattttctcttttaatcacaagaagccttttaaaaaatgacttacacatattctcaatgtacagtaaaacagacagaagtgagcttatctgtttgatgctgtggcagggtcccagtcactgggcatatcctccttctccttaaccagctycwcagcagcccctgagtcacctgcacaaggtgcttgggaactgctggttatgagcattcctggttttcttcagccaaataacaggtaatcactgtcaattggatttggtcttcattattttatattctgattttatcagaattattctattttaaaattgttttaaaatttaaaaacatttaattcatgatcatgttcatcagtagatgctattattcataagaactgtgattccagcaaactagggtaattggtgcctttttacagttttgaataaaagcatttacaatttctaaattatcagttttcacagtttcagcactcaacctcatcatacgctgatttaatattgttttacattaaaatagtccttttccctgttgtgccaccattcatttaagtgctgtttgttcttaaaatgcatttaaagaaaaattacccatattgactttcacacytcatataatcagatctattacaaatatatatcggagtgacggtgcccaggatagatgtaatatttcttacagatgctggcacagaggaaataatataccagctaatctagtcacctaaccttgtggttagaattgcaattttaagaccagaaaaatttgaagtctgatcagagatttacaactgttcattatagtggtgccttaggcaatctttccaaagtaaattcagggccccattgctacttatgccatatttggacatactttttttttyttcaattttgtaaacttcctggaaagctgtcttcactaagtatcccctagtctctatatatgtggttagtagtcatggaaatgacacataaagtacgccagaagtttgatggaacgtgttagaaactgttttgtgcttttatggatgtcatacttgacaatacatgtgtaagttactaatatatgaattgatgctaaatatatcttacatttgaattccttttggataaagttatttcttgatgtgacasagtagtgtgttttcatttttattctttacatgkgaccaaaacaatagaaaagttaaaaataaaatatagtgttttaggtggcctttgacttcatattttactgaattaaacaatttgggggatattattttatgggatttatttgtttaaaagatattgagtgggtccaagatactcttctgggtacagtaaaggaaagattcttagcttatagctagaatggcctgagattatcaatcatgttaagaaggatagtgtaaccacctaattttaaaaaaaatgttttaattgcttttgtcatgggcattgggcaggactttgccagtggtaaccaagacagccacgattgctgcctttgtagaaataatggtctagtgggggagagaaaacattgagcaagtaattatagagatgtgagatctgtgcgtgaaacaacatacagtagagagagacctaacccatctgagaggcaaggagcacttccctgaggatgtgccatgtaagctaagacctgaaagttagctaggtgaagaaggttaaaagcacttatgaagctgtcaggccaacagcaagtatagagttgaatgttctaggagtggacagaagtttgagtttgctgaaatataaagtataagagggaaagtggtaaaagaaatgaggtggagtggttggtggtgtttacatcctgagggccttttggggcaggtaagggagttcagactgaggcttagggtaatgggatgccactaaattgatttaagcaaatgaatgatgtgattatatttgtgcatttgaaaaaccagaggaccatactttttagggcagacagatgagttcagaagcccacagagttccacatggaaccctgtgaccaaatgtgggtctagtcgcaatggctttgccttggtgaaggccagatggcagagctgatagtggtcaccttctggcagacactcagctgtttggtcacatactttctaagtgtctgattctaggtctgtttccaaattctgagcttttcctgcctcactatcaaattgtctggtagacccgtatcttgttggttccttaatggtgcagaggctggttcagacctggtgataatatgtcttcaggaatgccaaacccttgcatgtagcaagaccatcacccttgtcacttgtcaccaaataacatcacttcctgatcatcactacatttggccagattctccagaaaaaccacagtagtttgaaatgtccatacagaattacactttggcttggctgttgattccttcctccaaaatgatggaaagtattattataagcagaattgtgacttcttactgcttgggaaaggagagctatctctggtctttcatcagcagatgcttacaaagcatttattggtgctcacaaagcaccaagttttatagcagcacctggtcttctaggactggaatcagaagaatttcaaggatggggagctttaaggagttctcagagaaaagtctgagtaggaaataatttgcttttttcaaccatcccttcctttcagtaagaagtattcaatttttctttgaacaaatatttattgggtagtctattactggcaatcaacaggggaattcaaacagagtaaaaaaattcttgctgacttcaaagcttatgatctaatatggaaaaggagacagtatatatgttaaacagaacaagagtgagcaaggtgagggactctgctgtgttggagtaagactggcccttcttgtgccttcaggcatccatggtgatgaggaaagagggtcccttgaatgctgcttctggaaagatgcttctcctgcccatcctgctatcattcattgctctccactaccatcctgtgatcactgttcatgccagtcctcacaagaagcccagaccattagtttccaacccctgtattctgactccatatcccacttctctccagtgccccatacccttccactctgccctcaagaactgggtcgttcattagcagaaatttctgatatcaatgtttttttctgaatagtcccttcaccttttaattctaattaaaacctgcctctcttgaagaacattgcttcctctgctgccctctcaagtgatggtaatttcctcttcctgatctacccctgggcttggaggctgcgtaggtaccctccttgatcctcccttctgctttcagagagcttttccctcctctttaaaacctctggctttgaatcttgcatcattagattagatcactctctatccctccttataataatactgctctctattcaacctcagcccacattctgaaggtcatatgctagaccttatcgttattgatttaaaaaaaaccctccctgatcgcattttcaagtattcagtttttcaataacaaccacttttgcagttcactccctttagtaccacaactctaacaagtctccctccatgccttcaatcacaaatcctaccaacttctcagtgtctcgatggtctggcccctcctgctctttccttttctaaacttcttttctactaatctctgcattgtcattcactccaaccacatgggctttcttgctcttacttgaatatgcctggcatattcctggctcagggcttttgcacttgccgttgccccttcttgaaaacccagcctcccctagccacttgggaaccttgctccctcacctccttcaggtctttatttaagcatcattcagtgaggccttttctgatcaccttatttaaaagtgtacctctttccctagtactttttatttttcttctctgtttatatttattttggccaggtgcagtggcctacgcctgtaatcatggcactttgggaggctaagttgggtggattggttaagctcaggagtttgagaccagcctgggcaacatggtgaaaacccattgtattactccgttctcatgctgctagtaaaggcatacccaagactgggtaatttataaaggaaagaggtgtaattgactcacagttcagcatagctggggaggtttcaggaaacttacaatcatggcggaagaggaagcaaacacatccttcttcacctggtggcagcacggagaagtgcagagcaaagttggggaaaagccccttactaaatcatcagatctcatgagaactgactcactatcaccagaacagcatggaggtaaccacccccatgattcaattacctcccatctgggtccctcccatgacatgtggggattatgggaactacaattcaagatggggacacagccaaaccaaatcagctgtctcaatacaaaaattagctgggtgtggtagagcacacttttggttccagctacgcaggaggctgtgaggtaggaggattgctggagcctgggaagttgtttttttgttgttgatgttgttttgtttttttttcttgtcctccctcacccactagaatgtcagttccaagaaatctgggatttttgcctgtttgttcactgctttctcctcagagcctagaagataccttggcatttagaaggcattccctaaataaacactgaaagaatgaatgaatgaagtatatactagagaatatataaagatagaagttagtttatatgagaaaatattgaagcttagaatgggaagattttctattcaatgtggagagtcgtcagggcagtgggaagatcttggagagcttcatggatggtttgacatttcatctgggatttaaaggttttatggggctttataatgtagagaaagcggaagagcctttcagcaaagaaattggcattgtcagtggcatggattaagaaagcgtgggttgagaaacattgttagtatagggagatgaatgtatgaatgaaccgttttgtttcataactaaatctctttattcacttttacaaatgtgatattgaaattcaaacaatattgatcttccacatattttatttctttattttttatagagacagggtctcaaactcctggcctcaagtgatctgcctgccttagccttctaaagtgctgggattacaggcataagccaccatgcccgaccacacatatttctattttaatgaaatctgtggttagtccttttctgaaggacatgctaaatctgaatttttcctctcagatttggaatataaatatggtcctaacatggcagacttgatcatcatttgaccccataaaatcttggcaaatgtacttgtttatttgaaaaaggcctgctttaggtggatgctacttttatcaagcctttccatgggcttcatgtttgaaaagcatgtgttatcttttgaccttgaactctgctttactctggcgtagccctggacaaagggtcttattacaaaacacgaatgttttgtaaaatgggacttggggtaggaatctttaaattcccttgcaagtctaagattctggtgtaaacaacagagcttgatttattcaaagctggatgcaagaagctgtatcacgagcccagttaataacccttagcatacactatatgctgaattctgtattgcttaggattcccagcagagaggattctcataaatttgtggcagaatcattgtgtgcattgggcagagatgactagaggtgcaaacggacagtaagggggctgtgacctttcaggtatcactccctttcctcatccgagggagttattatctagaaatgtcaggttgcattgcttaatgatgcacatttatttgacctttgcaccgtcacttctagtcacaaaagttatagtaggaaaaatacagtcagtcataaaaacccatagagaaaaacatcaaattttactacagcgtgtgggtatggtacttaaaatatcagtttcaagtatctttggtctgattagttataataaattccagaacagcataatgattaattaacaccttctaaagatttaaaaaattcccgtaggtgggtaaaggcattattgtaaatatagaacaggtccaaattactaaaagtacagattcttctcttattggttttctgtgtagcaatttttcatctaatacaactgaaataaaatagatttttatatatcaagggtgttcaatcttttggcttccctgggtgacattggaagaattgtcttaggccacacataaaataaactaacactaatggtagctgataagccaaaaaaaaaaatttacaaaaaaactcataatgttttaagaaagcttacaaatttgtgttgggctgcattcaaagttgtctgggctgcatacgacctgcaggctgcaggttcgataagcttattatatattatgttaagaggggaccaagttactcctttcctttgagtatacttagagctttcggcccattctaatactacaattggtgaagttgtgcaattcattttatttttctttttttaagtccttctttgtttatagacagagtctcactgtgttgcccaggctggattgcagtggcatgatcttggctcactgcaacctctgcctcctggttcaagtaattctcctgcctcagcctcccaagtagctgggattataggcacccgccaccatgcccagctaattttatttatttatttatttatttatttatttatttatttatttttgagatggagtcttgctctgtcgccaggctggagtacagtggcgcgatgtcagctcactgcaacctctgcctcccaagttcaagcgattctcctgcctcagcctcccgagtagctgggactacaggcatgcaccatcatgcctggctaattttttgtgttttagtagagacaggggtttcgctatgttggtcagcctggtttggaactcctgacctcaagtgatccaccccccttagcctcccaaagtgctgggattacaggtgtgagccaccggacctggcgttttaatttttttttttgagacagagtctcgctctgtcacccaggctggagtgcagtggcacgatctcagcttactgcaacctctgcctcccgggttcaagtgattcttttttcttgtgtctcatccttccaagtagctgggattacaggtacatgttaccacgcccagcca

SEQ ID NO: 96408 - DNA, 107507 bp, Homo sapiens
cagttgctgtgtgagggccaaggctgtgttggccaggagcccagggaggtggcagctgtctcgtcgccaagttcgccccttcacacacccccccaagagcctttcatggtcttttgctgccttataggggacagccagcagcttgttgggaggatgagatggtcccttggggcctgtggaaggagcctggggcccccattgttgtgaagtcttgtctgatgtgctgaatctcaggcaagactttcagccctgagagtcccctacccccaccctgggatgcagccccaggcttgaatttgtctacctgtcttaggtggcaaagccctgatcacactgtgggtggccccgccaggtctctctgcaagatgccccctgtctgctgaagtccttgctgttttctagggcagtgggctctagccttatgtttgcggggaaagggaggagcaggccaagtaggggctaccttcatactgtgatgcacaggagtgctgggagctggaagacaatgtccctgggctaaggggcagcggagagccttgacaataagagtttctcaaggaggccctctcagtcccaacagttttgacccctttcttccctccactctccccagagtccctgcaggaagcatcacccaggctggcagatcatggtagcagcagcgggggtggctgggaagtgaaacggagccagcggctgaggaggggccccagcagcccccgaaggccctatcaggacatggagtatgaaagacggtgagttatctgttctcagcttcccagacagcctaggcttgcgtctatgtgagaattgatccaagaaggtgctaggatggggcttctgggtagaggaaacagcatagcagatgatgggtttcttttcagcagacaggtgtttggcacctgttgtgagccaggacctgtgctaggctctgatagtgcagtgatgaatgagacatgagattgcatccttctcagtactcagggtgtcacagggacgctatgcagttaacgggtgggaggttgaggttggggctatagcctggggtatgagggatgggtgggaatggcaccatcagagtcaggatttgcccgggaccactaggggacaagccaggtcagatagtggaagactccagggacagtatgggctacagttggcatgatacttgctgggaatggatactctcagacagttatttcttcagctctgctatgaacaaggaatagctggaacactgggtaaaatacagaaatcctgagtaaaattcagtgatccctcgccatccaggtgattccgaggcaggtgacccagccatgacacttgaagattgcctagaaaagcagacctaactctctcagaaagcctctattaagactcaagagtcaatagctttataaaaagagaaaataatttttaaaatgttttacgaagtgtttcttctaccaccactccttttaaaaatgtagaattgtaatattttgttttctgaaaagtgagcccaaatttgagataaggtcatcacctagtgttattcagtcttggctttcattagaaatgttttttgaaagacatttgattttggacggtattcactagaagtgctctgtggccatttctgaatttgagtagctgacatacatactttgttcaaactttattaccaagtaaaaccattgacttttaaaagccctcaagtgcagaggtttgagttcatcatactttccagttcaaggtaggtttctgtcataggtcagcaaaaggcttcctcttgtcatgtttattttttcatttttattcccaattcccacctctgtgggcagctgctctgtcgtgtttgatatgtatccttctatgatacatatcatagaaaatgtatccttctatgatacatatcatagaaaatgtatccttctatgatacatatcatagaaaatgtatccttctatgatacatatcatagaaaatgtatccttctatgatacatatcatagaaaatgtatccttctatgatacatatcatagaaaatgtatccttctatgatacatatcatagaaaatgtatccttctatgatacatatcatagaaaatgtatccttctatgatacatatcatagaaaatgtatccttctatgatacatatcatagaaaatgtatccttctatgatacatatcatagaaaatgtatcatagatttatcatatagatcattttcatataaatgtatcatatagatacatgtatcatataaatacatacataaatgtatcatatagatacattttcatagaaaatgaaaatatgaagtgttgttttgagtgactgtgttttcagttgacacacatggcatggtgccacagtcttcgttttgtttcctgaactttgtattactcagagtgggaggttttttttgttttttgttttttgttttgagacagggtgtctctatgttgcccaggctggtctcaaactcctgggctcaggcaattctcctcccttggcctcccaaagtgctgggattaaaggcatgagccgctgtaactggccaacagtgctgtttttttttgtttgtttgttttgttttgttttgtttctttgttttgagaaagagtttcactcttgttgcccaggctggagtgcaatggcgcagtcttggctgaccacaacctctgcctcccggtttcaagcgattctcctgccttagcctcccacatagctgggatttcaggcatgtgccaccacgcctggctaattttgtatttttagtagagatggggtttctccatgctggtcaggctggtctcgaactctcgacttcaggtgatcctcccatcttggcctcccaaagtgctgggattatgggcatgagccaccacacccggcacagtgctgtatttttaacatctgtctgtattgccatgtatatgttactactttgtttctaattgctggcaagggcatcatggggcatgtctactgagttttacttaatacttcccccaagagtagatgcctgttgttaattttgatgtgctagcatcattttttttttttttttttttgagacggagtttcgctcttgttgcccaggctggagtacaatggcgcgatctcggctcaccacaacctccacctcccaggttcaagcaattctcctgcctcagcctcccaagtagctgggattacaggcatgcgccaccacgcccagctaattttttgtatttttagtagagatggggtttctccatgttggtcaggctggtctcgaactcctgacctcaggtgatccgcccgcctcggcctcccaaagtgttgggattacaggcgtgagccaccgtgcccagcccaacgtcaccttttttgctttatctgttaatgtatagtgttttttgtttgtttgtttgtttgttttgagatgagtctcgctctgtcacccatgctggagtgcagtggcacgatctcggctcactgcaaacttcgcctcccgggttcacaccattctcctgcctcagcctcccgagtagctggtgctacaggcgcccgccaccacacctggctaattttttgtatttttagtagagatggggtttcactgtgttagccaggatggtctcgatctcctgacctggtgatccacccgccttggcctcccaaaatgctaggattacaggtgtgagccactgcgcccagcctaatgtagtttttaccttttgcattcagatctttaatccatctagattccactcttgaatatggcatacggtaggctccggttttattttcttccatatagtaggcagtttttccagtaccacctcctaaatagtccattctttctttattgatctgtggtacctcatctgatttcaggttccctcatgtacatggatccgtcttgagtgatgtgatttgttccattggtctatttgcacattcttgtgccagcaccttactgtttttattattatggctttatagaatgtcttagtagctcctttgcacttatttttcaaagctggtttaatcatttatggggctttattatatatcaaaagttatcaaagtccctcaaaaacaacaagaattttgatcgatgttacactgaacttctctattaatttggggaaaattatctttgtaagtagtcatctcatctaagacctttgtagagaatattttgaaatttatgtaaagagcataaaaagctttcattttcataaatggaaatacaggtcttatgtattctttgttaaagtaatccctaggtacttcagtcactttcattatcttttttttttttctcgagacttggtcttgctctgtcacccaggctggagtgcagtggcgacctccacaggctcaagtgatcttcctacctcagccttccaagtagctaggactacaggcacgcaccaccacgcccagctaattttttgtagagacggagtttcaccatgttgtccaggctgatcttgaactcctgagctccagcaatccacccaccttggcctcccaaagttctgggattacaggccattatcttattttttaaaaaatatttttcatgctggtatttgctggggtagaggaaagctgttgatttctgtaagttacccctgctgtatgcccttattatttctaatacttcattgttgattctgatgttctttctaagtagttggtcatattgtatgcaaatctatcctgtcacttatttatttttcttcatttatagtattgtccaggacttttagtaccatattaaatagtataagtgatactgggtacacaaattaagatttactttggctggttgtggcagaaagtccaaaggataatggcttagacaagatagtttacttttctttcccataaaggcagtctgcagaagagcaattaatctagggctgacaggcagccccttctgtgtagccatcctcagcacatggcagttgagacagtaggaagaagggagaggaataaaagggaatgtgtctaaagtttctccattaagtatggtgcatgcagtaagtttttagaatgtatcctttaataaatcaagaaaattatctaatcttcgtttgctaagattgaccataaataagtattgaacttcaaaatcctgtgctttttttctccctttgtccattaatttcataaattgtggcctggcatggtggatcacagcaccttgggaggccaaggtggttggatcgcttgaggccaggagttcaagaccagcctggccaacatggtgaaacctcatttctactaaaaataaaaaaatcagccaggcgtggtgaagcatgtctgtaatcccagctactggggagactgagacatgagaatcgcttgaacctgggaggtggaggttgcaataagctgagatcgtgccactgcactccatcctgggcaacagagtgagactccatatcaaaaaaataaataaaaattttgtaaattgcattaaatgatatccttggcattcttgagctataccccacttgatcatggtatgtatgtatatgtttatgacttcttactttgaaaatatctcaaatttacagaaaggttgcaagaaaaagtataatgaattcccatatatcctctactcagaattacttgttttaagtattttgccacatttgctctatcactctatatctttttttttttttttttttttttttgagacggaatcactctgtcacccaggctggagtgcaatggcgtgatcttggctcactgcaacctccgcctcctgtgttcaagcaattctcctgcctcagccttccaagtagctgggattacacgcgcctgccagtacgcctggctaatttttgtatttttattagaaacgaggtttcaccatgttggtcaggttggtctcaaactcctgacctcaggtgatccacctgcctcagcttcccaaagtgctggaattacaggcgtgagctaccgcgcctggcccaccctatagctctatatctttacatagacacacacacacacacacacacacacacacacacacacacacgttttttttaatcgtttgagttggtggcagccatgacttttctttttgagtcagagtttcactcttgttgcccaggctggagtgcaatggtgcaatctcggcccactgcaacctcttcctcctgcattcaagcgattctcctgcctcagtctcccaagtagctgggattacaggcatgcgtcaccacacccagctaattttgtatttttagtagagacaggatttttccatgttgatcaggctggtttcaaactcccgacctcaggtgatccgcccatctcggcctcccaaagtgctgggattacaggcatgagccaccacatccagcctgacatgaccttttaagtctggcagcatgtacgtcttaagaacaaaggtgttctcttccataaccacaatatacttatcaatatcaggaaattaaacaattatatagtacttttattctatataaagcccatattcagatgttatcactcttctcaataatgtcctttataatggttttccccaatccaggatccagtccaagatcatgtattgcattgagctccttgtctcctttaatctgaaacagttattctatctttgtcttttatgaccttgtcatttttttttttcctgaacctatggattatattgaaagcatgttttaaagttagttgttttatagaatgtttctcagtttggatttttctgatgcttactcatgagtttttggcagaaatgttatttaagtgatttatgtatatttttaaaaccttgttagattttattagccattgtatcatctaggatatctacacctgtatttatcagtgaggtagtccaatatttttattttcagtatttatctggcattggaatcaaggtagcctcattacatgaattgggcagcctttgttattctctctttattggagaaacttgtataagaattatctgtacctcgaaaaacttggtaggactcacctttaaaagcatctggaggctgggcgcagtgggctgaggcagttggatcacttgaacccaggaattcgagacgatcctgggcaacatggcgaaactctgtctctacaaaaaatacaaaaattagctgggcgtggtggcaggtgcctatagttctaactactcaggaggctgaggcaggaggattacctgagtctgggaggttgagactgtggtaagccatgatcatgccactgcactccagcctcagtgacagagtgacaccctgtctcaaaaaataataaaataaaagcatctggagctggtttttgattaccatttcatctcttctgccaattttagcattttatattttctagaaatatactcattttgtgaagatcctcatatatgatgattcagtccagcatcctagaaatgctttataaaagggatatgcctttggaaggtgtttgttcagagtgctttggtggccaattaaaaatattcctttctatccaaatatgttcccttcctgagtttagatagcaagagttcaatacctgaatttatttggtttggatattggatgtcaagagagttcaggataatttcatctgaaaatttataaatttattcatatctgttcagttcttgattttttttcctttttttttttgtttgtttgtttgtttgtttttgtttgtggagatagtctcactctgtcttccaggctggagttcagtggtgcgatcttggctcaccgcaacctctgctttccaggctcaggggattcttgtgcctcagcttcctgagtagcaaggattacaggcccgtgccaccacacccggctaatttttgtattttagtagagacggggtttcaccatgtttgccagactggtctcgaactccgtacctcaggtgatccactcgcttcagcctccgaaagtgctgggattacaggtgtgagccaccatgatggcccagttcttgaattttgatgactacagttcaaattgattgtatcaagaaccttataactactcataccactgacagtgatttcttctctaggcatttacggtagggaaacaatttggggccaggtgtggtggctcacgcctgtaatcccagcactttgggaggccgaggcgggtgaatcacgaggtcaggagtttgggaccagcctggccaacatgatgaaaccccatctctactaaaaatacaaaaaattagctgggtgtggtggcaggcacctgtaatcccagctactcgggaggctgaggaaggacaatcgcttgaacccaggaggtggaagttgcagtgagccaagatcacgccactgcactccagcccggaggacagtgcgagactccctctcaaaaaaaaaaaaaaaaaaaaaagagtttgggttccaagctgagttcgtggggacagggactttattttgttcacagcagtatccccattacctagaacagtacttatcgtatagccaatgttaggttaatatttgttgaatgaatgcatgaacaaataattgtttaaaaaaatggaagtcaaccaaaatgtttgaaaacatgtttaatggatatttgccccatttgttacttatctttatggtgttttccatagtttagtgtgaaatttcaagcatgtagcaaagtttaaagaattttacaatgggcctggtgcggtggctcatgcctgtaatcccagcactttgggaggctgaggtgggcagatcacgaggtcaggagatcaagaccatcctggctaacacagtgaaaccccatctctactaaaaatacaaaaaaattagccggctgtggtggcgggcgcctgtagtcccagctacttgggaggctgaggcaggagaatgtcatgaacccgggtggcggagcttgcagtgagccgagatcgccactgcactccagcctgggcaacagagcgagactccatctcaaaaaaaaaaaaaaaaaaagaattttacaatgaacaccatatatacccatccactagattctttttttttcttctttctttcttttttttttttttgagatggagttttgttcttgttgcctaggctggagtgcaatgacacaatctcagctcaccgcaacctctgcctcctgggttcaagtgattctcctgcctcagcctcccgagtagctaggattacaggcacgcgccaccacacctggctaattttgtatttttagtagagacggcgtttctccatgttgctcaggctggtctcaaactcccgacctcaggtgatctgcctgcctcggcctcccaaagtgctcggattataggtgtgagccaccgtgcccagcccactagattctactattaacgttttaccatacttgctttattacatatttacttctaagtttctcgtattttttacactctatagagatttataatttttacaaagccagatttattcattttccttttatgactgctgggatttgtcttgctgaggaaggccttccccactcttaaggtgatacatttttttcttatgttttctaatatttgttttctttttttaaaagttcaacttttattatagattaaaggatacacatacagtttttttttttaactcagtgaagatgtctgcacagcaggaatcatgtgggatgggatggccctttttcctaacgctggaccacttgatgttctcttccatcttcccccaaccctcatttagatcatgacatcagaaaatcaggttaaagttaagaaaaagaagaatcagatcattggggattcttagtagtagcatcgccattgggagctgctagcccagcgggtattccccatgccacccctctggatcttggctccatgggtactgggaggaggccttgttggccagggaggccacgctgtgctgctagaagctgggcgacatactggtggtgcagcagagtctcgggtgcggcagcttggaggtactacccacataggcattggccttccagggtgcatcctggcccatcatgctgctgcagcagctgtggctggtgctgcatgtctgcttgcctgctaggctgctcgccggcttggccaggagcttgctgtgcctcagtggggccacatcccctgtggctgctgtggctgtgctctggtcttggaaaatggtggcgatgtggttccagaggtctgtgaagaacctgctcacaccctcgtaggctgggaaggcgttgatgtcgatgacggcatgctgccccatctggttgttgatgatgatgtcggtgccgaacagcaatactcccagtgcctgccgcagggcccgggggagttcccggatgacctctttgctcggctgctcttgaacagaccagaccccttgatcttgtccagctccatcaggaccaatgatgactctggctttgacacactgtggctattgaggaagatggattcgtggtcacattgtgtccgcggagaatttcttgagcaagggcctctggaccacggtgtaggacttgctgaccacgaacaccttgtacagaacggtgttgtggttgatgaaattctagaccacacagggtggctgtatgccattcaggccctcctgattgaatacagtagacatctcgtgagagttggtgccgtgagccactctagttttgcacatgaacaggaaagccaggctgttcttctccagcagccacatggtgtcatccccgcacaggcttgtgacctccatgaagggcagcaagcagatcctgccgccttccatgtagatctcaatcttccagatgagtttgcaggacttggagcggtcgagcagggttctgacggcagggaaggagtccaggacgatggtttcagggtgggcatcgatgtagtcctgaaacctgtgcaccagctccagggactggctgtcattctggtcggcttcaaggatgacatcagtcaacttgtgaatgatgacgtccaggggtccctgctcctcgattggccggctgaggttcagctgcatgacttttttttttttttttttgagatcagtctcactcagtcgcccaggctgaagtgcagtggtgtgatctcagctcgttgcaacctctgccccccaggttcaagcgattctcctccctcagcctcccgagtagctaggattacaggcacttgccactacggctagtttttgtatttttagtagagacagagtttcaccatgttggccaggctggtcttgaactctcgacctcaggtgatccacccgcctcggcctcccaaagtgctgggattacaggcgtgagccaccgcgcccggcctcagctgcaccacttctatccctcacttcctgcacacctccgctaaagccgggaaattgagcttcttgattttcttctcatgcagccagtagccaactctcttccctttcataaaggtctatatcttcctcctcgggcaaggagcctgggtcctgaggaaattgcccataggctgagtctgttggccagtgagcgctgggagcgtgcgggcaccccctggtggcaggggtgtggaaagggctcggggtgcggggttagggccgcgtggtgtcacggtctccacaacccccccacccctggccacccagctggagctcacggcccacatacaggttgttctttttttcatacgcagtttcactctgtcgcccaggctggagtacagtggtgcgatcggctcactgtaacctccgcctccctggttcaagcaattctcgtgcctcagcctgcccagtagctgggactgtaggtgtgcaccaccatgcccagctaattttggtattttttagtagagacgaggtttcaccatgttgcccaggctggtctcaaactcctgacctcagtgatctgcccccctcggcctcccaaagtgctaggattacaggcatgggccaccgcatctggcctgtacaggtttttttacatgggtaaattgcgtgacactgaagcttgaggccccgttgatcccatcacccaagcagtaagcttagttcccgacagatggtccttcagcccatgccccccttcccaccttcccggtctagtgatccccaatgtctgatattccaatatttacattcatgtacattcaacatttaactcccatttataagtgagaacatgcagtacttggttttctgttttcgtggcaggtggcttaggataacagcctccagctccatctatatggctgtgaaggacatgattttgtcttttttatggctgcatagtattccatggtgtatatgtaccacatttttctttatcctgtccactattgatgggcattcaggctgattccatgtccttgctattgtgaatagtgctgcagtggccaggcgccatggcccatgccagtaatcccatcactttgagaggccgaggtgggcagatcacctgaggtagggagttcgagaccagcctgaccaacatggagaaacgccatctctactaaaaataaaaaattagccaggcgtggtggcacgtgcctgtaatcacagctactcgggaggctgaggcaggagaatctcttgaaccaggaggtggaggttgcggtgagccgagattgcaccattgcactccagcctgggcaacaagagcgaaactccgtctcaaaaaaaaaaaaaaaaaaaaagtgccgctttgaacatgggtgcatgtgatagaataaattattttcctttgggtatatacccggtagcaggattactgggtcgaatagccaaagcaatcctaagcaaaaagaacaaagccagaggcatcacattgtccaacttcaaactatactgtaaggctacagtaatcaaaatagcatggtcctggtgcaaaaacagacacataaaccagtggaacagagtagagaacacagaaataaacccgcacacatagaaccatctgatctttgacaaaatcaacaaaagtaagcaagggggaaaggactccctgttcaataagtgctgggataggtggctagccatattcagaagaatgaaaccggacccttacctctcaccatatacaaaaattaagatgtaagacctcagactataaaaatcctagaaggccaggcgcggtggctcatgcctgtaatcccagcactttgggaggccgaggcaggcggatcacctgaggtcgagagttcgagacgagcctgaccaacatggagaaaccccatctctactaaaaatacagaattagccaggcgtggtggcgcatgcctataatcccagctacttgggaggctgaggcaggagaatcacttgaacctgagaggcggaggttgcagtgagccaagattgtgccattgcactccagcctgggcgacaagagtgaaactctgcctcaaaaaaaaagaaaaaaaatcctagaagaaaacctaggaaatgccctcctcgatacagggtttggcaaagaatttatggctaagtccccaaaagcaattgcaacaaaaccaaaaattgacaatttggacctaattaaacagcttctgcacagcaaaagaaactaccaacagagtaaatggacagcctacagaataggagaaaatcataagctacacatctgacaaaggtctaatatccagaatctacaaggaagttaaatcaataggcaaaaagcaaaatttccaattaaaaaatgggcaaaggacatgaacagatacttctcaaaagataacatacaagtggccaacaaacatgaaaaaatgctcatcatcactaatcatcagagaaatgcaaatcaaaaccacaaggagacaccgtctcatgccagtcagatggcaattattaaaaagtaaaaaaaaaaaaacatgttagtgaggctgcaaagaaaagaatgcttatatactgttggtgggaatgcaaactagtttggtcatgggagaaagcagtttcgagatttttttttggagagagagatttctttaatatttttatggtttctatttgggaatttaagttttcacccatccataatttatttggcgtaagaagtgaggtaaactttgttttcttagtgggcaacacttttctgtgaaggatcagatagtaaatatttttggcattgcattgcaggactgtctctgttgcaactaaactgaaagcagtcacggacaatttatgaatgaatgaatatagctgtgttccagtaaaactttatttaattaattttttttttgaaacaaggtcttgctgtgttgccctggctggctggagtgcagtggcgcgatcagagctcactgcagcctctgtctccctggctcaagggatcctcccacctcagcctcacacacagctaatttctttctttctttctttctttttttctttttccagtagagacgaggtctgactactgtgttacccaggctgggtctggaactcaagggttactcctgccttggccttccaaagtgttgggattacagatgtgagccactacatctggcctccactaaaactttatttaaggagactggatttggtccactggctatagtttgctgattcctaggccagatagttattgtaactattatttattgactaatttgttttccccttgttagtttgaaatataacctttggcttatactgaatttccaagtgtgtttttgtatgctgtagattctattctatttcactgatctgtctattcatgttttaattaatttacctttataatgttttaatatttgctagagttcctctcaactcattagttttttttttttttttttttagtgagagagagagagagagagagagagggtctggctttgtcgcccaggtgcagtggcgcgatcatggctcactgcatccttgacctcctggcctcaagtgattctcctgcctcagcctcccaagtagctggggatacaaacacgcaccaccacgcctaactactttttgtatttctttgtagagatgaggttttgccatgtcacccaggctggtcttgaactcccgggctcgagcgatccgcccacctcatcctcccaaagtgctgggattaggggcatgagccactgctcctggcttatcctttgttttttgtttttgtttgttttgagacagagtctcactctgttgccaggctgtagtgcagtggcgcaatctcggctcactgcaatctttgctccctgggttcatgagattctcctgcctcagcctcctgagtagctgggattacaggcacgcgttaccacacccagctaatttttgtatttttagtagagacggggtttcaccatgttggccaggctggtctccatctcctgatctcgtgatccgcctgccttggcctcccacagtgctgggattacaggcgtgagccactgcgcccagcctgtcctttgttttttaaaacaatgctacagtaacttttttgtacatgtgcaagtatgtgtatactttaaattcccagaagtagaactgtgggtcaaagggtatatagatttttagttttgtcagctattgccgaattctcctctataaggattattccatttttaactcctaccagcaatatgaaagtacctgttttccatacagtcttgctgtttgttttcaaacattggactgttgtaaatctgttagattaaaaatgttctatcaaatcttccttactagtgattattgtatagtacaatactatattatttaatagttatcataaataataattttaatataactccaaataatgtagatactccctcctctaggaggtagagcttaattaccctccttttgactgtgggctggtcttagagactcacctctaaagaatagagtatggaggccgggtgtggtggctcacgcctgtaatcccagcactttgggagggcgaggggggcggatcgtgaagtcaggagatcgagaccagcctggccaacatgatgaaaccccgtctctactaaaaatgcaaaaattagctgggggtggtggcaggtgcctgtaatcccagctacttgggaggctgaggcaggagaatcgcttgaacccgggtggaggttgcaatgagctgagatggcgccaccgcactccagcctggcaacaaagcgagactccatctcaaaaaaaaaaaatagagtatggagagagaaatagagaaattttacagggaagaaacctggcagacagcaccttaactaggtgatcatggttaacatcaccagagataagtcatgttgttatcatgtactcttctgtgatatgatcagaagggcatttcactatctcacttctgttgtatgcttctccaaaaaaaaaaaaaaatccataatcttaggtctaatcatgagaacacatcaaacaaaaccagttaaagggcattctacaaaatacctggccagtgctcttcaaaactgttaaggtcattaaaaacaaacaaggacagactgataaaccttcacaggccagaggagactgagggaacatgacaactacatgtaatgtaatatttaggattaaatcttggatcagaaaaaggatattaacgagaaaattggtggaatcctaatataatctgtagtttagttaattccttagttttgacaaatgtgccttagttttgttaatattaggggaagctgggtgaagggtatacagggattctttgaacttttctgcaaatgtaaaattatttcaaaataagaagtttgacttcatcaaaattagaaacttttgtttatttttgttggttttatagcgatgagttttcggtatgttgcccaggctggtctcaaactcttgggttcatgtgatccgcccgtcttggcctcccaaagtgctggaattacaggtgtgagcccaccacgcctggccacaattagaaacttttggaagtctctctgaacctattctggttcagggactgctggtaacaacaacaaaagattagaaacttttttttttgagacgtagtctcactctgctgcccaggctggagtgcagtggcgcgatctcggctcactgcaagctccgcctcccaggttcacgccattgtcctgcctcagcctcccaaatagctgggactacaggcgcctgccaccacgcctggctaattttttttttttttttttttttttttttgagacggagtctcactctgtcgcccaggctggagtgcagtggcgcgatctctgctcactgcaagctccacctcccggattcacgccattctcctgcctcagcctcctgagtagctgggactgcaggcgcccgccaccacgcccggctaattttttgtattttttagtagagacggggtttcaccgtgttagccaggattgtctcgatctcctgaccttgcgatctgcccacattggcctcccaaagtgctgggattacaggcgtgagtcactgtgcctggccgattagaaacttttatacttccaaagacactatcaagaaagtgaaaagacaacccacaatgggaaaacatatttgtaaataatatatctggtaagggattaacatccagaatatatgaactcttacaacaacaaaattatccaatttaaaaatgggcaaaggattcatgaccagcttgacttaacatggtgaaacccctgtctctactaaaaatacaaaacatcagccaggtgtggtggcaggcgcctgtaatcactgctactcgggaggctgaacctgggaggcagaggttgcagtgagctgagatcatgccactgccctccagcctgggtgacagagttgtactccatctcaaaaaaaaaaaaaaaaattggcaaaaggacttgaatagacatttctccaagaaagatatacaagtggccagtaagcacatgaaaagatgcaaaataacaagtgttggtgaggatgcggggaaattggaacccttgtgcaacactggtaggaatgtaaaatggtacagctgctgtggaaaacagtttggcggttccagaaaaagttaaacacaggattaccatatgatccagcaattccactcctagatatatacccaaaagaattgaaagcaataattcaaacagatacttggacaccaatattcatagcagcgttattcacaatgtccaaaataaccaaggggtggaaacaacccaagtgtgcacgaacagatgaatgaacaaaatatgcatactacaatagaagagtattattccaccataaaaaggaaggaaattctaacatactgccttgtggatgaaccttgaaaacatgccaggtgaaataagctagacacatagggacaaatatatgattccactactatgaagtacctagaataggcaaattcattgagacagaaagtagaatagaggctgtggggtggggtgagaattgtttaatgggtacaaaggttttgtttgggatgatgaaaaattcctggaaaaggtgatggttgcataacattgtcagtatacttaatgccactgaattagataattaagaatggttggctgggcgcggtggctcatacctgtaatcccagcactttgggaggccgagacgggcggatcacctgaggtagggagttcgagagcagcctgaccaacttggagaaaccctgtctctactaaaagtacaaaattagccgggagtggtggtgcatgtctgtaatcccagctactcgggaggctgaggcaggagaatcgcttgaacccgggaggcagaggttacagtgagccaagattgcgccattggactccagcctgggcaacaagagtgaaacttgtctcaaaagaaaaaaaaaaaaaaagaggctgggcgcggtggctcacacctgtaatcccagcactttgggaggcygaggcaggcggatcacctgaagtcagaagttcgagactggcctggccaacatggtgaaactccatctctactaaaaatacaaaaattagccaggcatggtggcacacacctgtagtcccagctactcgggaggttgaggcacaagaattgcttgaggcccggcccagtggctcacgcctgtaatcccagcattttgggagaccaaggtgggcagatcacgaggtcaggagttcgagaccagcctggccagcatagtgaaaccccgtctctactaaaaatacaaaaattatccgggcgtggctgcgtgcatctatagtcctaactactcgggagactgaggcaggagaatcgcttgaacccaggaggcggaggctgcagtgagccgagattgtgccactgcactccagcctgggtgacagagcgagactccatctcaaaatttaaaaaaaaaaggatggttaaatggtaaatgtatattttaccacaatacaaaatgatctagaaaaaatatacaaaaattaaaattttaagtttattttaggccatgtgcagtggctcccgtctgtaatctcagcactttgggaggctgaggcgacaggctcactttagtccaaaagttcaggatcaggctgggcaacatagtgaggtcctgtatctacaaaaaatttgaaaattagctggatgtggtggtgcattcctgtagtcccagctggttggggctgagatgggaagattgcttaagcccaggaggtggaggctacagtaagctatgattgcaccactgcactcagcctgggcaacagaccgagaccttgtctcaagtaaaataaaatttattttgaaacagtctatccaatgtagttttaattctcatctttctctctctcttttttttttttcttgagatggagtctcgctctgwcactcaggctggagcgcagtggtacaatcatagctcactgtaacctagaactcctaggctcaagcagtcctttcgcctcagcctcctgagtagctgggactatagatgtacaccaccatgcccaactaatatgttgtggtggtgatggtggttttgtaaagacgggatcttgctatgttgtccaggctggtcttggcctcgagcaatcctcccactttcaccccgcaaagtgctgggattacaggatgagccatctcacctagcaaaattttcttttttttttttttttgactgagtctcgctctgtcgcccaagctggagtgcagtggtgcgatctcggctcattgcaacctccgccttctgggttcaagcgattctcctgtctcgccctcccgagtagctgggactacaggtgcgtgtcaccacacccagctgattttttttatttttagtagagacggggtttcaccatgttagccaggatggtctctatctctggaccttgtgatccgcctacctcaccctcccaaagtgctgggattacaggtgtgagccaccgcgcccggcaaaattttcatctttcattatgagtgagatagagcatcttttcagatacacatcattgatatttttatctgtgaattctgtttacttcctttccccatattttttcctagtttattgtcttttgacttggttaatgatgttttttatttttctgtttttttctccaagcaaaagtattttatttttatgtagttgaatttagtaatcttttctgtggcttctggatttggattataggtttccccatttcaagattataaagaaattattcagttattctatattttcttttatgatttcatttcttttttttttttttttttaagacagagtcttactctgtcacccagactggcagtggctcaccgcagcctccgcctcccgggttcaagcgattctcctgcctcagcctcccaagtagctgagattacaggcgtatgccaccacacccagctaatttttgtatttttggtagagatggggtttcaccatgttggccaggctggtctcgaattcctgacctcaagtgatctgcccacctcggcctcccagggtgccacccacgcctggcctatggtttcatttcttatgtttaaatctttgatctatttcaaatatatcctggtatatatgtgaagtatagtcataatatcttgcacatgtctaggtatttaacctttttgatgaattgtacttgggacctttctattttctaaacagtggttacattaatttgtacccagcatccttactgatttattatttataacaagtttttcagttgattctcttaggctttgcaggtatactctcatatcatttacaaataatggtaattttaccttctcctttccagcttttaacctcttttcttccttccctgtttaattgctttagctagtgtctttagaataatgttaagaatgctgttgataacggacattctaatgttgttcccgaccagaattggaatcctgttagtatagtagcattcttctgtggcatctagttttttctattttaaataaacatatattggttgctcttagaatgcttttttagtcattatttgttcaaaataattgttgagcgcctactgagtgctagggaatatggcagtgagctaagggtcccctcatttcctggagcccatattctagtaattttttaactcaccaaagaaacacagattaggccatgcacagtggtggacgcctgtaatcccagcactttggaaggctgaggtgggtggatcacttaagcccaggaatttgagaccagcctggcaatgtggtgaaaccccatctctacaaaaaatacaaaaatgagctgggcgtggtggtgcgtgcctgtggtcccaactactcaggaggctgaggtgggaggatggcttgagcttgggaggttgaggctgcagtgagccctgataatgccactgccctccagcctgggcaacagtgccagatccattctcaaaaaaaaaagaaaagaaatgcagatgaaatcagctttgagatcattattttacagttattgcggtaggagaaattttaatgaaagagctgctagtgtcggcaaggtgacagtgaagcaggggcaggggacgtggtgcaagacagggaggaggagcctcacccccggggatcctgcaagccgaatgagaccttggtgagcattttggtatttgatcctgagactgagggggagccactaaagggagtgagatgggtttgagtggctttgccttagaaagcactcacatttgggatttgggatgtagagactgaactggggaggtccaggtagaagtgaggagaacagccaggccacaaccaaggtgccccatgagggaagccagtggcatggaccagagagtgacatagggatggagagaggcaggttgcacttcagagatgtggagcagggatttaggaatccctgtatgggggcgggcctgagggcttccaaagaatagagtagggggagggaaaaatagaaagtttacagggtgagaaacctggcagacactgccttaaccagatgaccatggttaacatcaccagagctaagtcatggtggtatcatgtacttctttctctgataggatcagaagggcacctcacttctgttgtatgctcctccaaaaaaaccaaaaccctacgagaacacatcacctgggcctcttgcaccttttagaaagggcaaccttctgatccctccccatccttcttcctccactagtggtggtcgtggtgacaggactggccgctatggagccactgaccgctcgcaggatgatggtggggagaaccgcagccgagaccacgactaccgggacatggactaccgttcatatcctcgcgagtatggcagccaggagggcaagcatgactatgacgactcatctgaggagcagagtgcggaggtgaggagggggcgcgctgcgccaggcctggctgggatgggctcccaagggccctctgtgtctggctgcagcaccgtgtgcaggcagctctccactcccgtgccttcagactgtgctcggtggctttgcctcacctggagggcctgttcccactcccctctctgagggctcctctcccaacctgggtctccctggcttccacatgcttggctctgtacttctgagggcccctggccaccactctttccctttctccctgttgttcagttcgggcccatggctcactgtgaaccctgtactgcccgctcccagccaacttgggcacttgaagagcctcttccatgggacccggcgtctggggttgggaggacaacaaggggactgcagaccaccaagctgaggagctctgggaggccagccatgggcattcccagtggtgatagagcccctagacagaagggaaggacccttctggagaagccagtgccatgttgggtagttcaccctagcctgcgggatgaggcgcgatgtttacaccatcagggagcccccacccgaggggaagaaacaggcttgccttaggggaatcccagttggaggggcagtcagggacctggtccatgcgagcaggcagctctcctgtccagcaggctgggaagggagttcttgcaagcccagccctggggggcagtctgtgagctgcccactgccctctggagggtccagggcaaaaacccctttggtggactgccaggcttctccagtggcagctgtcaagctgtgcccagacgtctccaggagcactgggccctggccagggtgggaatggagcaccaagttatctggtgcttccccactgtgggcgggagggctttggccccaggcctgctctgcttagtcctggaatggatggattgggcaacagcccagagcccaacagccataccgttttgagcgtggtgtgtggtggaggactggccaaggctgaggatcagggactgaggagggagtgtctgcagccctcacaccacctccaccagctcctgctgcctggctctggctgagatctgaagctgttcttatgcccccagcttggttgcagggtggaaccgtaggagacatgcagccttcggtggtacagtgaagcaattgagcacaccccctgagctggccagagaggagaggaaaatcaagggtggggtctggtgtgctgaccccaggccatcttgccccaaggaggtttaagctgtgtcttgtcagctacctttgggagttccccccacaccaatactgtcacctacctctccccacccactgaaggcagcccccaaaaggaccccatggagaatttacagtcccagaaagattgcaggccggggcctgcccaccctgcctgcctgagcctttagccggagcccgcacatccctggctttcagagcctgcctgcctcacagagccagcggccagctcctaggcctgcccagactgactgcccgtctggtgtcactcatctcattctgtcggccaggattcctacgaggcctccccgggctccgagactcagcgtaggcggcggcggcggcacaggcacagccccaccggcccgccaggcttcccccgagacggcgactatcgggaccaggactatcggaccgagcaaggggaggaggaggaggaggaggaggatgaggaggaggaggagaaggccagtaacatcgtcatgctgaggatgctgccacaggcagccactgaggatgacgtacgtgccccccatggccccgggcaggaggccaggctgggtctcctccagggccctcaacttctccccacccctccctcacctgcaacctcagcgcctttcatcccttctccccctccagctcctatcccccagcactgatccgtcctctgtgggcaggtcccatcggccccccggtctggagggaggagtgtcagagaggccggcttggccaagggacattggccatgggtgtctggtagtggtgggtatgggcgggagaagagcagtcctgcacattccactggtcatccagccattttgcatgtgtgcatcatgggccagacgctcaccgggccagtgctggctattgctggtagcagagatgacactggggccctgtaaccattgggggagggatgggattttctgaaatttccttctctttttcccccatccttttttgtcagcagcctggcctggcctcagagccttgggtggctgctaacagcctccacgcctgcctccctttcctcctgtttccttttcatacatacttctcatgacagccacactgaagccccacgaggcctaccagaataacctccaagaatagtgtcctgatcttggtccttcttagtctactccgccgcccctcaccccctacccccatgaattctctgatcagccctcctctgaaatctgctagctgctcattttgtaacagagaaaatcccacttgtgtatttgagggtttctaaggtctggcccacctgccctgttcagggtcagacagtagctggttgctgacatttgttgagaatgtatctcagggtgggccatgtgttaggtatgattcagtccccatggcagcccagcagggaaggtactctttgtattccatccttcggatgaggaaaccaagccctgagtgggaatgtgacttgccccaggtctcatagccagtgagtggcagagcagagctggagtctgaacccgggcagctggaccctagagcccactttttgctgcttcctcagccttccctgagtttggagtcctgataagctcttctgtgtgtttttccttttcaccctgtgtatgggtgtgtgtaaggctaatgtcctgtctgttgtttaacctggtggggaaactgaggcccagagacatgaagactccttcccaagaatggctggcataggctcctggtcctcagtgagagacctcactggcctagagaccctgcctcacctgggccaaatcctgaattgcctctgcagtttccctctggcctactccatctgggaagcaatccccaggactacatctttttgctttttgtctccaccctaagttattgctacagtcatggtctagggcacatggctgggatttgctcagactcctgtcctccccagtttgacatttatgtcatggatctcttttgacgcaagctgcaggtcagcagggcaggggcgggggtgcgggttatccccttgccaagggcaagaattgcatcccaggtttccttacttcgtggctgccagcgagccctttgtcagatcaccctgcccaccgttcttaagtggctggctcacttgctctcttgttctctgtgcccctgagggtcgtcctgctgccatgctttaccttgctctgtgcccatttcttcatttgattcactttctgcaagtctggggctgaaagtcaagactgtgaactggtgtgggcctggggctgttgtcactcagggaaaagctgcgaaagaggcggaggagactgtgtgcacatcaccgatgacccctcgggatccagaggcctccagccagcctcaggtacccagcggccccattgtgctgagcctgccctactctgtatctccccgtatagatccgtggccagctgcagtcgcacggcgtgcaagcacgggaggttcggctgatgcggaacaaatcttcaggtgagcttttgttctagtgccctccccttcaagtggccagcctcagcctccgaatctccctcctgcctctgccttctcccccactccctccaccaccttcctgccacagctgggaatgggcagcgtggggggtgccctctcttctctcccactccccacactctcctcacagctccagccaaaagcctcttcaatggggctgtcggggcaggggtgcagctctgagctgagctgggtgctccctggggtcagggccagggccaggctcccaggcacctcctctctgggactctgagtatctgagatggtaaccccctcccatacactcccttccctctcctttcttctccttcctctgcccctcactttcccccacattttttggtaacagcctctgaccagaaagtagctctgacgtggtggtcccacatgtgtgtcccaagggggaagcaggggatggctcttatccaaggacacatcccaaggaacagccaggacttcctggcctcgcctgttccctccctccctccctcttgcaggctgcttggagctggcctgaggttagcagggtggtggtggggggagttgtctctacaggacctctgcccaggctccccaaggcaggcacagtggggcctcactctgcctgggcttctctctccatctctcagtctctcctccccacacctccatctctctctctctctctctctctctctctctctctctctctctctttctccctctctctctttctctctctctgccccccccaactatattattcattccatcctcctatgcatcctaacggttattcttttgaacattaagcatgcccccccaagcccctctcatccaagccctccccatgtatctgcctctaaaggacatgctatcctgaggcctcaaccctgaatccctttcccaagcctggaatcttggttgcatgtaggtcttgctctgcatcaccccaactacaccacacacggacagcttctgggtctctctctccacaaggaggtgttccaggtgcggccttctcaatggccctgggcgcttctcccaggcacccattgattcttacctctaaggtcctcctggccaatcctggccaccattctccttttgtccaggggaacctggactgtttgtggctgtagtctccaccctgtggccctgaggtggctccctagcgaggcccgcctcccctgcgctgcggtgaggctgagatgaggtcgtgtctttaaccgcccctggtttccaatgggccaagagccttcctagcctcgcagagcagcctggcccagcttctcttttgctcctgtgattcaacacctgttacaggacccctcctgggcacccctggccttgagctgggcccgccctggagttacgtattgtggcttgtgtggagccagcagcctgcccaccatcccctccctccttctttggaggcagatctctcgtattctttccctcccagctgcttctctccgtctctgtcaccccaggctggctgggcaggtctgcccgagccccatctctctcttcccagttggtgtgtgtgtctctccccctaccgacctctggcctctgtttttctccctccaccttccctgccccacctggccatctaccttgccccccacgcccgctagtctttctctctctgattgcctctttctctttcttcctttttcctcttcccctttccctctctgccccccgtcctctcccctcgggtcccgcccccgggaacgccgtgtgtccaaagctgttgactaacccactgcgtctgtatctgaatgctgtctccaggtcagagccggggcttcgccttcgtcgagtttagtcacttgcaggacgctacacgatggatggaagccaatcaggttgctttgccgcacttgaacccccccccaaacaaatactactttgtaatcgagcgctccccatcgcctgattcttatggacacagttccctgccctgtggccctgtgtcccatccccccgccccctctctccccttcctgaccctcactatctcctcttcccatctctcgctaccccactgggcttctcatccagagcccacactcaccactggccccttcctaccaccaggcactagtgctgccccttcacctctcccagctgagcgttcagagaaagagctgccagggtgggttctttcacctagcttcccactcccccggggctggtggggggggcacccctctctggggttagccagagccaggacctcattccaccctcaggaccactggaagtcctgccagtgaggagcttagctattggcacagtcactagcaagactcattttgtcagccccatccctgcatgtgaatttggccctttgattttcatgcaaggggacagcactgctctgttgatctcaagttcccgtcgagtatgatagttttatcgacaccctggcctcacttcgccgcccctacccttcctatcacatctccacactcgcaggaggcaccacctcaggcagctctgtcttctcggcaaggacctgtgcacagtcagccctggggggagcctgtcccccaagcctggcacgggatcccaactcagcagctttgggacctccgagacccaaagatctgcctggtcacccacccctgcccagatccctggtgtagggcactggagagcagtttcaggggaggaaggggcagaggtggtagaatgggggatcccggcagaggcagccctggggccgtctcctcggggttggtaggctagtgccatgggcccaggacccagccatccatgggaagacggcctcatggcagaaacttccatctgttcgaaatggctctttctttttccccttctccagcactagcgcacctgcgctctctttctctttttctcccctctccctccccctccctgtctcccctcaccccccaagtgtagcctgtgtagtcctggccctgggtgtggcctggcagtgtcagggccgagtgggggtttctccccactgtccggcaagcgtcggtcagccgaacactgtgtgcctggtggtgtgtgttcacatgtgtgcgtgcgtgtgcccggcagagcagcaaacagctgcgcccgagagctgtggcgctttccctccctacctcccttcttccctccatccgctctccgacctccctccgttccctgtccctcatccatccagctgaagggctcgctcactctcttctcctatgctgaaacggtgcgtggggcactgctgcctggacctcactgtgctctgctttttcccgcagcactccctcaacatcctgggccagaaggtgtcgatgcactacagtgaccccaagcccaagatcaatgaggactggctgtgcaataaggtacaggggcggtgggcagcagttgtcatggacagagacagcaacagcagtggcggcgatctctcccttcctctcccgctctttctccctccatctctccccctcccccaatctctcctctccctctgtctctctctctctctctctctctctctctcattctctatcccttgctagctcagcttgagtagtcaccattcctagccagccatatacaaatgtgtagtgagcgttcacttggtgcaggctctgtcctcctaaaatgcagtcttgcctggagttccagtagactttaaggaaatatatacgtggatgatgaattagtgacagtgtagacttgaagtggtggtgtggagaatgtgggcttcagagccagactggctgaaatgagactatcccagatcggccttgattttggccaaggtgcttagcctctctttgcctcactttccccatctctaaaatgtgaatattaatgacacctctcccaaaaggtggttgggaggattcagctgtgttaatgagagagtaacactcagaacagtgcctggcccacatttaacacagtcgaattgttaactgtaatcatgaaagaaaagcacagagcrttctgagagcccatagcaggtagctcaagcctgaaggccactctgaccaggccaagtcaaacctgaaactggaggctgtggttttgtagtcacctctgtcttccctgaggggaagctgaggctcagagaggtggaaccatgggtgaacctttagctgtgccctgtgccttgctcctgatcacagggacttggatgccacagtggcttcaggtctgccctggggccagcattgtgattccacagtttgtagaggccccaaccctctccccaggaagtactctgcctagtcagggagagtggtgcatctgttttaaaaaaaaaagtcccatcagaggattggtgcttaacatttctggagagataaagacaaagtgacagtggaactccttcctgtgtttccagatagcctcaaaaccagggaattctcttttttttttttttgagacaggatctggctctgtcgcccaggctggagtgcagcaatctgggctcactgcaacctctgtctccagcgctcaagccatcagcctccagagtagctgggaccacaggcgcatgccaccacacccactaatttttgcctttttatttttattttttttggtagagacagggtttcgtcatgtttgccaggctggtcttgaactcctgagctcaagcagtcctcacgcctcagcctcccaaagtgctgggattacaggcgtgagccaccacgcccagcccaaaaccagggaattctcttgaactccttcccctcccctgcatcctgttggccaccaggtcctgtcacttccatcacagaaacgccaccttccctccctcgccattcccgctgctcatgccaatcgtcacgctctcacccactcactgtggagccctctctggtatgctggcctcttgtcctctttctcccacgccctcacctggaacattcctcaaaaccacctctgactacccacgcctctcctcctctgcttaaccagccccagctcagcttaagcataagatcctccattacctaactggcttccttccccggccttggcttttgcttctccccttactctcccacaccagtttcggaaagtccattgttccctccgataacaatccctccccagcaaggcttaacaaaatgaaacttctgggcatcccaggtcaaacctccctgcttctgtgcagggactgtccctgccgagtaaatggcaccccacccccagcccatttccctccccgagcccctgctggatggtccatgcagaccgacctgcccctcttcatgctgcatctgcccctgtgctattaggccatgagggcagagaccatgttctggccatgtgcagcagggcctggcccaggagtggtgcttagtacctgagtctggaacagagatggagtgtggtagaagctgggtctccagatgctggaacattcaaggaaaatttctcaagcgtagcaggatccaacccagtcctagagctaagaggaggggtgcgggtctggctactgacttctagggctgaaacactgaaaggtttctgaatagaggagcaagtttcagggagaggaacctaataaagggattgaatacctgaggcggggaacagtcctgggagttggtggccttaagaaggcagaggaaggagaggagggagttgttgtaccaaatgggggagttgtttattcctgagctgagtgggttggcacagaggacaaatgagagtctggaaagggaagatgcacagtactgagaacaacatcagaaggttcagaaggcacctgccaccattgcctaggggctttccttcctggggcactgcggggtccctgggagatctcttcatccaagtttggagggtgcagtgggaaatccctgctccctctgacggcctggcctgtgcctcacagtgtggcgtccagaacttcaaacgccgagagaagtgcttcaaatgtggcgtgcccaagtcaggtgaggcccacctacctctcgtgctctccagggcggagcggttggggagaagggaagggtgaggggtctgtgctcagggcttggtatagggaggagggtgaccagtcgtggagccttccccttatcaccagcctgtctcccactgcccctgacagaggcagagcagaagctgcccctcggcacgaggctggatcagcagacactgccactgggtggccgggagctgagccagggcctgcttcccctgccgcagccctaccaggcccagggagtcctggcctcccaagccctgtcacagggctcggagccaagctcagagaacgccaatgacagtgagtcagttgttccttcttcctctgtgccctagggtgtcgggctgggctcaccaagaccagagaaatggcagtgagcaggacctcatcctcatggaatctccacttggtgcggggatagacatttgatgtagggagaacagggggagtggcaacatcccacctgactttgggggtgtgtcgggaaggttctcagcagacaggcagccaggctggcacctggaccgccaagcagagttgatcctggaggaagcagtgagggaagcggcagttgcaaaggcacggagtgagtgggggcagaggaaagggagcagtgggggcattgaagggcagggctggcaagagtgccaggggtgtcctctaacattgggccccttcccacagccatcattttgcgcaacctgaacccacacagcaccatggattccatcctgggggccctggcaccctacgcggtgctgtcctcctccaacgtgcgcgtcataaaggacaagcagacccaactgaaccgcggctttgccttcatccagctctccaccatcgtggtgagggcggcacagttgggggccgggcagccagggtcccggcccccggggtggagacgagggtccttttccccagcctcccaccgcggctgccagcctggaaatcgggcaatggagccgggggcctccccgggcctgacccttctgtccctgcctcccctcctcccacaggaggcagcccagctgctgcagatcctgcaggccctgcacccaccactcactatcgacggcaagaccatcaatgttgagtttgccaagggttctaagaggtcagggccccacctgtgtgccttcccacccttcccctccccaccctcccactcccccctaccgcttggggcctcctatctcactcccagtctctaacatcctcctcagggacatggcctccaatgaaggcagtcgcatcagtgctgcctctgtggccagcactgccattgctgcggcccagtgggccatctcacaggtactcagaccccttgtgcctcccagcgtcctgagacctgggctttctcaaccctcctgcaccctctctgaagcaggaaggctggcttgctatccatggatgcaaaaccctctcccagtagctggcatggctattctaccttgctcctggctctctagaccccctgggacattccccttcatcatcaccgcagctttcttcccaattgcctcccatgcgctcatgtacgacgccattgtgcctggcattctgtgctgtttggtggggtttttattgtcctgaataggtatgatatacacatatccttatatgtaatatatacatatatgatatacacgtatcatatgttcctgaataaaaataacgtataagtggttgagagaaaattgggagaagagaataaagaagtaagaagatggtgtcttccttggcctgacacccaacacacacgccacacacagcagaatcagcagaatcagccctggaacattttggcgttcatctgtttttctgtcttgtgtttgccactggcctatttgttctcttgtggccaggcaaccctcgctttccacttgtcttaaggctgcatgctttgtctgtcaggtagaaatactagccccacgtgtgggacagatgcttctagcaggttccccaccccccacccccacaccttcctgttctaatgaacccctcccacctgcccttcaggcctcccaaggtggggagggtacctgggccacctccgaggagccgccggtcgactacagctactaccaacaggatgagggctatggcaacagccagggcacagagtcttccctctatgcccatggctacctcaagggcaccaagggccctggcatcactggaaccaaaggggatcccactggagcaggtgagccccagcatctctctctgcagctgtggtgggggccagcaggcataaagtccccggccccattattcacaggcattgtccctgccctgtccctccttacaggtcccgaggcctccctagagcctggggccgactctgtgtcgatgcaggctttctctcgcgcccagcctggtgctgctcctggcatctaccaacaatcagccgaggcgagcagtagccagggcactgctgccaacagccaggtgagtgagccctgtgggtatgtatcccggggaggcaggcaggcggcaggggtggcatgggcagacactgagccctgttctcctgtctggccccatgaccagtcgtataccatcatgtcacccgctgtgctcaaatctgagctccagagccctacccatcctagttctgctctcccaccggctaccagccccactgcccaggaatcctacagccagtaccgtgagtagccacagcctgtgggtaggggtggggagttcttaataaagcagggaatagtgtgaccccgttcccctcaccccctagctgttcccgacgtctctacctaccagtacgatgagacctccggctactactatgacccccagaccggcctctactatgaccccaactcccaggtaatagggcagcccagggagggatgggatcgggtcaggtcgcgtcaggaacagctagccctgcaggttcccttcacaaggtcttccctcacatcccctcttccctcctcctccctcagtattactacaatgctcagagccagcagtacctgtactgggatggggagaggcggacctatgttcccgccctggagcagtcggccgacggacataaggagacaggggcaccctcgaaggagggcaaagagaagaaggagaagcacaagaccaagacagctcaacaggtgaacaccagggtccagcagtcactggctggctgtgtggtgtcttccagcaacggcactctgtcagctcttgccctctcctgccaagggagatggcgggcaggtgtggatgtgggcagtgactgcttagcagaccatgctcttgccccagctctgctctttgctgaatggccttgagccagagcagtctcctcagtgtgtggcagggttgcccaactccaggaggtggcttgtgccatccgagtgagccctgtcaggtgtcttctgtcccatggtggggaccctcacattctgctggtgaatatacatgtatgccagagaaattctcacaggccataagggggtgggcaggaaaaaagccctgcaatgttttgtgggagtgggcagatggagggcacctcagtgtctctctgtggagaaagggtgtgacactgtgagcgtagcgtttacaagcaagcactaagtgttaccttagcaacctgatgaattctaaaaatggtgctgtgctggggggaacatggaaatatagaatgtggcattgtgtcatgcatataaagttatacacarataaacattcctatgcatttttaaatgataaaatggaaatgcacaacaaatgtgacagcgtgggtgtatgtcaggggaagaggagtgtcttcatccatttgctgctccataacaataccacagactgggtaatttataaggaaaagagattgatttggctcacagttctgtaggcagggaagcccagtggtgttggcatctggtgagggccttcttgccgcatcataacatggcaaagggcaagagagcatgcatgagagcaagagaaaattgggccaaactccccctttttatctggaacccactcagtgatggcattaaatggagactcaaaaggtggaggggggccgggagccgtggctcatgcctgtaatcccagcagtttgggaggctggggtgggcagatcacctgaggtcaggagtttgagaccagcctggccaacatggcgaaaccccgtctctactaaaaatacaaaaattagccaggcgtggtggcaggcgcctgtaatcccggctactcaggaagctgaggcaggagaatcacttgaacccaggaggcggaggttgcagtgagctgagatcgtgccattgcactccagcctgggcaacaagaacgagactccttctcaaaatatatatatattatatatatataaaggtggaggagatgggagggggtgaaggatgaaaaattacttaatgggtatgatgtacattatttggctgatggatgctctaagaaccctgacttcagcactatacaatctgtgcatgtaacaaaagcacttgtttattttatttatttatttattatttttttgagatggagtttcgctcttatcatccaggctggagtgcagtggtgcaatctcggatcactgcagcctccacctcctgggttcaagcaattctcctccctcagcctcccgagtagctgggattacaggcatccgccaccatgcccagctaatttttttgtaattttagtagagacgggttttcgccatgttggccaggctggtctcaaactcctgacctcaggtgatgtgtctgtctcggcctcccaaagtgctgggattataggcatgagctaccgcgcctggctacaaaagcacttgttaccccataaacttatacaatttctttaaaaagcagccgcgatctcttgaggagggcagagcctttgtgacctaatcacctctgaaaggccctgcctgtcaacactgttgcatcagggattaaatttatcttttgagatggagtttcactcttgttgcctgggctggagtgcaatggtgcaatctcagcacactgcagcctccgcctcccgggttcaaggaattctcctgcctcagccttccaagtagctgggattacaggcatccaccaccacgcccagctaattttgtatttttttagtagagctggggtttcactgtgttagccaggctggtctcaaactcctgacctcaagtgatccacccgccttggcctcccaaagtgctgggattacaggtgtgagccactgcactcagccgggataaaggctccacctgtgaacactgttgcattagggattacatttctgacacatgaactttgagggacaaaaaacatagcagagaacacagccagagaggggcttggcaagaagcactggtgactggtgacagaaaataggaacttgcactactgtgtccctcaccttctgattgttctgcctcagcttccactcatctgcctcccagatgggcccgccactctgtccacactgcttctgccacctcaccattgcaaaccagtgggggtgggggcacagggtgtgttcagtgatgaggtcaggagtagccaggtgccaagtgccttgcaggctgtggttgcgagtttgggtttattcttggtgtgatgggaggcgaaggaagggttttaaggacattgtatttgggggtgggagtggcttatacttcatgaaagagcgctctgctgggaaaggtggtcaggagccgtagcccagaggccagatgaagccttctgcagtggttcggactagggatagtggctggcccgtgtttgaggatgcagggcagtgggtcagcagatasagttagtagccccagggtcatgagggttctgggaacctcacctccaccctcacccccagattgccaaggacatggaacgctgggcccgcagtctcaacaaacaaaaagaaaacttcaaaaatagcttccagcctatcagctccctgcgagatgacgagaggcgggagtcagccactgcagatgctggctatgccatcctcgagaagaaggtgtgttggggccacccccctgcaccctgccccacaatcttgtccttcctttgggccctctgtggagtccctgaatttctgtgtccctccaccccagggagcactagccgagagacagcacaccagcatggatctcccgaaattggccagtgacgaccgcccagtgagtgcccaaggcagagaggggcgggggctctgatctggccaggcctgaccgcccaccctcaccctctacagagccctccgcgaggactggtggcagcctacagcggggagagtgacagtgaggaggagcaggagcgtgggggccctgagcgggaggagaagctcaccgactggcagaagctggcctgtctgctctgccgacgccagttcccyagcaaagaggcgctcatccggcaccagcagctctcagggctccacaaggtaacagcggatggttggcagggcatgctggggcctggcccactgaggctcatcctcttcacttctcatcctgtccctcttgcagcaaaaccttgagattcaccggcgagcccacttgtcagaaaacgagctagaagcactagagaagaatgacatggaggtgaggtgtgacctgaccctgggctccctcccctgtgtcccttccaagtccccatcacctcaggcagctggagttcaatttctcacgtgttaaccccgtgagccttcttccccattttcctatcctggctgcttgtgcctgtgatggcctgaccctcaggacctgagcctcattagccagatggcatgccctgtgggaccccactccccatgcctgtgttgcctgagaaaagagaccagctccccaacattcacatacacatacaaactttcagcaaatgaagtaccgggaccgtgcagctgaacgcagagaaaagtatggcatccccgagccgccagagcccaagaggaggaagtacggcggcatatccacagcctctgtgtgagtggctgggccaggtgagggggtctggagcccggggccggggccggcaggccgaccactcatgctgtgcaccgcccctgcagagacttcgagcagcctactcgggacgggctgggcagtgacaacattggcagtcggatgctgcaggccatgggctggaaagagggcagcggcctgggccgcaagaagcagggcattgtaacgcctatcgaggtgagtctcaggcagtcctgtcccatcccccagcacccctcacagcatcccccaccagcctgacagagcctgcctccctcacacaggcccaaacacgggtgcggggctccggcctgggtgcacggggcagctcctacggggtcacctcaaccgagtcctacaaggagacactgcacaagacaatggtgacccgcttcaacgaggcccagtgagcagcttcaagagcaacttctccacatgttgggtgtccatcctggggcagggaaggacagagtgttggatggctgggacggggccttgctcttgtcggccagcccactccccagccagagagggcttgaccaaatcaaattgaggtggtgacttttgttggaaaattgggctgggatcacgtcctgttttgtaataaaagctgaaaagtctgcatgttggcctctcctctttctcgtgctctagcacagttgtatagcctatacagacacggggacccaagcagatggacaggggaccttatcaggccaaggtggatggcagtggtggcattcagtgtctggaacataatggctactagaacatggggttctgacctgtaccccgacccataatatcctggttatggcccctctcccttgttggttccagcaggttatgttgtaccaggaaatctagcaccaccaggcatgaagcgccccctgatcagagctaggactgggaacccccatcccctgtccttgctgccccctggctttacttagcctgcagtcccaaggctaaactgcattttgccatccctagatctggagacaatgccctcaggcatctccaagtagaatacaagaggtactcaggttccagttggcccagagccctcaacaggctgatgacagaggggtggaggtggagcttggcctgcaaatccaaggccaggtcccagggatgccctttgagaaccattcaggcctaccttctctgttgttaccacagtgccccacccctctagtcactgcaacccatgattcccaagtatgtgcttgtgctctcggcagaggttctgggtacagtggaccgtgacgctggggctgccctcttccaagcctcagagggccacagcgtgaaagggggatggtgctagaagaccagttggtgcaaagcccctcccccatttattaatatacattgtgacaccaccctgcaacagtcataggaggtggggttagaaggggacccctagaggtaggatggtgctgatctggggtggtgggtgttgcccaatgaaggaaggggatgggagaaaaaaagggtgaaggaaacaggattaaaaagaggcctcctgggcctgggcacagtgagttgcacctgtaagtaatcccagcaatttaggaggctgaggcaggcggatcacttgagctcaggagttcaagaccagcctggataacatagccaggccctgtctctacaaaaataaataaataaataaaattaggctgggcrcagtgattcgcgcctgtaatcccagcattctgggaggccgaggcagatggatcactggagctcaggagtttgaaaccagcctgggcaacaaggtgaaaccccgtctctacaaaaaaaaaagtacaaaaattagccagctgtagtggcacacacctgtaatcccagctactcaggaagctgtagtgggaggattgcttgagcccgggaggtggaggttgcagcgagccgagatcacgcccctgcacccaagtctgggggacaagagtgaaaccctttcttgaaaaaaagaggctgccctagtctcaggatgggtgtgtcttttagcagagacgcctccacattcccttccctcttcccaccccagagcactgctcccaaaatcccacaaggaaccctcaaagctcaactggcaggagtgcaaaatgatacagccactctggaaaactggctgcttcctataaagttaacatatgcttaacctatggcccagcaattctactcttagatatttagctccaaatacatgaaaacatgtcaacaaaagacttgcatacatatatttgtagcagctgtattcctaatagccaaaaactgggaacaacccaaatgtccaactagaggagaatggatacagtgtggtatattcaaaggatggactacagctcagcaatcaaaaggaacacaatgctgatacagatatcaaaggatgagtctcacatggtgagattgttcacatggtgaaagaagccagacacaaaaaacacataatgtttcattccatttatatgaagttctaaggcaggcagaacaattttatggtgatagtagaagagggttgaggtgaggagggtgtcactggaaagggttgcaaggtagctttctggaatcatgaaaagtttctatgtcttgattggggtgctggtcacatgggtgtatacctatttaaaagtccaacaagctgtataactaaaatctgagtgttttattgtatgtaaattatacaagaagttggaaaatcaccaccacagcaaacctcaataaataagaaggaaataatgaacagaaattgatgatatagagaacaaaaaatgacagattaatagaaaccaaaagcagaatctgaaaacaaaaattaagaggaaacacttttggcaagactggtcaattgaagaagatagaagatgcaaatgcaacagagcttttaaaaataaagaatgtatctgaaaatctagatgaaatgaatatattcctagagaaatatcaaatgccaaaactgttccatggagaaactgattactcaaatggagcaattagtaatatagaaattgaaatggttgtcaagatcttccctttccccacaaaaaaaaaaaaagggcccagatgatgtgtgtatgtgtgtgttcctttctttctttctttttttttttttagatggagtcttactctgtcacccaggctggagtgcagtggtgcgatctcagtttaccgcaacctccaccttctgggttcaagcaattctcttgcctcagcctcctgagtagctgggattacaggtgtgcaccaccacacccagggaatattttgtattcttagtagagatggggtttcgctatgttggccagctggtcttgaactcctgacctcaggtgatccaccctccttggcctcccaaagtgctgtgattacaggcatgagccacctcgcctggcccagatggtttttataagagcattctaccaaactcccaaggattcctttcttattaaagttaattcctttcttattaaagttgttctagatattagaaaaaagaaaagatgtctattttaacaggctagtgttagctgaagctgcgaaggaagaggcactctcatacatcgctggaggcaatgcaaaatagtacaaccctctcttccaccctccctctccctctcctttgtctattttcctgcctccacagggctcactgtgggaccacagatgcaccccactatgcccagctaattctttgattttttgtggagaccaggtggtggtggtggggtgtgtgtgtgtgtatgttggggcgtgggggggtctcactttgttgcccaggctggtcttgaactcctgggctcaagcaatcatcctgcctcagcctgccaaagtgatgggattataggcgtgagccgccgcgcccggccaagactccatttattaaaaggctaaagaattttgccaggcgcggcggctcgcgcctatagtcccagcactttgggaggccgagcgggcggtatcgcctgagctcaggagctctagtccagtctggctaacgtggcgaaatcccgtctccactatggtaacatgtaaacatagaaaagataacagtaaaattttttctgtgttataggaccgttgaccaaaatgttatgcagcacatgattgtatatccataatttatattactgtatatagtcacagatatctattataatacgggtttgtatgtgaaactataattttacttattgttatgtttatggtctgtgtatcttgctagaatgtcagctccatgagcccaaggaagaatttccagcacctggcccatgtcaaatgaacttttttggccacctgagtctcggtctccccatctgtaggatgggtgtgcctttccatgtggaggcacccacacgttccgtttcctcttcccaccctacagagcacggctccggcaattccacagctcaggcttacattttcccatattctggacgctggtgcccaccacgtgcaccaggcactggccagacagaactaccacccccagcatgccgcgcgcatttgggccgtaccacaacctgtagggtcatctgggtctgaaacgggcaccagcgacgcgggagcagggactgacgcccctctagcaaagcatctgtggtacatcccagacccggggctctccaaggccccgcgcttccgagctccgcgcaaactctggcttctcttgtacgacagaggtggtttgctcttccgttgccccgtggcttcagctcatctttggcaggaaggcgaggcttccgcccggcacagggggtgagctggagcaccgtgcccccaagcctctggacagcatttggaggagggtgcttccctaatcccaacttcggggaaacccctcatgggcgtatttggagcctccgggcccggggtgatatttagggggcgtctgcttttgagacccttaaggggtgccgtttggggacttcggggtgggatttgggagtctgtttcggggagcacccctcggaggcagggtttggggggctttggggagattcttagggtccgtgtatgggcacccttgtccgtggagcaggatttgggttattcttcaaggggagaagcaaagcttgaggttactaaagtcaaggcgggactgggggagggcttgtttcaggacggggtcctggtgacagaacaatcgggaccgacgtggcattgtggaggtgtcaggcctttgtgacctctggttttgtgatgaggtcctccccgcgcctggaggctcaggactgcgagactggacacgtcgggggcccagatgtttctagggagaggagcctcccagctcaggctagggaagggacaccggagcccagctcttcctgagctgacgaggcgccacccggcctttattcattattcataataaggtggggctgtggtaggcggcagtttttttgcctctttcgcacctggtccgctgaaggttctcggcttgtgaattattcacgaggggcggatcagcgtgccgaagggacgtgctgaaggggcgttctgaagtctgccgcgcaaacgagttcattgatgattcgcaaaagttaagtagcaccctgagttttcagtggcttttctaggggttccgtgcttaattcatgaggagcgtggcttttgcagctttgtctgcgtgatccgcggttagctttcccttgcaggtaccagagttaaaacctggcgtctagcaaagggatgaggcctcctacattgttcatttcttatggcctggtaatcccagataatcagccggctctggattcaaatcccatcgatcctttccagttgtgtgatctttggcaaatcgttttgtaagcctgaataatgggtatgaggataacgataagattagcttacactcgtttagctacttagcgcatttaatcttcacgacaatcctaggaggtaggtcattattacccccactttatagataaggaaactgggacacaggaaggctaagtaatttgcctaaggtcacacaatcagtgagtggctgggccgggattcaaattggggtctagttccgcaatctgtagtcttaaccagatgccataatgtctcccctccccattcccctgcgccgccatttgatagtactactactactaatataacacttagcatgtgccaggcactggtctaagccctttctacttatttcttcatttaaactccatcgcaaggtaagttgctgttattcctattttatggatggggaagcagtggcccaagttgggggtttctctagtggctgagtattcataactaattttatattaatgtaaatatatatttacatatcttaacatattacttttatattaatatataatattttaaaaatttaacagtgccttgtgccagcaatgttctaaggctcatcccataatttatattctctgattttcttttgtttgagacggagtttctctcttgtcgcccaagctggagtgcaatggcgcgatctcggctgactgcaacctctgcttcccgagttcaagcgattctcctgcctcagcctccccagtagctgggattacaggcgcccgccaacatgcccagctaatttttgtatttttagtagagacagggtttcaccatcttggccaggctggtctccaattcctgacctcaggtgatccacccgcctcggcctcctaaagtgctgggattacaggcgtcatctgattttcataataacacattactatcctcattttacagttgtggaaactgaggcacctgccaaagacatgtagtgagtttgggtttgattggaccaaggcagcccttgttcctgaggcggggagaatggagggaggcgtggagaggggaggtgggggcagggagtacacgtcccctgggttttctggtggcactgcagtgacatctttcattattcatgaacaggaaggcgtgctcactttgccttggctatagcatcgtaatccctatttgctgggcagggcagtcttgggtgtttcttcgccttatgcataattcataaattgggtggaacctttcttgacctctctgagtttccaggttgagctactgcagcagcataattcattattcaggacctgggagagtgtgttttccctgcagcagccccatttccctgcttacagtgtattagatgcagcaataggcgggcgtgccccttttattccaacccactgggcctcatgcattattcatgagtaagttgtggcctgggtctccttggcttccgggcccctgcaagatcatcattattcatgaatgggggtgtgtggcttccatgttttaacatctgctttctggttgctggttgttagtctaccaaccactcaacttcatgcataacttataatcaggaagcatggccttaacggtttttcttcgcttccttgacagcctggctgcaacaattcattcattagtcgcattccatgaggcgtggcctctgttttacctgttttcgttgttactgccacaatgtccaccaggtggtgctgttccacttctaaccgaatgaatcgcaaccgagtagggaactttatgcatgattcataagtaggcgcggcccgcttgcatccgggtttctgggggtggggcccaaggttttgttccggccccaggctcagcgtccgccatcttgtgtcggcggctcggctgtaaggaggtggcagggacaaccacaaccacaacggccgggggaggagaaggcggcagcggcgattctaggcggcccaggcggcggggaggaggagaaggaggagggtggcggccgggcttggcttcggctccttgaggagttggcggcggcgcgacccggggaaccggcattggtaaaaaaacgtcctttcactgcgcctcgccctgggcaggggtttcggggaggcactggagggccctgagccacgctgctgtcggggcgggccgcggtgactcgggagccaggaatcagcggagtagggagggggagcggatcctggggcggggccgactttccccggccaggaccactccggctccctctggttgcaaaatctgaccttggagtcggacccccaggatgtgcttttagagactcacgcccaacatctctagtctgggacctgactccgtcccgaaccttgtatctcagatcagaactcttccccagtctccaatagagatttacgtggatcagcattgctgatcagagctcctcaccattgaatgccgttaaagacctgccccagaatctcctttgagacacttcctagcttctcagtatttgtcctcaaggcttccaggacgggctagatctcgaaggggtccataggccctttatctctgtaagagagtcctctttagcattttccttcagacccccatcccacacacatgctagccgcgctcagagcttccaggggtactagaccctgtgaaaggccatttgggcctggcctttgtgtcgggggcccctcttcgccacacgtcaggtctcctaaccccaccctggccctagcatcttccatcagagactctgcccagtatttctactcagagacccctcttaccatctgccttgagagactcttcaattcctagactctgtcctttgacactttctctacttttatggaatttctcgctttttatacttccagtattcagagactactgagaggcctcagcatcttccccatcaggcaccttgaacccccagagccttccagtgcaccagataccagggaggaactgtttggatacataatcctccatcaaagagcccctgcgagcatctgctcttgcagatcccgttggcttctagccccttccatcagagactcgcctccccaaccccaccctagacccagcctctgccttcaaaaaccaacctgggttctagctgcttttttcacagatcccttatcctcacatcaggcctcagaatctgccctcagatcgtttcaaggtccctaacgtctgcagtcaggggttttcagcttctgctttcagcctccttggaccccaggatcattgtcagatgtcccttccccccacaggccttcttgttttctttttctttttcttttttccgagacagaattgtttcactatgtcgtccaggctggagtgcagtggcgccatctcagctcactgcaacctccacctcctgggttcaagcgattctcctgcctcagcctcccgagtagctgggattacaggcatgcaccaccacgcctggctaattttttgtatttttagtagagatggggtttcaccatattgcccaggctggtctcgaactcctgacctcaggtgatccacctgcctcggcctcccaaagtgctgggattgcaggcgtgagccaccgcgcctggccatggccctcttgttttctactgcagtagaaaaccctcttctcagcatctaccttcagcgcctccatggggtcctacataattggtcagagaaacccaaccccatttggggacctagccagtgtttgcttattaacctttttaaggcctgcactatctgggcccagcttcccgtttccacaccctcagagcagctgtgatacctagcatgtcctgtcagagattgacacagggcctttgtgttccattagaaacctctcccagcccctcaccatccaccctcacagcctcctgggactctgtagtaggaatgtcagatacacctctcctcttgcatgtccctatctattatttttggttaaagatttctctctgctaccagcatctgtctccagagtcctccagagcctcaacatcctcctgatggaggctgcctctccccccagaccccaacatcttcctgctgcctcctcagactctagaatcccccacccattccctttgcagcttccatggggcccagcaactgtcctcctacctccttgcagccttgggggcctccactgcaatttttcagcctttctccaaaagatccttttccagagatccgaatttgagtcttttcctaataccctagcctagtcctttccctcccaggacttctaacatctcctttcccatttgtctcagagcctccttgctcttagacacccacttcctgattctcctctcacgttcccatggacttctcagttaacccctcccagaaagcttgacatgctccagccccccttctctatgccctagcttctccatcctgctaacctgcctcctctcacacctccaagactcctccctcaaaccctctggtttgggaatagagaatgcttacgcttgaaaatcttcagtttggagactcaggtatgtttagaaactaagccacagctcagctttgccaaacagttcacagtgtgtatgttatggtgggggcctgagcaaatgttgaggtaggaagggtgtagattgtttttctgctgggggtgggggatctttagctcctctgcagagtttctgtcccagactcctgcttgccttgagacagggctgttccaaacctttgcagtcaaaatccacttgaacaatcatctgaaacttcttagactcttgctgcctgcactggggatccagaggtgaaatgtccagatattaaagtgctctctggccctggatcatctctaatttatggagtgaggaaatggcatgtcccaaacaaactgaccaatgacaaggcaaggagataactaagtaatagaggccactacacgtgcccagggaggaactcacatcctcaggtcagtgagttctgaccacagaccttggcttctttaaccctgccagcagccccttgaagacagtttcatttgtcccagcttttggagaaaatgaggctcagaggaaatgagatctctaccccaggtcagtcagagagtcagtaaatggaaaatatggttcacctttgtctctactaactcaccaagcctcttgctacccaggttggctcttagcattctaagcaattcacctggctatctcaggggctccagccagcctgctgcctcccctcatctcccattccttagccctgtggactgggccctgagcccaggggcatttggcaaacagtcccccaccagctgcatgcctctgggcgagtgaatggggttctctaagcctttcttttcccatttgtgatttgggcatagggttatctgggtcatggggattgttaagattagacaaagccctttcctctttgattgacacacagtatgctcttggtagatagtagggagctcttgtcattgtggttggtgctagtgacaagtgccaagatggaatcttaggtacattgggatacttagtgtcataaaagtctcagtgtgggaggacttgtgtgaacagaagactcagtgcctagaggagcacttggggtgaggggaagtgacgctgggtcctcccatctccagcatgtggacccagtcacccccaccaccagatttcacttccacagcaggctttattgttctgtctctgggacctagcaggtgaccctgggcaagttacttctcatttgtccggcaaggacactaaactctgccttgctgggtcagggtcatggaggggatgaaacgtgataacacgaggaagcagcctgggcttcagagtcagcagatcctggtctggtcccagctcagtgtgtgggaaccttggtcaccgaacgtccctgagtgaatttttttccatcactttaaagttgggggtattattgatagcagtccaaaccccacaggagtaccctgaggacagagtgagacgaggtttagagaagtgcttactatggcatctggcacaaggaggactcctgatcaatctaatactcatttatcattgtggttaacctgtttaagggactccgcatgcagatgaggcttgggatgtgtttgttttctatctttttgcaacctcttttattggtctgtgtcggttttcccctcccaaagctgggggcagggttgggctttataaaacttgagcccctctggggactgggttctcagcaagttaccgctcctgccatcatgccaccctgatggatgtccaagcctcacttccctcctgcactccccgctcccgccgccrtccctgggattaagggagaggagaatggctgcttgttactgcctacctactctgtgccaggttctatgctctgtgttatttatcatctcgataaccccgtggggaaggtaagtggtattatcacccctgtttcacaggtgagaaaactgaggcctgtggsggttaattattactgttagtgcgtggcaggctcaagatttgaaaccaggtctgtcctgaatccacatccttcccctgacctcgacacaagtacattcttgtcattcctttcactccaggattggagtctctccctcrttatgctgggctgggaagaagcaaatggcttagtggtcagcagtgtggatttgcaaatcagaccacctgggttcagatcttaggtctgacagctgtgttaccctgggcaagtcctcacctttctgtgcctgtcccctctttgctgtaaaatgggggtactaatacttaagtcttcccttcccccacagttgctactaacaaacagaaaaacggtacccatgtgctccagggtcacctctgacctttttttcctccagatgtccagctcgccgctgtccaagaaacgtcgcgtgtccgggcctgatccaaagccgggttctaactgctcccctgcccagtccgtgttgtccgaagtgccctcggtgccaaccaacgtgagtgtcctctccgtggagactggcagacgaggtggtgggtgggaaagtcttttgtrtcactgtctgtctatccatgctccactcctgtgtgtctccctaaacttgttcttttcctctattcctagggaatggccaagaacggcagtgaagcagacatagacgagggcctttactcccggcagctgtaagtggggccaaggccgggctgaggggtgtggaatgggacattgagaggataaggttgggtggggcaggccctgacctagagtaccccctaacctggcaggtatgtgttgggccatgaggcaatgaagcggctccagacatccagtgtcctggtatcaggcctgcggggcctgggcgtggagatcgctaagaacatcatccttggtggggtcaaggctgttaccctacatgaccagggcactgcccagtgggctgatctttcctcccaggtacctcttcctagcacccttccccctttcccccttcccgaggcaccactgttcccggtgccacagccatttcatctttttccctactgcacacccttamagttctacctgcgggaggaggacatcggtaaaaaccgggccgaggtatcacagccccgcctcgctgagctcaacagctatgtgcctgtcactgcctacactggacccctcgttgaggacttccttagtggtttccaggtatcttgggggtactacscagccttctgcccagttttctcagagcccatctctggtttattcagtagtgttcaatattgatttaatgggtcggcctgaatgtcaggttttgtgctgggggactagagtatgcaggcagcagttagcccctggccctgccttttcttttcttctttttttttttttgagacggagtcttgctctgtcgcccaagctagagtgcagtggcgcgatctcggctcactgcaagctacacctcctgggttcacgccattctcctgcctcagcctcccgagtagctgggactacaggcgcctgccaccacgcccggctaatttttttttgtatttttagtagagacggggtttcactgtgttagccagggtggtctcgatctcctgaccttgtgatccgcccgcctccgcctcccaaagtgctgggattacaggtgtgagccaccgcacccggcctggccccgccttttcaagtggggaagatgtgtacagacagtacagcatagtggttgtgggcacagactgtagagccatactgccttgctgcaggcctccagccttggtagtgtgacttcaagcaggttgtttcatctcctgtacctttgttttcctgtttgtagtcagtgcgtggtagcagcactgacttcatggactttttgtgagggttaaacacgtggaattgcagctggcatataaggactggatgggtgtttgttaattaaaaagtccaggccggaaagaggtgctctggaagctgagagttgtccctggagtatcccaggttgccagggcactgcagctaaatcctgatggaggagtaggagctcaccctggtggggaaggatggacattcaggcagagagcaaaatcccaaagatcatggcggagcaggcgtcgtcttgagaattggaagcaggtgggtgtggtaggagtgagctcagactttggctggagacagagttttactccagtgtctcacagggcatggcagacagacagcagcgggtgtttgtcaaataaatgagtcagctcttctccaaactccctcctcccagctacctcttcacctttcctggtatagtccaggggttcattttcgacccccacagagtctgatacacagtaggtgctatgtgtttgtgaaagaggctgacccagcaaagcctggatgtgtttgccttgaggactgcctgagtcctccacaccagccctccattttttccccttcaccccaatgctgggcctgagcctccatctctccacaggtggtggtgctcaccaacacccccctggaggaccagctgcgagtgggtgagttctgtcacaaccgtggcatcaagctggtggtggcagacacgcggggcctgtttgggtgagtggcagcccacctccctccctgtccccttttcccccaactcctaccaagcccaggccaagactctaggctctccctgccctcatcccttctcagctacccaggttttgggttctgtgttttcatctctccccatgtggcacaagtaccatcttacatcccagcagtgataggctgagtttgctcagcaagttttcactacatcttgagggacccgtgggacctgtatgtgcatgggacacaggcaccagccctattgcttccctctacaggcagctcttctgtgactttggagaggaaatgatcctcacagattccaatggggagcagccactcagtgctatggtttctatggttaccaaggtaaggagaccagccctagggttcctggcaggcaggtgggctgcagtagtccttcctgtctgctcttggtaccctgggsctgtttctgagactcactcttcctttaaccaggacaaccccggtgtggttacctgcctggatgaggcccgacacgggtttgagagcggggactttgtctccttttcagaagtacagggcatggttgaactcaacggaaatcagcccatggagatcaaagtcctgggtgagctgsgaccatgggggaagcagaggggaactagaagatatgttcctgggttctggccggggagttgaagggagaagacatggcccttggttcagagttgggaagacacatcctggtgtttgagatgaactacagacaatcctgtggggtccaataagagctggtgggcatgggggagaggtactrtgtttgagctattcctgggagartgtgtccctrgtatctgagctgagtggggaaaaagtctctggtgtttgaacagggcagatcagcggatctacttgtgtgtgagctgatttggatgggaagcagagaaggtcttcccgtgtagacttggagccagggacacagggtctcacggggtctgagctgagtctggggcacaggagagatggtttctgatgtccaagtggagcctggagctgagggaagacagcttctgatgtctgagctgagtcggggcaggaggttccttatcttgcaggggttgtggattttagggagaatgggtagactgacagctctcttcctgccctctgtaggtccttatacctttagcatctgtgacacctccaacttctccgactacatccgtggaggcatcgtcagtcaggtcaaagtacctaagaagattagctttgtgagtgtgtcgatgggatcagtgggctgtggggggtggttctaggcattccctagttctccattcctctcttctggttctgatgacctctccccccgccacagaaatccttggtggcctcactggcagaacctgactttgtggtgacggacttcgccaagttttctcgccctgcccagctgcacattggcttccaggccctgcaccagttctgtgctcagcatggccggccacctcggccccgcaatgaggtgggtgagtgggcgagccagccagcgcagacatgcctggcactgcaggctcaccatgcctctctgcgtgtccacactccctgccctcactgtggcctgacatatcctctcttggttctttctggcccaccaggaggatgcagcagaactggtagccttagcacaggctgtgaatgctcgagccctgccagcagtgcagcaaaataacctggacgaggacctcatccggaagctggcatatgtggctgctggggatctggcacccataaacgccttcattgggggcctggctgcccaggaagtcatgaaggtcagcacgggtggggagaggcaggattggggtgggccaggtkcctccatgactctgtcacttgctctctgtctgtgtcaggcccctgttaaccactgaccaccccctctctcccttcccctctccaggcctgctccgggaagttcatgcccatcatgcagtggctatactttgatgcccttgagtgtctccctgaggacaaagaggtcctcacagaggacaagtgcctccaggtatgtgggtggsacctgtggggagggcatcattggggacatttctggggaggcctctctaaccctcctccctttgcattccttagcrccagaaccgttatgacgggcaagtggctgtgtttggctcagacctgcaagagaagctgggcaagcagaagtatttcctggtaagtggtccccttggatgtctgctcccctcatcttggcctctggccatcacccctggggcttccttcggcatctcaatgcaaccggtggcgcattctctttgccattctccttatcttgaagggaagcccagtgcatccctcgtttccccttctggtgcctccttcctcacatgactgygtgtcatttcttagagtcctgcaacctgaagatgtggtgttagcccctctccccgtctctcaggggagtgaggggtgatgggtagcttcacactaacctgcatcaccctgaccagcctctgcctgtcttcttggttgcttcttaggtgggtgcgggggccattggctgtgagctgctcaagaactttgccatgattgggctgggctgcggggagggtggagaaatcatcgttacagacatggacaccattgagaagtcaaatctgaatcgacagtttcttttccggccctgggatgtcacggtgagtagggtaggaggttggggctttgtcgtctcactttcctcctttttcttttttttttttttttttgagacggagtttcgctcttgttgcccaggctgtagtgcagtggcgtgatctctggcccaccacaacctctgcctcctgggttcaagcgattctcctgcctcagcctcctgagtagctgggactacaggcatgcgccaccacgcccggctgattttgcattttaagtagagacagggtttctccatgttggtcaggctggtctcgaattcccgacctcaggtgatctgcctgcttcagcctcccaaagtgttggtattacaggcgtgagccaccacacctcacccctcctttttcttgttcccattctttctgtcagagatctttctgcctctgccagaagcccttctttttggcctttctttccctcagcttctgtttttttttttttttttttttttttttgccttaacctctttttagtgctggttgggacagtgtgtctggggtcctcaaaactactctcaagctcaattcacctagagtacttacaggactcagcatatagtcgtgcttgtggctacaatttattacagcaaaaggatacagaccaaaatcagcaaagggaaaaggctggtgcaagtttctaggagtcttctcccagcgggagttaaacaaggcggcctttatttccccagtagcaacagtaactacagaaataacagcaacaaggtgtaacaagacatgaaatgttgccaaccagggaagcttgttagactcagcaccacctcttttacttggggctggtcatgtaggcgcccccttcctggcacataacaaaatttccagactcccagaaggaaaggtgttcagcgtaaactgtattgtttgcatgaacggtttaggcacagtgaaccactgataccaggtagggagcggtgggaaccttcctgaattccaagttcccagacaccagccaaggagccgaccttggaagcaggcctttccaagggttgtagtttcagtctcctaggcttacacttctctgcacatatggaaactgggttggttatgcagggttctctgagaagctttctgtaaggagcagtgtcgtttttgcttacccaggatttattccccctttcatttatttcatttattcaccagatagttttagtactgttttaggtattggggatataccaaggaataaaacaagattcctggagggagaggggaacggacagcaaacaatagacacaatacgatcgtgaggtatatagttaatgttggtgatgagtgctcctcaaaggaaacaactaaaaccagacaagggaagtcggggtgtcagggagaatggtttgtagtattgatgacaatggttaaggaaggcctgagttctgcaaagacctcaaggatatgagggactagagtgccctctgctgtggaagagcctgcgcaaagatcctgaggtgggaggggtcagggagccaactcattttacggtaagtggaggtgggatccaggggaggattctgagcagaggagggacgtggcccaatttgggctttgaaaggatcctgcttgtctgtgtgccagcatcctggtggtggttgggggagtctgcatcaatcctgggtgctgttacctgaaaaaatagcaggtgttagacgaaagaacagatgtctggcccattgtctccagtctgttcctgtccacagcttccctttatgctgagcccctgccacatgcatcatcatcctggccatgtggcattgtcacagaccgtctctcctgctagcctcctaactcagggcctgggtcttccccagcattaagtaaatcagtctcaggcagacagccctttataggtgtttgggccaggtgcggtggctcacgcctgtaatcccagctctttgtggggccgaggtctttgagctcaggagttcaagaccagcctgggcagcatgacaaaaccctgtctctaccaaaaatacaaaaattagccacgcatggtggcacacacctgtggtcccagctactcgggaggctgaggtgggaggatcgctggagcctgggaagttraggctgcagtgagccgtgatcatgccactgcattccagcctgtgtgatggagagagaccctgtctcaaaaaaaataaagatgtttgttgggtgaatgcacaaataagtgagctttgttcccccatccccaccctggaactgcactttcttaaccctttagaagttaaagtctgacacggctgctgcagctgtgcgccaaatgaatccacatatccgggtgacaagccaccagaaccgtgtgggtcctgacacggagcgcatctatgatgacgattttttccaaaacctagatggcgtggccaatgccctggacaacgtggatgcccgtgagtttggaggcgggtgaggtggtcacgggcaaagttgtgtgtgtttcggtgtgtatataccaagaggggtgtcygtctttctgtcctctcctgatgtttctttcctagctctcrctttgtsctccccacaggcatgtacatggaccgccgctgtgtctactaccggaagccactgctggagtcaggcacactgggcaccaaaggcaatgtgcaggtggtgatccccttcctgacagagtcgtacagttccagccaggacccacctgagaagtccatccccatctgtaccctgaagaacttccctaatgccatcgagcacaccctgcaggtgataagctgtgggagaagggaaagaggccaggcatctggccaggctgctgcctctccrcccccaggcccttgccttgccttcagatgttgcatgcctaagtgtaagatgtgccttttctccaaacctccctccctcacttcccaccaggcagcctaggtttctagaatgactcattcttttttcacttttattttgatttttttttcaacacatagacaaatattaagaatattatgatgaatactcaaataccattcctcacctaaatttaacaattcttaatgttttgccacattttcttcttagatttatgtagatttttcttctttgtgcttaaatgtgtcacagacatcacagccctttactccctactatttcagtgcctctgccaagtgaggatatgttgctgtagaacagggtttcttagcttcagcactactgacatttggggctggttatttatttgtcatgggagaggggatgycctgtgcactgtaggatgtttctcagcattcctgacttctgcccactagatgccaatagcactctccctccatcatgacatctcaaaatgtctccagacattgccagatgtccccaggggtgccacatcactcccagttgagaactacttctgtctaacagaaacatcattttcatgctcagcaaaattaacaatcattcttaccatctcttctagttatttatttgtctctaatggtccatattcaggttttccccagctgttactcaaaatgagtttaacagctggtttgtcaggatgattctgtgtgtatggtgcatttatctacagaacagtgcatatattatctagctcggggtgtccaatcatttggcttccctgggccacattggaagaagaattgtctcgggccacacataaaatatactaatactaacgatagctgatgagctgaaaaaataaaagaaaaaaagatccgtgcataaatctcataatgtcttaagaaaatttacaaatttgtgttgggcagcattcaaagtcatcctgggctgcatatgggccacaggttagacaagcttgatctagctgaagttttacaaagtgaacacacaggtgaccaccacctgggccaagaaacagaacctagggattaccattgtgctgtcagaataattcttagtgcagtgtttgaggccaaaccatttagaatagtaggagtatgagggtgggaacaaaatagggaagggaaaaaaaaaacagttccatctgtcactttctcccttctgacactgcagttccagagtgggtatgtttgtatttgtgcaccaaccacagtcttgctaggtcatgtgtaaccttgaacttaacctctctgtgccgcagattcctgttctgtaaaatgggaatgacagcatctacctcacaggactattgtgaaccacttggcatttactgtgtgcctggcactgttttaaccaagctttaaatatatatgtatttgctcatttcttcctagcaaccccatgaaggtaggtatcactgttgtaacacctgttttagagacaaggcacagaggtaaagrtgttatcctgtgtgcctgaagtcacaaaactaggtaatacgtggcatagctggaatctgaacctgaatttctaacatctgtacactccaaaccacctcgctaatgactgcgaactgtcctaggaattctcagaggccagaagytctgtcttgtttgctattttattttttgagacaggtctcattctgccattcaggctgaagtgtattggcacaatcatagctcactgcaaccttccaactcctgggaagtgtctgtacgtgtgtgtgtgtgtgtgtgtgtaagtgtctgtgtgtacgtgtaagtgtgtgtacgtgtgtgtgtgtgtgtgtgcgcacgcacgcgtgcccgttacgttgaccaggctggttgtaaactcctgggctcaagtgatccacctgcctcagcctccaaaagtgctgggattacatgtgtaagcctctgtgtccggcctctgtcttgttttctgccaagtcctcagggcctggatagggatcattgttggtttggtctgagttttttgtgttttaaaaaactgtggtaagatatacctaattgaagtttttattttttatggaggcataacatatctagaataaggtacacagatttttttttttttttttttgaggtggagttttgctcatgttgcccaggttggagtgcagtggcgcagtctcggctcactgcagcctccgcctcccaggttcaagcgattctcctgcctcagccttccaaagtgctgggaatacaggcgtgagccacctcgcctggcactcagatcttaatacatttttaggctgggcatggcggctgacacctataatctcagcactcaggaggccaaggagtgaggtttgtttgagcccaggagttcaagaccagcctaggcaacatagcaagaccctgtctctacaacaaatcttaaaaattagccgggtgtggtggcatgtgcctgctgtcccagctattcgggaggctgaggtgggaggatcgtttcaacctgggaggtcaaggctgctgtgagccgtgattgcatcgctgcactccagctcgggtgacagtgtgagactttgtctcaaacaacaaaacaaaacagttttccacatacacagcactattgtaaccactgcccaaatcaacttcattgatttttctttttttgagacagtcttcctctgtcacccaggctggagtgcaatggcatgatctcggctcactgcaacctccgcctcccgggttcaagagatttcctgcctcagcctcctgagtagctgggattacaggcatctgccaccacgcccagctactttttgtatttttagtagagatggggtttcaccatgttggtcaggctggtctcgaacccttgacctcaggtgatccatctgccttagcctcccaaagtgctgggattacaggtgtgagctactgtgcctggcctggtttttcaattgaggtgggggaatggggaaggctagagggcttccccacttccagagtagctgtgcgccttgtacttgctttattcactgatggtccttctaataatgcctgcggaaacccattttgtcaactgtggccacatgtaatctgtttgctctgtctgcagtgggctcgggatgagtttgaaggcctcttcaagcagccagcagaaaatgtcaaccagtacctcacgtgagtaactcgagtgccctctcgccctgtccctgtccaccagccaaggcatcccggctgctttcctcatgacagtaacacttggcaccaggcacacttttcacatgaatgagtggctgttggggcctcatgttgtttggggtcgggactagttttccatggagaaagtaagattgctctggagcccactcttgaggctgacatgtaatcctatcctctgtcctcttcgattcctgatagagaccccaagtttgtggagcgaacactgcggctggcaggcactcagcccttggaggtgctggaggctgtgcagcgcagcctggtgctgcagcgaccacagacctgggctgactgcgtgacctgggcctgccaccactggcacacccagtactcgaacaacatccggcagctgctgcacaacttccctcctgaccaggtaatgcccagttgttgggtccatttggcagaatgtgtttccctgaaatgggagcctgcagtgtgggtcctcccactgtggagtccagctgtggcaggtgccctgaggcatggggatctgagaagagtgattgatcctgacctgctttttcctcaccctagttcctttgagcaaagaggcttggttgctattgcccttgactgtggtgtgggctgcgtcatacctgattcccagtcagggctgtagggattatgggggagaaattctggagttaagagcacaggaatcaatatgggttcaaatccaaactctacttgaacttaggcaaatcacgtaacttctctctgtacctcagtttcctcgtctgtgaagtagaaataatagtgatctatctcatggggggtttggggaggattaactggtatttattaaaatgaagttagtacaatgcctggtaatccatgagagtttgttaaatgatgggctgtttagcacaaaatggctacccagtgattggtaattgttctctcagccagatctctggttcaacctgtgggaccctacagttgaggtattttgtgattggctccagtccgcatcgagtgcccaacccaagatagtgaattgggggcacatctggggcctaggtgaagcgtgaagattgtcagagaggccttcactctcaggtcctgttctcaaaaatctctccatcccttagctcacaagctcaggagcgccgttctggtctgggcccaaacgctgtccacacccgctcacctttgatgtcaacaatgtaagtctcctttctagggtcttctggggtcaggtggagggtgaataggtgggaaggaggtggcggctccccactcgagggctgatgtgctcacccttccctgccctgccttctcctagcccctgcatctggactatgtgatggctgctgccaacctgtttgcccagacctacgggctgacaggctctcaggaccgagctgctgtggccacattcctgcagtctgtgcaggtccccgaattcacccccaagtctggcgtcaagatccatgtttctgaccaggagctgcagagcgccaatgcctctgttggtgagggtgtttggccagttggccaggagtcaccccacatgtccccggcctagtccagcctccccaccagtcctctacccctggttctgctctgctctgtgaccccaggcctgaggtttacccacaccttcctttgagcctccctttgacatgaagagggtaggttggggcaaattatctccctccctcctcctccttcccactatctggccctcaggagaacttgctgttttactcttgctctgtgtatttcccttagttttgttctttcttctgtttcttcttgatctgttcatctaggaggtatgatctctaccagcagtctctctcccttgatactttcctgccttgtctccttccagatccgcccccatctgtacatctacctgcatgtttctctgtgcatcttcaccctccatagtttggggctgcggtttactgacacccccaccccaccccatctgcatattttttcaccacccctcccttctgtatatgatgcttctgtagctctgtaacgccccctacatttaccttccttatatctcccccgtcttcctctccatagatctcctcccatttccccttccatggtccccatcttccttctgaaatgtctactccttcatgttcctttatgtatgtcttccaatctttccttccatagctctcatcaccttcatatatttcttccatctttctcctcccacctgcctcgccctctgtatatacccccactctcccccttttatatcttctccatctccccccatatctttcctctatgtccacatctgtgtattccccccaacttcccctccatatatcttttttactccccttttcctccctgtatcctctgtgttccccccatcttgctctacatcattcttcccaagatctttacgtctcccatcttgatctctccatctccactttctcctaacattttcatttccgttccttagtgtctctagagagatcattcttgatagcctcagctctttctctgtgtttttcaggtttgtattctgctctgctctacctctcctccttgccccttttctctcccaggatgtctctcctttccaaatcctttttgtacctgaataccttttgccccaccctgggctctcatttccatctcagaccttagcctgggatctaaagggctgacagtgtccctttcttcatgcagatgacagtcgtctagaggagctcaaagccactctgcccagcccagacaagctccctggattcaagatgtaccccattgactttgagaaggtatggggtggggctcaggacagggaaggaggatgggcaaagcatagacaggctggagaaaacaggagtatctggagccagccccgggcctttgtggggatcagattgtgggcctgccatatggctctgaatgagtaggtgttcccagccatccctttgtgatctgggagagtccagcaggcaattgcagtggaggatacacatcttctttatctgatcctctccccactgccttcacaccctccccactcataacaggatgatgacagcaactttcatatggatttcatcgtggctgcatccaacctccgggcagaaaactatgacattccttctgcagaccggcacaaggtgaggggaatctaaatctgatgttccaccctcctccaggtttgagttacccacacttagcccctctgtagaccctgaggctcttgtacttaactaccaccttcttttgtcccttctgtctctcagagcaagctgattgcagggaagatcatcccagccattgccacgaccacagcagccgtggttggccttgtgtgtctggagctgtacaaggttgtgcaggggcaccgacagcttgactcctacaagaatggtttcctcaacttggccctgcctttctttggtttctctgaaccccttgccgcaccacgtcaccaggtgggggcctgcatccgaagcagggtttgggtggggtgtatctgtgtagatctggttctgattcacgtcataccctgtcaccaggtgagggtttctgtctgtgtacctaccctttttgtgtatcctttttcacttattcattaatcacattatttgagtacgtgcgaaaagatgggatatttgaattgtgccctgggagattattagtaactacacaataatggcagccaaaatttattggacgcttcctacacttaagtgctttgcttgcttcattaatgaattcactcaaatatttattgagcaccttttgtgtgcagggactcttctaagttatgttcctcaagtagattatataaataacctattaaatgattttggaatcaaaaaaggataaaaagaggccgggcgyggtggcttacgcctgtaatcccagcactttgggaggccgaggcacgtggttcacctgaagtcaggagtttgagaccagcctggccaacatgatgaaaccctgtctctactaaaaatacaaaaaattagccaggcgtagtggtaggcacctgtaatcccagctactcgggaggctgaggcaagagaatcacttgaacccgggaggcggaggttgcagtgagccaagatggcgccattgcactcccgcctgggtgacagagcgagactgcatctcaaaaaaaaaaaaagataaagaggacttgagaataccagggggcgaggggatgtatttgagattttgtgtaggatggtcagaaaaggccttgctgaaaagatgacatttgagatcagacttggaggatgtaaggggacaaactgtgcaggcttggtggcgagtggggacacattccaggcagagggaccagttcttgaaagggtaccaagataggggtgtgcctggcaagttggaggaattcaaagtccccagagtgagtgtgagattgaggagggtaggagatgagaagaaaacagaatttcattgcttagggtgagataggaaccacaagaggatttcgaacaaaagagggttgtgrtctgactaaacacgtctgcatgggggtaggggggatggagacagatgggggctggaccctctgggatggtctccatcttacactcccctctttgtcttgcagtactataaccaagagtggacattgtgggatcgctttgaggtacaagggctgcagcctaatggtgaggagatgaccctcaaacagttcctcgactattttaaggtaaggcccctcccttactctgtcaccccacctcagggggcgaggtgtacacggtgacttgctggcctgtccacctccatgaccctgctgttccccctccctctccagacagagcacaaattagagatcaccatgctgtcccagggcgtgtccatgctctattccttcttcatgccagctgccaagctcaaggaacggttggatcagccgtgagttggacactggccaggctaggggaggccctgtatgggttggggagcctcatcatccagctgtcccactccagttcactgcccctacctacctgcccatcctctcttgctttctgccctcctgaccctatactcccatccccctatccccaggatgacagagattgtgagccgtgtgtcgaagcgaaagctgggccgccacgtgcgggcgctggtgcttgagctgtgctgtaacgacgagagcggcgaggatgtcgaggttccctatgtccgatacaccatccgctgaccccgtctgctcctctaggctggccccttgtccaccmctctccamaccccttccagcccagggttcccatttggcttctggcaktggcccaactagccaagtctggtgttccctcatcatccccctacctgaacccctcttgccactgccttctaccttgtttgaaacctgaatcctaataaagaattaataactcccacatcgcctgccctgctggttccagggaaggaagggacttcctggagctgtctggttcagatgataactcagagggctcaaccccaccacacctgccagttttctggacaaagaaaatgtaattgccacctcttcctgccctctctgcctaggaagagatggaggcaccagtgaggccatagtgagcaggtacttgggtccatgtgactgttaatttgagctgggttcaattctcaccttctccatgtcctaactccttgctctgtgaagaggaaagttacggtgaccaggctgctagggcatggccagcgtgccttatgtccttagggcagatcccctcccacctggctcaaagcactcagaccctgggcagccttttgtggtcatggttcccagcaccaggaatgcctgtgctgctcttagttcaatttccttgctgcaggggtgtcttaaacagctctgccgaatgccagtgcctgcaggcatacttcgtgatttttatggaaatacttgagaacatctgtagaggaaaagcccgttgcttgccttacgcttcccccggccctgccgccgccccagccccaggtctgcctgtattccccttgaggatcttcagcctcctactttggagaagacagctggctgtggggactgaggggtgttcatcgcttagagcaggtagcaggaggcctaacaccagccccaccgggactgcagagttaccgtgctctgtccttggtyttggctgagtgctccagacaattgaaagcaccagtctggccactgctacatctttgccttcttctattgtactggctcctggtgcctgaggagtccattcatacttctgttcctcaactaaccaataatttatctaccttacttagaaacaagatccctcactcttctactcaaacctgagtgtaaggaatagctcaacctgttctgaactggcttgattcccatcacagcctgtgcccacatctgctgcctcctgggccagtagttcctggtcctgggcacagtatatgcccttgtccacctccttctgatcattttattttcttggcctgctctgcttgggtgaccttatccttccacagtttcttcttccccactaggacgttgaggacagaggcattttccctttggtatctagtggtgatactgtcaaagggaaagtttttcccaccacaggaactttcccattattgctctagagtaccctagacactccacaccgcagtccactggccacaccactacagcagctgaggcttgaacacaactgttgtcttctttctccagtatgccagctcctttgcggatactctatagacaccttgttcactgcacctcccccattacggctccatgtcttccccaccacaactcctggatctccttgacaccttattcgtgcctgacacccttctccatcaaaacaagcttttgagtcatgcatgaatcctggttgcatcttagttgttccccctccacctcattccattttacttctgcggtttgtctaccagtctaccattgttaacaccagccagatgggagatcagggcttagcaggcgggggttgcgtcattgcaccgagccccctgcacccagcagccacaaaggatagggtgggacaaaggtttctcttgtcactgcctggaactatttgcccacctccttctgatcattttattttcttggcctgctctggcaggcattcaacaaacatttgttgtgtgctgtgtgccagtcactttctaggcacgtgagacagcagtggataaaacaaagatccctgtcctcttggggttttacgttctgctaggttgacacccagaatagattataaacacagtaagcaaattgtaccttagaagttgatcagtgctcttcaaaaggcgaggaatagagcccgatctggggatctggaatgatggcagtgcaggtaggaatttttaaatcggaaaggcttcatggagatgactttgaagcaagcacctggaagaagtgagagaatgaggcacgtggatgtgggccagcagcattccaggcaaagggaaccacagcaaatgcaaaacccctgaggctggattgtgcccgtttcactcaaacagctagaaagagcgctagtatggtggcagtgagtcaggggaagaagaggaagagatgaggtcagagaagtgatgagcctgttctatgccaaggcgaggacttttatctttgtcaaatatttccactcccatcatggcccgggaaatctcactaatgtaaaccttactgaaaatcctaactgctgtgatcaaggctgccataaagggaagcccggaagaggcggggaggctgccttggaacagggtagtgtaaggatgtgccagaaggcctgctggaggttgcagccctttgagctggacttggggatagtgtggttttccaggcagaaggaagtgaaggattaggtcggcctggtagtacttggcacacaacatgcgcccaataaataaaatggaaataaaaccgcggagtgttctacttgtgttgactgacatcaaaacaaaacaaaaaaccctcagagtgaggggaggcacgggaggggctgtgccgggcaagagaggtggcaggaaaatccaacgcacggcgcctatgcaaatactcgtgtgaggcagaaaagaggctccgccccgctcgaagttccaagcatgcgcagtagcggctcctgcgcctctaaggatccgcctctttccttctttctcagcctgggttccaccccgggaggcccgctgtatgagatggagggcgggctaaaggcgggacgagactcgattgagcgcaattatgaccaatcaccttgcggaatattcggcctatagcgaaggaggagctcagaacaaaaaggagaccccacccccgccgacggtgaaaacctatgaaacctgggcggaggcgtgcggagtcgggtagagagcgaaatcacgcctcttcagtcagccacgccctttattcttgctcggcctcgccacagagagcaaatcagattggctgggcgacaacctcaaagggcggggctgcacacgttcactacgggaatgaggtagcggtggagggggcagttgggcggggataggccgtcctagctaaggtggtaaaggccaataactcttcaggctgcctctcctcgaaaagtcatcwtctcgcgaacctttaaaatgccttcctccccaagcacctcaagggactagaactgagtgcttcatttgtcttttttcctccttgcaaaagtcccgtttgccaccatggggatgtaccaagtgagaccgagtagggggaacgagtggtgattgacgcgccaggttactggccactgctcacctaggcgctagcaaacttctgccaagatcggaactgagtactaaacagcctccacagttctccctggtgccgtctccggcttggcgccgcatcctcctctgggctcgcgatggccgcgtcccctcccrctgcggacgggtcctttggtacatgcagtccgaggtgagtcccctcctttccacttcacccttccgagcgcctgcgtgcgcatgcgcggagcgcggcgcgcgcggcggttgggccgttggctgttcggccctgggatccgccgccactccgcgatcagaccgctctgtgccgcgagccgccgtgagcactcggattcaagccggcgccaacgagtccgggggcatcgcccgcagcggccaagctcatggccggctgagcgggacgccgcctccgcctcagccaccgccgccgccgccgcctcctcctcctcagccggcggcggcccgggcccagcaaccatggctgaagactactgggacgggcgcctgcggcgaacaggaggagaaggaggtcgcgcggcctcatcccgggccgccgccccaggcgccgccgcgccggccccgcggctctgaggttgctcgcgcgcccccgccggtgagcgcgtccccgaggcgtggaggctgcccctcctccttcagaacccacctcgggcggtgcccaggggtctgggctgcggggctggcaggtgcccccacccccggcgaatttcccagaatgcaccggggcggggggtcatttggggcctccctgaccttggccccgccctgggcctgtcctgggagctggggttgggtagtgctgtgggtgctaatggggacctgggggagtcaaaggaccaaagggtgtggaaatgggtgacaatggggtgaaagacttgggggggttgctgatgggggtcggagcatgtggcagtaagcctcacgccaataagtcgtgtaaggttcaaggccccgtgtgtgcttgtggaaggagggcggggtgcggagcgggtgagggacccgagggtgtataacggggggtagggtgtcgaggaagttctaagacatgctcatagggattatgtccgcagagaggcccggtgtgtgttcatgggggacagggtggcacaggtaccagaacgtgtgttggtggggtcagggctctgaggcctggtgcgtggcgatgaggccctggatggtgttaatactgcgtgtctgtccgtggggcctgcagtgtgtgagaatgcagtgtgtgcttgtggagggcaggtagctgaaggactcgagtgtggtgtgtgcgccagtgggggtcatggctgtagagggtgtatgcctgtggcctcgaaggtctaggtagtttgggacccagtatatgctaatgagggcagagtggaggaaggacctgagggtatctaacggaggaaggactgtggaatacctgagcctggcctaaaggagatgagaattgcgtgtctgtctgggcccaggaaggagtggtggggaagtgtcttagcactgtcagaggcttagtggacgaagggtaaaggtgatgtgaggtgtgagtgtgtccatggacacagggaatgtgagtctcgagggcacactaggaaggagcagggtaatagaagtactggtggttgctaatgtgggtttagagacatagaggcacttcaatgtgtgccatttcgagagtcagctgtgtgaagtctggaatatgctaataagcatcagaaccttgtgaagattgtgcccttgtgtccgcggaggaccagagtatgttgaggttccagggggtgctactcgggggtagggctgcggaggggatctagtgtgtaataagggggatcagggctttcatgaagggatctaagtgtgaaccaacaaggattatatctgtggagatatctctgagcagagagcaatagaggacaggaatgtgtgatgatctcggtgtgctaaagtggattacagctagggagggctgaagtgtgtgctaatgggagtcagggctgaatgagacctgtgtgcactaatgagggtcaggccatggtagaacagtgtgtttgtgtgtccctgcggaatagggctgagtaagggttcagggtgcactaatggggaggcaggactgtgtgaggcccggcgtgtgctaatagaaatcaggcctgagtgaagactcagtttgtgctgacagaggggacaggacagtggaaggactggaatgtgtgttaaggatggtcgtagctgtgaaggggcctgagtgtgggtaacactggttagagatctatctgtaaggttcactttatgttaatagcattcagagcagcatgaagaaggtccagtgagtgctaatgtgggtcagctatagagtaccccaagtgcatgttaatagaggtcagaatcatgtagggggaacagtacgttaatgaggggagtcagtactatggagaaggtaacaagcagctaggccagggaggggcccaagaatgtggtggcaagagttacttagaggaggctaagtgtgtgctgacagagttcagggcggtatgttatgtgttagggctttgaatgctgatgggtatatgagataatagcaggtaagatgtagtgaggcctccttgagggtctagcgtgtattaatggggatcaggacatagggtgcgatgaccaagtccttagtggttggtgtgttgagtatccttgagtatgagagtagtctgaggatgggtgtatgtctttggggatcaggaagggtcaggcaggacatgtgccttttttggggtaaggttttatgtccagtttcttgctccctccttttttgaaatctaaaaagctcattcaactgaaatgatatttaaaagtttccttgcgtataaatgttcaattatctctgttcacaggggcatgtctgagacccccatccccctttctgggagtgttatgtgatatacagattttacaccccatcttcctaaaatcccaaaaaactgaactccagagcatgtccagcccttggggtttccagttagaggtcgtggacccatggctcctcctggcttcctccccatcctccattcagccctacttccagtctcccccagcccctcccctactccctgtcacaacatgcaaagcaactgggtatctgtgccatatggggacacaaggttgtctttgggagctggccatgctttaccttccttgccttaggcccagtattcagcctcccaggtcaggatgttttgtggttatcctgggttctccatggatggacctcatcctgtatctgaggtctttctgctagggtggcccctacccctcctggggatagtgagttcagccaggtgggggcgagaactgctgggggaagcacctgatttcaaggtagcagatgacccatttctctcctcaaatccagccccagtctcatcctcgacctcctatctagctctacttcccttgggcccagggccatcttaggccctgctgtgagtccagatggttcctgggtcaggtctttccccctccttgctggcccagagcycaagaggaagcagaagacggctggcctaagccttttggtggccccattcccttcagcaatccatctaggtcatcttcctgtcgatgccagcatccctggrctaccttgtttagggttgttcaatgaatagcagggactcatcacctcagcagaggttggtcctaggccctcagccccctgattcacttatttctgccataagcactttttgagcatctactctgtgtcagtcactattccaggtcctcaggatatagccgtgacctaaacacagaaatctaccctggcggagctgatcttctagttgtggcggtgaggagatagacagtaaagactaaagaaaccaataagtaggtggtgtcatttctgaggaggtaatgagtgctggggggataactggcaaggtgagggagttcgggatggttgagattttaaatagggttattcacagaggcctcatgaaaaaggtgacctttgagcaatggcccaaagggagaggggagtgagccatttcgaaatttaggggaagggtgttccaggtaccaggaacagccagtgtaaaggccccgaggtgggactctactgggtgtggttgcagaacagcaactaggaatgatggcgggggggtgtgggggtgggggggggccgtgggcaagaggcaataggggcaaatgaggtaaagaaacacctgtgggccacattgaggactggggcgtgtatttggggtgatgaaaaatgtacattcttgagtagaggagaaatgtgacttggcttgtaaaagtctagattggaccctaggggtcctaacctgatcaaacckttctggcagccctgagaagagctggtgtacactgagacccccccgccctccacacaatcccacccagtggttgggtctgggcaggacaccctgacacacgctcccctccccccccccacctgggtagatgaatgggatgatgcagtggttgtcatgacgatgagtgctagagaagtcaggaagagggtccctgtggccacagggaatagtctgccttggcctttgagggtggtgctaggggaactatgccactctatggccgtgctcgagaccatgtcacccatccttcaattctgggcacacgccctggccgacccatggctgggcccatcactgcagctgtacctgagaagatctgcaatggagccttctgctcctgcagtggggcttttcccctagatcccaacaatccatcgttagggcccttgccctcaatcagccacctaaatctgagaactcaggtgggctacgtaggagcagggtcccagtggggctggctgtgtgggtgggcaggtactgacaaagatccccatccatgctgggtttccagaactcctgagtggctctggggtccatagtggttgagtgagcactgacaagttcatgtcagtgccccctgctaggctgtgggctttagggaacccatggtgatcaagcaaatgctaataagagacccatttccatccttgtcccttgctcagatcgccatggatcggatgaagaagatcaaacggcagctgtcaatgacactccgaggtggccgaggcatagacaagaccaatggtgcccctgagcagataggcctggatgagagtggtggtggtggcggcagtgaccctggagaggcccccacacgtgctgctcctggggaacttcgttctgcacggggcccactcagctctgcaccaggtgggtccactggctatcccctctcccrtatggccccaggctgcttcccaggtgttgcctcctggtcacattcctcattttcctctaaattttctgccctttctctgccccccatgtgctctcttctcccccttccctcccatcttctctcaacaccgtctgtctatctgtccatctgcgctcctcttcttgcctttctgcccaggccccgtggtgggggacagaaggtgccttgcctgtcacagctgccccaaggctccctctgcccttctgccctctatgatggcctcctcagtcctctggtacctgcctgccctgggcctgccttcccaggacccttggcttcccctgccaccacctagctgccggctctgagctcagcttgcccttggaaggaagggttccactaggtgacttttgcttccccaccccccagttcaacctgccctagatgtacctgagcttccctgggctcaggtacatcaccctctccccgagggactccaggtttcctgtgggggccacgtgcacacatgtgtgatgatggaatatgtttcgtgggggatggggtgtcctgtggttcctgaccccacctggcctgccctacccctctccctgccaccagagattgtgcacgaggacttgaagatggggtctgatggggagagtgaccaggcttcagccacgtcctcggatgaggtgcagtctccagtgagagtgcgtatgcgcaaccatcccccacgcaagatctccactgaggtgcttgaccccgtctggatggtggaggaactggaaaagggggttggacctggggaggtggagctcatgatcctgtttctctcttgccttacctgctaggacatcaacaagcgcctatcrctaccagctgacatccggctgcctgagggctacctggagaagctgaccctcaatagccccatctttgacaagcccctcagccgccgcctccgtcgtgtcagcctagtaagcaccttctgttcccgtcctctcctttttcttctctcccagacccttctcctgagccagctttaacctgcctcatttgtcccacagtctgagattggctttgggaaactggagacctacattaagctggacaaactgggcgaggtgagaggcaaataggaggcccatggtggggatgaaggtcagtgggaactcctggaatctcatagcacctctcctgtcayacttcctcacattccagggtacctatgccaccgtctacaaaggcaaaagcaagctcacagacaaccttgtggcactcaaggagatcagactggaacatgaagagggggcaccctgcaccgccatccgggaaggtacacacccccatcccatctgccccaggcttccccaacccacccctggcgcacacactccataatgagaacaaagactggttctaagaccccccaaaacactctggctttcatgggaatgcctgtcacccacatatccaggtaataatcagggtaaccaggaatctgttcccatttggataaaaggtagatgaattgcaaaccagggtttggttctgagaacacccctgaaagtgctcaccagtttatttactgtaacaatttctagtcagaatatcacatggaatgaatttgaattgcactgaaatttagtgtgcaaattcgatttcacgcgatgctgcaggcctatgtactgagggttggagccaggccccttcccagaaaccaaaaacaggttgtgaaaatctagtgtcacatgagcctggggctgcaatcccaggttcttgctccatactctcctctgagtcttattttccacatctgcaacatggagacacaactttcttctggcatgaggcgggttagagctggtggctccgaggcattaccctgaactgtctagagaaagaaagaaaacctgggcttgtccctttctagtccttgtcctcacctctgtcctgagggtaggaccctgactcttcccctgtcccactcccatgcttcctgcagtgtccctgctcaaggacctcaaacacgccaacatcgttacgctacatgacattatccacacggagaagtccctcacccttgtctttgagtacctggtaaggttgagtggcagtaggtcccagggggaggtgaggagaaggccaggagccataggaagtaaccctcattcctgtaccacctcttctttcctcaggacaaggacctgaagcagtacctggatgactgtgggaacatcatcaacatgcacaacgtgaaagtgggtgtggggcaggaagcaggggcacaagggggcccccactcacccactccaacccacaaatctcccagaaacggacttttccctttggctttttttgctaggagcccttggagggcactgggaccctgtcctcttttgtgtgacaaggctctgggcctagtgtctgtgtttgggaggggagcagtgcctgctgggggtcgggctagtggatagtctttgacctctgcctgccattcctgggtccccagctgttcctgttccagctgctccgtggcctggcctactgccaccggcagaaggtgctacaccgagacctcaagccccagaacctgctcatcaacgagaggggagagctcaagctggctgactttggtaccactggcctcccctttcttattggctccccagcctcctactttcccatgaccacttagtctcacttcccttcagccttgccagattttgcctaggacaccctcagtctcaactgcactctccccgagactttgcccatgactccctcattctagctgtcctttctctgatttccaggcctggcccgagccaagtcaatcccaacaaagacatactccaatgaggtggtgacactgtggtaccggccccctgacatcctgcttgggtccacggactactccactcagattgacatgtggtaaggacaggtgsaagtgtggcaggggccatgtggtaaagggggtggcttggtcacaacagccacccagccagctgcctttctattcactgtgccctccctgcccaggggtgtgggctgcatcttctatgagatggccacaggccgtcccctctttccgggctccacggtggaggaacagctacacttcatcttccgtatcttaggtgaggaggcatgggccctaggcgctgtggagacacacrgggaggacctgtgaaatgtttgggataactcctcttccctactaggaaccccaactgaggagacgtggccaggcatcctgtccaacgaggagttcaagacatacaactaccccaagtaccgagccgaggcccttttgagccacgcaccccggtgaggctggtgggtgggtgggcgttaggggccagagtgtccaaactcattttaaatcaggtctctttgtccttgtggcagacttgatagcgacggggccgacctcctcaccaagctgttgcaggtgagaccaccttgggtcagccttgggggtatgggattccaagtgtggggaaacagggacccccccccctcaaaccaggggcagggtctgaggtgggcagagagacctacttgttgaagatatcaatactatccccctccccgcacccccactcagtttgagggtcgaaatcggatctccgcagaggatgccatgaaacatccattcttcctcagtctgggggagcggatccacaaacttcctgacagtgagtggagctggggaatggaccggccagcgtggggactgggaaacaggactgctggggccagctggcgggttgtgtaggattctggctgtgccacctctacgtggggggacatcttgttcacgtgtgtgatgggttgtatttgttatgaaaacattttttagttttcagttccttttacctttcatgaaaaatttaaaacatacataaaaatatatgcaatagcactttactttttttaaagtagacatttccttacatgtgctaaaaaatgcacaaatcataagtatactatacaatgaattttcataaatgaaacacatccttgtaactagcacaaaagtcaagaaacagaatgttaaaagctccccacccccagctcccttgcatctccttcagttattcccagccccttcccaaagggtggccactgttttgacctctaacagcaaggataagttttttctgtccttgtactttatagaaatagaatcacatgtgatgttctttttatatctggcttttaaaaactttttaatatggatattttcaaatatatgtatttatatattagtcaaagtaatatgatgagtccctaagtactccagtgagtcatcaattcatggtcaatctggttttatctatattctctctgattattttgaatcacatccaatcccagacatcatagcatttatccttaaataatttcagcatatacctataaaagatttttttaaaacaacaatattattatcaaacctacaaaaaacatttgctcactttccctatcttcccactggattaatatataaagcaaaccccaaacaccacccatcacctagacttaacaggtggtaattgcaataccataattcacttgacaaagttaataatgatttctttgtgtcatgtaatagtctatatttcatcttccctggttktagctggtttgtgtatggaattgtttgacagataaaggtcaagcctctcagagaaggggcagctttttctaattcttcccatggggtcatatggggctggtcctagatgacctcatgggtcatcccccacttctatgtctcccccatctgtagctacttccatatttgcactaaaggagattcagctacaaaaggaggccagccttcggtcttcgtcgatgcctgactcaggtaggtatagccccttgtcttcctccctgccccacccacctacctgcttacccaccaacagccatctgctctgctttcccccacaggcaggccagctttccgcgtggtggamaccgagttctaagccacagaccgaggccccagcaggcagcggctggagggatgccacacccctcacagggcagcccccaactacatcttccctgcttactctctgcctacctgcctgagccatgttcacctgcccacttgtcccctgctgcctgcccaaamaccccaccattggcctgtcaacccacccattggcctgtctgctgggtgctaacaaagctctcatcactccttcacttggtctgtctgtctctgtcttggtagttgccggtggacagcatggccgtgccagcctcccacactgaggccaggtctaccccccatcataccagcccccaggaccactaccccacggccagccaggggtccagagctagcccaggctggggatctcgactcagacaagatggtgacaatgccttgagtctgaggcatcctctgcctgctttcctgcctgccccacctgcctcatattgtgtgggcctttttttktttgtttcattcattgtttttttttttttaattattttaaatgagatttttgttttttttaaatgcaatatctctgtatacagactggctgggccccaccccctgcgtgtggccctcccacagtattttgtgcaatgaagccctgctcccagcctttcagagacagggacacagcccctatttggaaccctgatcatcaccagaccctgggattggctatgggaaagcatgccacagccactcgccttcctacccccgcccgccatccccagttgcagggggatctggggactaccagagactctgggaaatggacaaggtggggggccccactctttctctcctgcagtcccgtagctggggcctccttccttctcagggtctccccagcccagtccccttgctcccatcccactcggtgctgttgggtaggggccctgccaggaactgaccagctcagcgaggagccataatgtgcatatgtgcacaagcagggttgggggaggggggtgtgaggggttgtgcccaggtgttgccccctatctcctggggagggtgaggcagggcagggacagtctccagggtcagtccctggatgggtggttacctccccttcctccaccctaagccctggggccctkaaatggggtgggagggcaggggtgggagccctcctagtgggtttggggggttgggttcctgaatgcaccataatcgctgtatgaaatattaaaaagtctaaagtgaaaagcctgcttgcaaatccctgtaggggtggagggtggccgagctggggtgattattgggaccttggagaattcatacctcatcaccactgtctaggaaaacactgggagtgggccagggacacgtcacgactatgaaaaaggcatctaaggtattgcatatgtaacagtagaacatggagttgaagcaggtagggcaggctgaatggtgttgatgggttgagaagcagaaaggggagttagatttgcccaggaatatgaggaagcctgataagagggtggaggcagggaagtggagagacgatgtttgaaagacactggacggcccaatagaaccatggatgggaagatgaggcaaaggcccagtatggccatctgactaggaaaccatgaagaggagggaatgttcaggacggtagggggtagattttggaccactgagtaggtagagaaatcctttaatacatggatcaaattaagcagtggggccatagatggacctggaaatttcaattattagtgtccaggaagtaacagaaaccatgggcatgggtgagagagtttgcaagaggccagggatcaatgacacaacctggggtttgccctcagatatgaggataattgaaacttattttctttgtcctgtgagttccagccccagtcccaccatcttgggcaaagccaaggattgttttctaagcagaagagggggtgagcagggccaggcaaatactgcaagtaatggcaaccctaattaagtggctgtttactaaagcccagtggtgggggcccatgaacttctaatcactctactgtgtgtgtttgttttttgagacagagtctctgtcgcccaggctggaatgtggcggcacaatcttggctcactgcaacctttgcctcctgggttcaagcgattttcctgcctcagcctcctgagtagctgggattacaggcgtgcacaaccacgcccacctaattttttatttttagtaaagatggggtttcaccatattgaccaggttagtctcgaactcctgacctcaagtgatccacccacctcggcttcccaaagtgctgtgattacaggtgtgagccaccaagcccagcctctaccgtgtctttctaagcactttagtgatgtttcagcttgcagcctcatggtgccatgatgactgccatgtccccagagatggaaaagcaagcagggaagacagaacaccttccttacctgtctgtgttcttttaacggctggaacttccacaagctcctcagcagacttcctgtgccatttcttggctagaatcagatgacatggccacttctggcagcaagggaggatgggaaaaggagggccttgcaaagggggacaggattgccaggctggatttaaaaggtctagaactcacccaactgctctgggaagtggtagggtcactggtgtgggcagaggttggcctctggaaggtggaaaaaaaaaaacggtctagggctgggaaaggaggtctcttggatttacctggctgcccagataaatggggagggggagtctgcagaggggcaatggggagaatcaattcagagaatctgacaagattcaactgggcttgaagagcagctatctgccatgtgtctgactcaactcaaatgccactttctttggggacccttaagtgaaaggcctgctccctttcctcacccagagcttacacaactgagtttgtgacccctcatctatgccaggtctgggctgggggctggaatcacagtaataaagacacaatccctgccccgcagagattaactgaaaataggtaaattatgaaattgtgagggggaagggaggttcgaaattaaagtcatcatcaacggggctggcagccccagcagaggaaagaatagcatagcctagagcagtggttctcaaccagagacatttttcccccaaaggacatttggtaatgtctggagatacttggttgtcctgaggggtactacttggtatctagtaggtagaggccagggatgctgctacatatcctgcaatgcccacaacaaagaaatgacagtgctgaggttgagagaccctggcctagtccaagggttctcaaactttgggtctcgggattcctttatgttcttaaaagtttaagatattcaaaagagtttttgcttatgtcatatagcctctggattcagaagcctctggataatcacactgtacacccctgagagaatgagagtgaaaaagtattgtgaaaatagttttcattttgtgaaaccccaagaggatttttggaccggtagacaggctgggaccactgggaccacacggttggagaatgtttggcctggtgtttaaggtcacagctctgaaaccagatttctcaagtctaaactgcagctccaccactaattagctgagggacgtttctggtactcagcgtccccattgttacccatgggtgacaaggacagtacctgctgcctgaggctactattttagtccaataaagcacttaaactgggcggacagctagtttagttatgattgctatgactccaacaaacatagggcctggggctaacttgtcttcaacaccttgtctagtgaataaatctagttcaggaagagaaacaacagcccgcaggcctcggtgggtctctggaggtggaaacctcttttgcattgggttttgatggtacaatgaagggcattctgatcaggctaacaaaaacactgctcccagggtaggagtcctagcccacctcgggaacctcagcctccactttccatgccacctgtgccctaagtctacagggcgttaggaccccacaaggcacttttgtctttcttggttcccactgaagattttaccccacctagcccttcgacgcgtctgtgcacggggccatttccaatatggcagtagccccgcgactgtttggggggctctgcttccgtttccgggaccagaatccggaagtggctgttgaggggcgtcttccaatctcgcacagctgcgttggctgtagaagagaacggacggcgatggcgacggtcgcagcaaatccagctgctgctgcggcggctgtggcggcggcagcggcggtgactgaggatagagagccacagcacgaggagctgccaggcctggacagccagtggcgccagatagaaaacggcgagagtgggcgagaacgtccactgcgggccggcgaaagctggtgaggctgggctgcggtggagcctcggcagagggaacggtgggggcattgacaaccgctggggattcggcggccgagggccgcgggaaagctgctgcggggtgcgggggcgggggagtggccggcgggacagcgggctaaaggggcggggaagtgcctttgaatgaatcgcaacgtctggaaaaggggcggggcctgtgtggtgcagtctgacgcctgagaacaaaatggggtttgttgtgatgagaccagtttcggtcctggaggtggggccgggcctgcgtagtgaaactgcgtaggaacctgggaagaaggtgggttctgctacataaggcgggggcgcggcctgcgctgcgtaatgcaacttttgggggcgaggagcggtttccgattgctccggggcggctgggaacgaggcgagctttgtgacgtcagcagaagagcgggatggagccgaacggtccgagggagggagcggggacctccgtgggggaggggggaggagcctggagcctgggaacgaggttaggttggtgacgtgagctgaggcagaaaatggcgcctgcgaataagcaaagtttatgacgcgccgtggtttttgattctggcggaagccttcccgagtcgagagaacgtgcaggtgattagcaccggaggggccttccatgtttaattggttttctgtgttggtactgttttgtttttagaatcaagaaaaagtcgtttttttaaaaaatagaattttgataaatcggcttgttttactgatttcttgctaaacagtccttcttgaaatttactgcttctgagttcattttatttctcgccgagttgcatctcgttttttaattgtgaaatacgtaagacttaaaaagattatataaaacatttacgcagcccagattgacggacatcctgttaaaataaacggcctacactcttcaaaaatgtcaggatcatgaaagacaaaggctgaagaactgttccaaattgaaggaattaatgcaatttaacgagtcatgataactaaatgcaacatgtgatcctcgattggatcctggaacagaaaaaaaaattattttaaaaatcaattttttatcataagattatttttgtctcttttactgtaaaaggcaatggaaacgtcggtgaaattttattaaagtgggtagatactagtactactaataattgtgatcattgtggctgtgaaaaataatatccttgtttataggaaatactgaaaaatttagggataagaacgcatcgtgtaagcagtttattctcaaatgcctgaaaaattagcatatataaatttatatatggcgaggggaaataaaattggggagatgttggtcaaaggatacaacatttcagttagacaagaaaaataagttcagatctattgtacaactatagttaataaattcattgtatacttgaaaattactgagagaagattttacatgttctaccaccccccaaaaaataagtatgtgacgtaatggatgtgttaattgccttgacttagtcattccacaatgtatacataagtcaaaacttcatgctgtacactctaaatatatgcaatttttgtccattttaaaataaataaaaataccaaaaaatgcatgtaaagaaacaacgattgagcaaatgagtaaaatattagatttggagaatctggatgaaggacatatggggattctctgtattatttttgccatttttctcaatctatttcaaagtttaaaaattaaataataaataaaaacgtgtgaattcaccatccatgttaagattcagaacactgtcttaagaaatccttctgtgcccctcccagatggaaattcccctccttgctccatgggaaactgttatcctgaattttgagttaacagtctcttccttttctttaatgttttaccacagctgtatgcatccctaagcggtatgtattgtctaagctttcactttatacatatatggaatacatatatataaaattctactggatgcatactgtgagcccttatcttcgcatcgggtaatacatggtatccacatggcatcattggtgatgttaaccttgatcacttggttatggtagtgttggccagctttctcaactgtaaaggtaccattttcctctttacatatgcagtaattatttttaaaacatgtatcatgtccagccattcctcaaaatactcttaacagcttcccatctcttgcagcgtagatgctaaaatccttacaatgaattgcaagcctttatgaagctggtctcctgcttgcattctgatgtcttcccatatctctcctctgattacgcactccctccctgtctccatccaggccggccatattggactcttgctgttcctcaaacacatctaaccttagggctttttcgagtgaggtttactcactacagagttctttaataaccacaccagtgaaatgtgtatctctgttactggggagatgagttgagattttccaaatcgggaatacaaacccaagccgtgtttttctgccattacgtcacacttttccagcaagaaaaagcctcatttcatcctgagaataaacaaaataaccacagtgttttgtaactcatttgaagatgttcaaaagggccttgaggctttgatccttgcctcttcctacctttgtagccttgtgattgtgtcactggtaggacatgacatcctgtcatccttgataatacgctttaaaattaccccaccagtactgggttttcttttgggatgatgaaatattttggaactagggagaggttgtggttgtacaacattgtgaatgttctaaatgccgctgaattgttcactttaagatggttaatgttatgttatgtgaatttcacctcattaaaaaaattaccacaccagtgttggttcagtgttgaagccggtttgtctctgctgtcatgggtattatcatgaagcatttttgctaaactccactttgttaatgcttctctagtaagagcaaagcatctcaaggttctttattgctgtccattttccattttacaggggtttgcttaagtggccaggatatatgtgtttataaagcattttgaagtcatggactaaccccaaatcatatatcttgtatcagtattaatatttgcaccttctgtcttttgtcagctggcagatttgggtgagggtagttaattaatttggtcatcacaactgatttaatttctgggagaagcttgtattttaaggcaaattcaaatctgtaataatatagcctccttggaaattttcactttttccttttgtgggatgaaccatcttcaaacacaaatcagacacaagagaaaactagaagacagaaaataaagaattgtttagcaacttttttccataagcacatatttcatatcatttcaacaaatttgaggaagcacgaataaacctaagtgactttagcaagatcagttgtacctgtatatactggcagcaagaaactagaaaattaaaatttatgataccatttatgatagcatccaaaaaattgaatacccagctgtaaatataataatttgggtgttattgatacagaccatgacacctttgttgtgactgccacctggcctgacagagattgtgagacatcctgatttcagagatgttaacaatgatttttttaaagtgtctttgacttgaagcaatatggtaataattttctgtgaaaaattatgtaaaatgtcagtcctctatgaaatctatagaagttcagcctgtgaccaggtctggaagttttgcttaccactctacagcgtgattttaatgttattttttgttcaaaatctgctcttaaaaagaagttgagcagtgcctacctttgcattggaaggtactgttaactatagctttactgaacaaattaacttcatagactggctatggaggcaagtaaagccacaaagggtggatggtggtgtgtggggtgcagggttgggtctgagcattgagccaccggcacagaagggtttgtttccctggtgtgagtgatatggggcagggtctgtgggggtcagtgcagcaaaaaaacaaaaccaacaaaaaacccacagaaatgtttgcctatctaggtgacttgtgactattccaagatttgtctgtccctccatcctcccacctctctgatcctttcatgaacaagggaaagttgacattttaaagaatcacattgatgaggttaaattgggagaatcgcttgaacccggcaggcaaaggtcgcagtgagctgagattgtgccactgcactccagcctgggcgacagagcaagactctgtctcaaaaaatgataataataataatgaggttaaattgcttgaaaaccagccaatataatgttatgtgcatttcatcaaatttggttattttttaaaaagcatttatttgaggctgctcagtatttgggatagccttttatgtgtcagaaatgccacagcagaacaggtgtgtgtgtatgtgtgtgtgtgtgtgtgtgtgtgtgtgtgtgtgtgtgtgtttaggcaggaggaggtttatgtctgtgagcttttatgtccaagtcctgaagtccaagctgtcagaacaatgacagctaaaattcatttagcacttattatatgtcaagtattttccaaacttcaggatttctcacaaaggtagatttcaatatagttctaaatggttatccttgtagtacatataagtttcacctttaaaagagagctagttgaactgtatactgaaaaatgcttgatggtaagttttatgttacatgtttttatcacagtttttaagagaaccataagctcaggaatttactataaagccaaagtaaattctaaattaaaaaatgatgaacaatagcaatatgcagttcttttttttttttttttttttgagatggagtcactctgtcgcacaggctggagtgcagtgatgcagtctcggctcactgcaacctctgcctccagggttcaagtgattctcatgcctctgcctcccaagtagctgggattacaggcacgtgccagcacacctggctaatttgttgtattttttagtagagacggtttcaccatgtcagccaggctggtcttgaactcctgacctcaggtgatccacccgtcttgacctcccaaagtgctgggattactggcgtgagccactgtgcccggtcttttttttttttttttttttttttcagtatgcagtttttgaaggaaaaccttatgattctttttagcattttaaattctttgctccttttaaaagcagatttttcaccatttatcaaatctagttcttagctgaagaattatgcttccattgatagatcctttagaaacaaacacataatgaatggctaaagccttataaaattagctgcagatggcacatatcttgagcctaacttaactgggttatcccacagactaattcaaatgaatcatcttttattctataataaaacctcatgtttcctagcactataagtatggattttttgttggtttgtttgccattgttaaccacattttctgtttttaatcagatttcttttttaatactaagaagttatctaacatacaaatctgagtttcactgaataaattttgcttcgaatttatttttatatgatgctgaaacttttcatcttaaattataatgtgtcaatactttcagtctgttgggcatgggaagttgtatagctaaccctcagctacccatgtaacacccttgttacctgtctgggccccaggttccttgtggagaagcactggtataagcagtgggaggcatacgtgcagggaggggaccaggactccagcaccttccctggctgcatcaacaatgccacactcttycaaggtacaaggcctttgcctccttctcaccctagccctggagttcttgtcccttccgtccctacagatgatcataagcccattctgtgtgctaggtcactggtggggtggccagagtcattcgtcagtttcctttgttgattcttcctctgccacctccacccccgccccacagatgagataaactggcgcctcaaggagggactggtggaaggcgaggattatgtgctgctcccagcagctgcttggcattacctggtcagctggtatggtctagagcatggccagccacccattgaacgcaaggtataatggatggggagggtgcatggcggggagtgcgtagtaagaaagccttgtaggcccagcatgggtacagatccatgtatgctgggtaggtacacatatgtctgctctcttccccctcctagctcatcatacaggtatctttgtctgctgtgtgtgttcccctgtgtggctctctttacagaccattgtatatgtgtgtttgtatgctatgtttgtaaggcagagtgtgtgctcctctcatttgagaggtcacagcgctgtgtctgtgtgagtacacctgtgtctgcacccctctactcttacaggtcatagagctgcccaacatccagaaggtcgaagtrtacccagtagaactgctgcttgtccggcacaatgatttgggcaaatctcacactgttcagttcagccataccgattctattggtgagtctaagggtcacgcaatgggttggtgttcctagctactagtcccaactcagtgacttgaggttgcatagggttaagctgaagctgactgagaaggcactggtcagactttggaagacccagaaggcattggctaagttgggtggaggcactgaggggatctactagagccctgagggtatgtgagctacattctagtggcttacgtggtgtggcagaggatatttgctggagatctccagtctggagtgtgggccagtcatttggagactgattgaggacacaggtattggccaagcatgtgaggtccgtagggatgagtcaggtatgcccagatggattgatcattttgggyctcacaaagatcttgaatgtactccatcaccccgcacaggcctagtattgcgcacagctcgggagcggtttctggtggagccccaggaagacactcggctttgggccaagaactcagaaggctctttggataggttgtatgacacacacatcacggttctcgatgcggcccttgagactgggcaggtaagggtggggagggcttttctgttcaggtggactrgcagatagactcacctggcagtactcgggggaaatgaaggctaggtacccataatgtcctccattaatacctttccttctttctctttctccaacccagttgatcatcatggagacccgcaagaaagatggcacttggcccagcgcacagctgcatgtcatgtgagcccttggggtatctggtccagagcgggggcgtcccacagtaggcaaaatgatttagcccatgagcacattgcacccccatgcagcaggccctcagctgacagtttctcatctaaccccaggaacaacaacatgtcggaagaggatgaggacttcaagggtcagccaggcatctgtggcctcaccaatctgggcaacacgtgcttcatgaactcggccctgcaggttgggccattatagttgtgtctggcacagccacgtggttgggcttcaagagctgaggattggggacagagctggggtcctgaggggactacagggcaaggggtcaggatgaaagctgaggccccacaagtctgaagtggcacgcccacgttcattcctgaactatcagcctcttctctcagcttgccctcattttccctcttctcttccctgttcccacgttcttccttctcgtgaaatcctaatgccttctctcccctactctcctgctcctctctctcctcccttccccttctctcttgttttcctctctctttcctcctggcttctttttgtgtatcctcactttgaaccttctgtctcccctctgcctcattcacctggtctctggcctctgcagtgcctcagcaatgtgccacagctcaccgagtacttcctcaacaactgctacctggaggagctcaacttccgcaacccactgggcatgaagggtgagatcgcagaggcctatgcagacctggtgaagcaggcgtggtctggccaccaccgctccattgtgccacatgtgttcaaggtgtgactcaaccctgggcacccccgaccccctacgtctcttggctctcctaactccctctctctctgatgaccctgcccatcttcttagaacaaggttggccattttgcatcccaatttctgggctaccagcagcatgactctcaggagctgctgtcattcctcctggacgggctgcatgaggaccttaatcgggtgaagaagaaggagtatgtggagctgtgcgatgctgctgggcgaccggatcaggtaggctgcccccgcatttgcagtccaattaacatcaccaaggcctctgcctcggggattttctggcctccctggggtatctaacacgccaccattttcygttaagtttctctacctgacctcaactccagccttactcttaaccttagttgcaataccatatctgcccccacagtcaacccagagtaaaccccagcgcagtctcctgccctaaatgacccccagtcttgaccgtgaacatagtctctgtgyatccctagctggagctctgcctctggactttagcagtggccttccgcttcaccccatttgaatgcaccccaagccatggtttcctcttaccctgggcaagccccaccacccaccatgacactatcaacaggaggtggcacaggaggcatggcaaaaccacaaacggcggaacgattctgtgatcgtggacactttccacggcctcttcaagtccacgctggtgtgccccgattgtggcaatgtatctgtgaccttcgaccccttctgctacctcagtgttccactgcctrtcagccacaagagggtcttggaggtcttctttatccccatggatccgcgccgcaagccagagcaggtgtggggcagtgggggcctggggagatgatgatggacacatagagtttgattagctgccatagctcaaggcttcttgcattaactcaccacaagcccttttggtcttttgtggataccgtttttcccttagcaccggctcgtggtccccaagaaaggcaagatctcggatctatgtgtggctctgtccaaacacacgggcatctcgccagagagggtgagactgcagaaggaggctggatgggattccagggcaaggaggcagaagggcctgggaggccgtgcagactaacagtcccctctccatatyccattcctagatgatggtggctgatgtcttcagtcaccgcttctataagctctatcagctagaggagcctctgagcagcatcttggaccgtgatgatatcttcgtgtgagtggggatggcagggaggtggtggttcctcaggaacttggtccacttccttttgtatggtcctgccttaaccaccttctctcttccctgcctctgcctcgttcactgggcacctgccctgcgcagagcttcagccacatgccttgggaggctgaggcaggagaatcacttgaacccgagaggttcaagtgagccaagatcacgccactgcactccagtctgggcgacagggcaaaactccatctcaaaaataaataaagccgggygcggtggctcacgcctgtaatcccagcactttgggaggctgaagcaggcagatcacgaggtcaggagatggagaccatcctggctaacacggtgaaaccccgtctctactaaaaatacaaaaaattagccgggcgtggtggcaggtgcctgtagtcccagctactcgggaggctgaggcaggagaatggcatgaacccgggaggcggagcttgcagtgagccgagatcgtgccactgcactgcagcctgggcaacagagcgagactccgtctcaaaaataaataaataaataaataaaaataaaaatgccttcaggctgtgaggatgagtgggtggggcagccagggcagagtcagggagtctctgggggccctgatcaggtgtgcctgctgtccaccccccacagctatgaggtgtcaggtcgcattgaggccattgagggctcaagagaggacatcgtggttcctgtctacctgcgggagcgcacccctgcccgtgactacaacaactcctactacggcctgatgctttttggacaccccctcctggtatcagtgccccgggaccgcttcacctgggagggcctgtataacgtcctgatgtaccggctctcgtaagtgtcctcttccccgggggtggggggcggaggggtctgaactcygacttgggtgtttagctgcttatttgacacctcccctgtaacaaacaaaagacagtccaaacttaacatggccatagaagaacttgtagggttttttctttctctagacctctggctttgctactgcctgtcttgggtgctagggatacagaggtgaacaagatgcacaaaacagacaacttcatcttgtcttcagttgtctctcctggagactgttgtccctcctgggagagtcttggtttttttgtctttttgctgacaaattttcattttgcctaaaatctagagtctttactgtggcacacaaagcattgtgttatcagaattctcccccctcattttgcattcaaaagtcattccccagaggctttccctgatgggaagttacagccggtatgtgtcttgtctagcagtggcttattagagtaaaagtccacgctccatacctttttttttttttttttttgagatggagtcttgctctgttgcccaggctggagtgtagtgacatgatcttggctcactgcaacctccatctcccggattcaagcgattctcctgcctcagcctcccaaatagctgcaattacagccgcgcgccaccacgcccagctaatcacactccacacctctgactgggacacaagttccttcattctcaggccactgctgacagccttggcctcttcatgcatttacgcgtcaccccttcagccctctcacacctcagattcagaacggtttacatgtggatctaccaatggcttcccattatcttaagtaaaatcccgggctctatccccactgtccttgtacccgtcttgggagtctcctctgctctgttgcagacgctacgtgaccaaacccaactcagatgatgaggacgatggggatgagaaaggtgagggggctaacagtcagtgggcgkgggctctgggttaggtctgacccacgtagggttcgtctaggtgtgcattgcagcttagcacttgaggctcacaccttcccatctctgacatcctcctgtcctagaagatgacgaggaggataaagatgacgtccctgggccctcaactgggggcagcctccgagaccctgagccagagcaggctgggcccagctctggartcacgaacaggtgcccgttcctcctggacaattgccttggcacatctcagtggcccccaaggcgacgacgcaagcagctgttcaccctgcagacggtgaactccaatgggaccagcgaccgcacaacctcccctgaagaagtccatggtatttcctttggctatcagcgagggctggggaggctggaggggagatttcctggcagcaggatccatgaccacctctccctcacccccagcccagccgtacattgctatcgactgggagccagagatgaagaagcgttactatgacgaggtagaggctgaggtaaatgagatcccagggatggggggtacttccagctcttgcccctcaactcttcgtacatcctccccacaactcctctagctgggaacagagccaagagatccaggtcaagcttggccttggggcctgaacacctactgagagctccagggcctgaggttcctagcttcaaagtcggtgctctgacccactcagtgtgtgtctcccccgctgggcccccactccccatttctccatctgtcctcacagccggccatctggttgtctgttcacccaatcctagggctacgtgaagcatgactgcgtcgggtacgtgatgaagaaggctcccgtgcggctgcaggagtgcattgagctcttcaccactgtggagaccctggagaaggaaaacccctggtgaggggccagagcggggcctgtgtgtgggggtttcattggatggaactactatatttagctttttttttttttttttgagacagagtctggctctgtcaacccaggctgaagtgcagtggtacaatctcggctcagtgcaacctctgcctcccaggatcaagctgttctcctgcctaagtctcctgagtagctgggattataggcacccactaccatgcctggctaatttttatatttttagtagaaacaggttttgccacgttggccaggctggtctcgaactcctgactaaagatgatccacccgccttggccttccaaagtgctgggattacaggcgtgagccaccacacctggcctatatttagctctttaagtataccttcctcctccctcctccacactcaaacccttcttgccaacctggccaccaatctcctgagcagactcctaccccagagccttggcctgtgctgttccttctccaggaatgttgttcccagtgatctacaggacttcactccttacgatgctcaggtctccgatcaaatgtgacctcatcagagagacctcctctgactaccctgttaaaaatcacccttccccaccatccctctccatcccctctctgctcttttcttcctagccaagcattactttctagctcagcgatgccacttgatgtgatgtcctgtatccacttttgtgttatttgtcatcttcgttagagtcaactcctcgagggtgaagacttaagttcactgtgtgttgcttctacctgtttataatagtgttgagtgttcggttgatgctcagtagacacttgcagaataaacaaaaagagaaccaaaaccacactccctagtctcagaaataagagcagcatgtccgtggagcagaaatggaacagaaatacaaaatagttccaaagggttaaacaagcaatcaataaatactggggagtgaatgaatgactaaaatacgaagagaggaaactagaaggatagaggtgggctctaaaataagactagcatctcatggaacagaaatcaaacaaaaatacaaaaaatagtatgagcacatatacaaaagatagtaagcacttgacgagtgagtgaaaggattttaacaggaacagagcaaactagaatactagatgggctaatagtaagagcagtgtttctgtgagccagacatggcacgtgagaggcagtacaaagggcrcacagtaggtgctcagaaaaagtctgttttggctgggcattgtggctcatgcctgtcatccgagtaccttgggaggccgacacgggtggatcacctgaggtcaggaattcaaggccagcctggccaacatggtgaaaccctgtctctattaaaaatacacaaattagcagggcatggtggtgcatgcctgtaattccagctactcgggaggctgaggcaggagaatcgcttgaacccaggaggtggaggctgcagtgatccgagatcgcgccactgtactccagcctgggcaacagagcgattctctgtctcaaaaaaaaaaaaaagaaaaagtccgtttgctgactcgggctctstctgtaggtactgcccttcctgcaagcagcaccagctggcaaccaagaagctggacctgtggatgctgccggagattctcatcatccacctgaaacgcttttcctacaccaagttctcccgagagaagctggacaccctcgtggagtttcctatccggtcaggggccagggagaggatggctgggggaaggcagggaaaggagggggtgtaccagtattaaccctctccccacccacagggacctggacttytctgagtttgtcatccagccacagaatgagtcgaatccggagctgtacaaatatgacctcatcgcggtttccaaccattatgggggcatgcgtgatggacactgtatgtgccaggctgtgggtggggcctgccctgggggttctgggcaggggggcgatcaggaccttcccagtgagtgactagggatgtgagccagtggtgaggttatcgtggtgggaggagtgacaagagtgaatctggacacttctgagaggcaggaagggtaggcgaggataactctccttccctttcagacacaacatttgcctgcaacaaggacagcggccagtggcactactttgatgacaacagcgtctcccctgtcaatgagaatcagatcgaggtgtgacttccatcctacctcctccccttcttcctttctgattccacctccccacccccacaatccacactgactcctgtcctctccccacagtccaaggcagcctatgtcctcttctaccaacgccaggacgtggcrcgacgcctgctgtccccggccggctcatctggcgccccagcctcccctgcctgcagctccccacccagctctgagttcatggatgttaattgagagccctgggtcctgccacagaaaaaaaaaaaaaaaagccctctctgcaatctcgcttctcgtgtccgccccgcttctcttattcgtgttaggtgcccccgccaggcattgcaggcttagtcgtggctactgttctcctgtgccgctgcatcgctctctcccgggaaagaacaggtcgtgtctcctcctagcagtgcgcgccccgcctgtgtttgcccttccagcagtgaccctcccttctagtctttatttatggtcgtgcccttccctctcctcagcccagagtgttctgcgtgggtggtgatgggggttcacctgaacacagagtgtattttcttattgaggccctgtaccttctgctgtgtgtgtgtatatataaagcaccagtctgctccccactcagcagtgtggttttttcctccatggacttaactaagcaccagttttgtgcctgtgttctgtgttcttatcaaaggccagatgtgtgatgggtgcagctctgagtggttagtgagcaccagctgtgggctgggtactgctgttctaagtgctttgaaagcaccctctgtgtgccaggcacgattccaagcaccaatggcatgcccagttttttccaaaatattttccaaatattgatacgtaatcctcacaacaatctcatgcaagagttgtcatctccagtttcggatggggatactgaggtacagaggtcacagaattgctcagggcttgtcaggaggtcagtatacctcatgtgctacccgagtcggtccctggagtgggtgcttggcttgtctggacccaggactgctactcaatctgcagacatgagctgccctacaggcaatgtggaaatggagcacgtgggacggatgcatccatgtgggcaaatttgtggtttggggacataaaaatactcctctcaggccaggtgccacctgttatctcaacactttgggaggccaaggcaggaggatcacttgggccctggatgttgaggttgcagtgatctatgatcgtgccactgcactccagtctgggccacagagcaagaccccatctcaaaaaaaggatgctattccccagaccacctcacagacccccagtagtgtcctctgagaagattttgtccccctgagacctcctttggagatggtacatgcatttggcagaccagccaacctgccaggacaaatgtgctgtctgtgtgtggcccctgtagtcagccccctctcccatcatgaccccagctcccacaccaggcaggttccctccaacctcaccccagacgacactgaacacctgccgcaggaatttggacataaataagccatccaacccttcacactgatgggtgaggggaatcctgatcggtggcagctgagaggccattctcatggccagggcctcaacactccccccagccttctgcctttgcactgggtctgggcagacccactgtgagggtcactcagccccagcatcgccacccgcaaacctcccagtcactctgctgacacaggcagaagtcaaggcagttgctgtgaggagcccagctcaaactgacttagcaaaagtaagaacagaaatactagtttcaggtatgactggatccaggaactcagaagctgtcatcgaaggctcgtgaagaccatatgactgaagcactacaatcaccccattttgcagataaggaagcaggcataaagagctgggtgagaatgggctgtaagggccaggcgcagtggctcatgactgtaatcccagcactttgggaggccgaggtgggtggatcacctgaggtcaggagttcgagaccagcctggccagcatggcgaaaccccatctctactaaaaatacaaaaattacccaggcatggtggcacatgcctgtaatcccagccacttgggaggctgaggcaggagaattgcttgaacccaggaggcggaggttgcagtgagctgagattgcgccactgcactccagcctgggcaacagagcaagactccatctcaaagaaaaaaaggatatcatactaaagaacagaaaaatagtaagtttcaaacaaacggggagaatagaatgaagaataataatccagaagaaggcaagaataaagaaatagagaacaggtggacaaatagcacgtacacaacaatttgcagataagatctctgctccctccagttcaagggagggaactgggaatgaggcagctgctttgagactgatcaagactgccatcgtgccaggcagacagtgggggaagggcaagtaaaaatgccacaatactcccattttgaagatggctttttcttggttggacagttgctgtaaactttttttttttttttttttttttgagatggggctcgctctgttgcctaggctgcagtgcagtggcgcgatctccgctcactgcaagctccgcctcccgggttcaggcctttctcatggctcagcctcccgagtagctgggactacaggcgcctgcaaccacgcctggataattttttgtattttcagtagagacggggtttcaccatgttagccaggatggtctcgatctcctgacctcgtgatccgcccacctgggcctcccaaagtgctgggattacaggcgtgagccaccgcgctcggcctgctgtaaacttttgaccattgtatttgtctgttctcgcactgctgtaaagaaatacctgagactgggtaatttataaagaaatacccgagactgggtaatttataaaaaaggctcatggttctgcaggctgtacaggaagtatggctgagaggtcttaggaaacttacaatcacagtggaaggtgaaggggaagcaggcacgtcttacctgccctgaagcaggaggaagagagtgaagtggggaggtgccacacacttttaaacaaccagatgtcatgagaactcactatggtgagaagagcaagggagaaatctgcccccatgatccagtcacctaccaggccacttctccaacaatggggattgcaatttatatgagagttgagcggggacacaagtccaaaccatatcaactattttccagcactctgacacagttagctctaacaattctgtttgctttttgatgtttctgttaaggagccagagcctggagcttcctagtcttccattttggtgacatcactcttttttttgagatggagtctcactctattgcccaggctggggtgcaatggtgccatcttggctcactgcaagctctgcctcctgggttcatgccattctcctgcctcagcctcctgagtagctgggactacaggtgcgtgccaccatgcccagctaattttttgtattttttttttttttttttttttttttttggagatggagtcttgctctgtcgcccaggctggagtgcaatggcatgatcttggctcactgcaacctccacctcccaggttcaagcgattctcctgcctcagcctcctgagtagctgggattacaggcacgcgccacgacaaccggctaatttttgtatttttagtagagacagggtttcaccatcttggccaggctggtctcaaactcctgacctcgtgatccacccgcctcagcctcccaaagtgctaggattacaggcgtgagccaccatgcccggcctaatttttttgtatttttaatagagacggggtttcaccatgttggccaggatgatctcaatctcttgacctcatgatccacctgccttggcctcccaaagtgccgggattacaggcgtgagccaccatgcctggctgacatcactcctcttctgtgttatgggtttttttttttttccacacacaacatggatttttatcttttctttttcttttcttttcttttttttgggggggtggtataggatctcactatgttgcccagcctggtctcaaactcctgggctcaagggatcttccctgccttagcctctcaagtggctggaattataggcctgagccactccactatgcctagcccgctttatcttttcttggcttatcaactataactcttagatttttggtttgggtttcttttttttaaaaaaaattattattattatactttaagttttagggtacatgtgcacaatgtgcaggttagttacatatgtatacatgtgacatgctggtgcgctgcacccattaactcgtcatttagcattaggtatatctcccaatgctatccctcccccctccccccaccccacaacagtccccagagtgtgatgttccccttcctgtgtccatgtgttctcattgttcaagtcccacctatgagtgagaatatgtggtgtttggttttttgttcttgcgatagtttgctgagaatgatggtttccagcttcatccatgtccctacaaaggacatgaactcatcattctttatggctgcatagtattccatggtgtatatgtgccacattttcttaatccagtctatcattgttggacatttggattggttccaagtctttgctattgtgaatagtgccgcagtaaacatacgtgtgcatgtgtctttatagcagcatgttttatagtcatttgggtatatacccaataatgggatggctgggtcaaatggtatttctagttctaaatccctgaggaatcgccacactgacttccacaatggttgaactagtttacagtcctgccaacagtgtaaaagttgggtttcttgtttaatttttagagacggggttttactctgttgcctaggctggagtccagtggtgcaatcatggctcactgcagccttgacttcctgggctcaagcgatcttcccagttcagccccccaagtagctaggactacaggcgtgtgccaccatgcccagctattttttttttttattttttgtagaaatggtgtctcgctatgttgccagggctggtctcaaacttctgggctcaagtgagcctcctgcctcagcttccccaagtgctggggttgcaggcatgggccaccacgcccagccaactgttggttttattttagcgattgctttagggtttatattattcacctctaacttatcatagtctaccttcaagtgatatataccactttgcatacagtataagatgtttagtgtacttccatttcttcttgctcagcctttatgctgttgtatcatgcattttacttttacgtatgttataaaccccaaaatacactgttatttttattgaaacagtccattttcttttttcttttctttttctttttattgtgagacagggtctcactctgttgtccaggctggagtgcagtggcaaaatcatagctcactgcagccttgaactcctgggctcaagcactctttccacctcggcctcccaaagcactgggattctgtacacatgaaatacaattttttggccaggcgcggtggctcacacctgtaatcccagcactttgggaggctgaggtgggtggatcacctgaggttgggagtttgagaccagcctgaccaacatggagaaaccccatctctactaaaaatacaaaattagccaggcttggtggcacatacctgtaatctcagctactcaggaggctgaggcaggagaatcgcttgaacctgggagtcggaggttgcggtgagctgagattgcgccactgcactccagcctggcgacagagtgagactctgtctcaaaaaaaagaaaaaagaaaaaagaaaaaaaaagaaatacaattttttgtagagaggagggtctctgcaaaaagctactgtgccctgactcaccttatttttttaaagatattttcatgagtatagaattttaggttgacagtttttaaaaaattttttattactttgaagattttttgtttttgtttttgagatggagtcttgctctgtctcacccaggctggacagcagtggtgtgatctcggctcactgcagcctccacctcctgggtttaagcaattctcctgtctcagcctcctgagtagcttggactacaggtgtatgccaccatacctggctaatttttgtatttttagtagacacggagtttcatcatgttggccaggctggtctcaaacttctgacctcaggtgatccacctgcctcggcctcccaaagtgctgggattacaggcgtgagccactacgcccggccgcttcccagtcttcttgtttgcattgtttcaagtgagaaatctgatgtcatccttctctttgttcctatgtatataacatgtcccatttttcccactggctgcatttaagattttctctttagcgctggttttgagcaattccgttatggtataccttggtgtaattttcttcatgtgtttgaggtcgtttgagccttctggatatgtaggtttctggtgttcatcaaattt

SEQ ID NO: 96409 - DNA, 12433 bp, Homo sapiens
gccaacacggtgaaaccctgtttctactaaaaatacaaaaataagccaggtgttgtggtgggctcctgtaatcctgtaatctactcaggaggctgaggtgggagaatcacttgaacccaggagacagaggttgcatgaactgagatcgtgcactccagcctaggcaatgcagcgagactgtctaaaacaaagactagctggagagtcctgccaggaaaaggccctcagcctccaactgctctgctcactcaaagccggaacatgcagctctagagacgcatcaggaccaagacacgactccccacttggaggaatcaatggggaaagagacggaggcaaaggagaaccatctcactgggagaggcgacgctgtttgacacatcatccttgtacctcccaaagccactgccctcccacacctgggcaacagtggccccaaccccaggcccagccctcctgcaggaaggaagaggactgaatggagggcgtggcaggctgaaaggacgtggcctcctcaaacgccttggtaaacggcctctggggccaactggcagggaggggctggcacaccaggaagtagcctcctcctgggagttcagccagagctaaggtcccgtgcccaagtggcctccagagccaccttttcagaaaaagcacatcccgcccaccccgttccccctgcttaaggccccgcctcctccctgagcctcctgctggcctctcacctagaagcagggggtagtcctcggcctccagccagggggtgcagacctggatatgctggaaatgcttctggtggatgaggcagctgtaatactccctcagaggccgtttgccttcacagagaagaggagacactgccatggacccgtctctgtccctgccacgtggccccaggcccaagacactcccccctaggagggatccctttcccagaagctccactcctcggcagctccagtcaggccccatgtgggcccttccagaagcaacccaggagccccaagacctgcaggggtgtgtgcacgctgacccctgacgcacagccctgtacctgcagccagctggcctcgggctgcaaacatggcggggtaagcactggcctggcacccgaccgcccactgggtggatccagccttctgtctgtgttgtgcgcaggggacacgaggactcccccttccctgacacagcctccagagcacatggcgcgggttccaaaccactcctgggagcctagaggccagaagaaggaggagagcaggaccagcagctggcccagaccccgcctcttcccacaccgcttccgcttttctccctcctcactgagtcaccttgaaagggctcagcagcagtaactgtgggacaggggctcttccatttgaaaaattaagaggctcggttaaggcaccaatgacatggccgggcacagtggttcatgcctgtaattccagcatattgggaggccaagacgggtggatcacctgaggtcaggagttcaagaccagcctggccaacatggtgaaactctgtctctactaaaaatacaaaaattagccgggtgtggtggtcacctgtagtcccagctactcaggaggctgaggcacgagaattgcttgaatgtgggaggcggagtttgcagtgagcccagatcgcaccactgcactccagcccgggcgacaaagactctatctcaaaaaaaaaaaaaaaaaaaagacaccaatgacgtaacaacaacaaaaagaagatgcttggaaactactgaaaaagtaaaaagtttggtatctacagattcaaatctgggctccctgccctgctgtgaaaccctctgagcctcagtttcccccatgtcaagcaatataagaccctatggcagagagctgcagtgaggattaaggagacaagatcgtgggaagcacagggtaaagactgcatgctccgccccctccgccatcccccaaccaaacagaaagccagggtcccaggcggtacctgttatcacacagacgagagaaggaaggttgtgtccgtcaagagtcagttgttcaaactctgtgtttaaaaaaagaaacaattctacatggaatttctgatagaatttttttttttttttttctgacagactctcgctctgtcacccaggctggaatgcaatggtgcgatctcagctcactgcaatctctgcctcccaggttcaagtaattctcatgcatcagcctcccaagtagctgggactacaggcgcccaccaccatacctagctactttttgtatttttagtagacacaggtttcgccatgttggccaggttggtctcgaactcctgacctcagggtgatctgcctgcctcagcctcccagagttctaggattacaggtgtgagccaccatgcccattcagaaaaaaatttttaaataaacaatagccagagtcacctggtaaggtggagaaagagcactgctctggtggggaggccaccatcctctgtgagatactctcctggagggggcatttcagcctgagggcctggtcactcaatgacccaactggggattcagggcggcccacctccaccacccccactgtccccaggctgccccacccagtggtccagctcaggaacatgctgcaggccaggcaagcagctcacagctcagtggcccccgacaagcccagagctcctcaccgcagccacacagctactttctaaagcttccagcaggatggagaagtcttcatcctctatgagaagagaattgaatgtcagggtcctgttactagacacctctcttccaggtcacacaccctccccttctcactgagactgtgacggggtgggggcatgcaggactggcagaggtgaggagaacacaggttggccaggtgcccgtcacaccaaacccatgtgccccaggggtcctgcagacctgtccagctcgtgctgctgaccagcagggctggctgctcatggagacgtgtcaccagcctgctcccagcatcctgctccatgaaggccgaccgctccgtggctggatcctcaggttctgagatgaaagagcagaaaaaaagcctgtgagaggccacagagcaggcccaggaccaaggacgggcatctcctgccatggcgaggcctgcaggctcccagcggttggggtgcctggccacatcagcagcaccaggccacccctgccatccgaggcctgggcttgctttctctaatattgttgctgggtgctaagattacaacagcaaacaagactgactcattccttttctccacgggacttactgtcttatcatcccctggactcaagatgagggtgcagggatgccctcccacaccaccccagcttacccaggggcacacctcagggtgtgtggacctgcacaaaggtcccctccttagccccatgagacaccccaggggacacacaggtccacagatcctgccacagatctgggaacccattgacaggagagtaagacagtgcaggggtccacaaacatttcttaaagggccagagagtaaatacttcaggctttgcgggccacaggttctctgttgcaaaacgcgattctgctattgtagctcaaaggcagctgtagacaactcagaagttaatgagtgtgttgtgtcccaatgaaacttgatttacaaaatcaggagactggcctgtagccttagtttgccaacccctggatgagtggtttcccaggtctgcagcgagaaggggagaggccagggcagtggcgagcaggagagaaggcagctgaggatgggaggcctaccgggccctgaacagagagtgtgtgctgcccagcttcatgaagagccagtgctgcaggtccagaggtgcctctttaaagaaagatgccggtttgtcgtagacggtcacagccctgcaatgaaatcatggcggggctattgggggtgctgaagaaaggcctcaggaatagaggactcagaggctccaggaaaagaaggacgcttggggaatccaagtctcagacgatgacaagaaaaagccttgcaattacttgggaatgcacagagagatgtcctaggaccaaaactgcctggaccccctggctggctgggaaggaaactctgccccctcctctcccagcttccccaaattttcccataatgttgccaagcattagtccagcgtgaaggctactttcttctcaaaccactcatttgggtcccgcgcccaatgtcacccatcctcagcaaaacaacctttatttccttcttcctgctttccagaaagttcccctaaagccctgagaaatcaccgaatgaaagaggctttttacaaacaggaaacttaagtggagtgccaatacacaacatgaattgcaccaggctgggtctaagataaaaccagactgtggacaacaggacagataagaccccccacatggctctgcactgcctgggtctgttattatgtggaggaatgtcagtctgttgctcctgtgggtggagctgaagcatgaaccaggagtcttcatccttagaaagcagttagacagacacctgagaaccaatcccaaactgcagacttccacagaaccttctggaaccttcccgaatgcaactcattactgccagagggtctttgatgagagtctactctccaccatttgtcttcaaagagaatacccacatattctctttccatggaaaggtaagttattagagtttatgcagtctggtatattaattgagagctttacttcaaagaatgtcacgtttacgattcagtctcacagactgggttaaaaaggcagtattgactattaagttgtaaattactgtaatgatcattattattattcaagcaatctgtgagaaatgagcattatctcacaatatctgcattttagtgaacctgaggaaagagtgtatttgctggaattacagaagcctgagaaccacaggggaattctcactgcagggtattcagggtcaaaggctgattctattttgcatgctcagtccttcctcaatttatttttatttctttctttattttttgagacagggtctcactctgtcgcccaggctggagcgccttggtgcaatctgagctcattgcaacctcacctcctgggttcaactgattctcctgcctcagcctctggagtagctgggatttcaggcacccaccacaaagcccagctaatttttgtatttttagtagagacgggatttcaccatgctggccaggctggtctcgaactcctgacctcaggtaatcctcctgcctcggcctcccaaagtgctgggattacaggcatgagccaccgtgcccggccctcaattttgtttttctatttatttatttatttatttagagatggattttcgttcttgtcccccaggctggagtgcagtggtgtgatttcggctcactgctacttctgcctccaggattcaagcgattctcctacctcagcctcccgcgtagctgggattatagttacgcaccactatgcccggctaatttttgtatttttaagtagagacaggatttcaccatgttggccaggctggtctcgaactcctgacctcaggtgacccacctgcctcagcctcccaaaatgttgagattacagatgtgagtcactgcacctggccccccaatttaattttaataaaattatcaaggaaataagccacaaaaggacaatgtgcagactttagaacagagctatccaatagaaatacaatgtaatccacatgtgtaatattaaataatttagtcaccacattagaaaaagtaaaaggcgtgaaatgaattctcctagtaaactttatttaaccactatattcaaaatattattatttcaacattaatgaatacttaaaaattcttaatgagatattttatgtttttctttttgcttatgaaggcttggaaatctagtgtatattttacactaacagcatatctcaactgagacggccacatctcaagtggccagtagccatgtgtggcctgaggccatgactctgggcagtacagctttaggtgagtctagggcagggcagaggggggcacctgggatcaggtgtggagcctggggccttgttttgcaccgtttggtgagggcactttctttccgtaaaacccaggtcaagcgtgcctcacaaaggggccagtggaggtgcctccatttacttgggagcttggcctctccagcttgccttcctactgcctggaagaagattgatgtcctcttgccttctctagcccctttcccaagaaccctcccagaatttagtcctatgaagggccaggggtgcaaggagtcacccacacaatgacaggacccaccagcaataccagaagttggccagccctactcatccaaattcctttctgccagctggacatcacaaggatttcagacttccatcctgcrgcaactccattttggggtccgggggtttaagggttactctattagtcctttctcactctgctaataaagacatacctgagactgtgtaatttataaagaaaaagaggtttaatggactcacagatccacatgactgggtaggcctcatgattatggcagaaggtggaggaggaaaaaagtcacatcttacatggcagcaggcaagagagttgtgcaggggagctcccctttataaaatcattagatcaggcagggaacagtgactcacatctctaatcacagcactttgggaaaccaaggtgggtggatcacctgagatcaggagtttgagaccagcctggccaacatgttgaaaccccatctctaataaaaatacaaaaattagccaggtatgatggctcacgcctgttgtcccagattctcaggaggctgaggcatgaaaattgcttaaacccaggaggtggaggttgcagtgagctgagatcacaccactgcactccagcctgggcaacagagtgagactcggtctcaaaaaaagaaaaaaagaattagatcttgtgagacttattcaatgtcatgagaacagcaggagaaagacccaccccatgatttagttacctcccactaggtccctcccacaacatgtggtgattatgggaactacaattagagatttgggtggggacacagccacaccatatctgagctgggcatcttcttccttgaatgcacattggcctctgaggcacttcctggttaacctcattccacagctgagaaaacccaggcttggcacaggcaagggatctgacccaatgtctcccatcttattagaggaaggaccaagactggacccacaactgtactcctgttttgtgtcaccatgctgcccccaagatcagatctcaaaccaagcagacatggggggctcagaaagtccccagcctagaactttcctgtcacccaatgacactaaaggctaagctttcttcttattattctggattcacgctagaatgaccttggggtgtgtttcacacgtgccgatgtctggagtttcacccccagctaactgactatgaatctctgggttggggcctgggcactgatattcatgcagagcttctgagatgatcctgttgtatcgccaaggttgacacctgcagaaaccttgcacactttttcattcatttagttattaaacatgtaatatttattattatttttccagacacagaagcgttgcaagaatagtacaaagacatcatttatacccttcgctgagattccccagtgctaccattttaccccatttgctttattattttctaagtggcagatgagttatcttttacccctaaatattcctgtgtattccttaataacacggactttgtcttatataaccaaggcaatagcaaaatcaggaaactaaccctgctacaataaggttttctaatgtagggacctcattcagattttgccagttaacccaatgatgtacattggagcaaacgataatcccagatcatgcattattttcagttgctgtgtctctgtaggtcccttttagcttggaacagctcctcggtttttctttatctttcatggtattggcattcttgaagaacgcaagatggttatttgatagattgtcccttactttggatttggctgatgtttcttggcggtgatattcttatgcatttgaggtgggattatcacagcaatggtgtcatgttctctgtgcatcgcatcaggagggacatgctgatggtttatcccattacaccaaagtgaatgttgatcgttcagtgaaggtgggtgcgggttcattgcattatattgcagaagccatcatcagccatactcgctctgattaaccaatcatcttatgtagccatttatctaacaaggctgtaagggtcttgaactcagggtaagcaagccttaaagcagaagagaagaaagaaaggctttggaacctggagctttggcaaagggcgcaggtgtggggaacgcaccaccaaacttgctcctggcattaggatgaagaggaaggagaacattctatctagaaggggtttggggttagccagaggggtgtgggagagtcagagtctgccaacttgtggttttgctgagggctacactgtggtagacaggtgtttcatttctgctcttgaaaattttgtttcacaatccttcatctaaaacagagcaattccctttttctaagttttggcccactttgcttcatctgtcttctgttctcttatttttagagacagggtcttgctctgttgcccaggctggagtgcagtgatgtgatcataggtcactgcagccttgacctcctgggctcaagcaatcctcctgccttagcctcctgagtagctgggactataggtgtgcatcactgcacctggctaatttattttatttattttagtttttctagagatgaggtctcactctgttgcccaggctgatcttgaactcttggcttcaagggatcctcccacctcggcctcccgaagtgttgagatgacaggcatgagccaccatgcccacctctgtcttttctcttgggattactgacttccacattagctccaggaataatttctgttaaggtgatgcctggctcgacacttctggtaactcccgttgtttatctattgcttatctccagaacctatgtgatgcttcctacttcaaagtgcactagtgcctgtcagcttgaaggcatcccctgagctgctggcaaacaaggcctttttacccagagattaacctcttatttgtttcaataaatgatcaaaagttggtttgcctcctgtgcatatgttggttggggacaagaggggattgtggtgatttctgtccacctgggacctcaggcctcctggtggcccctgaacaaaagtgaggcaggcagagcaatgggcagtgttccctgtctgcctcgttgccatcagtattcctgcctgtggttgtctttggtgcattatcaggatgtgtccctccctcatctttgttccctctccttcttgtatttaccttcacctgggctgctaagtgctgcgggagaaacattgggttgttgtggagattgtggccatgaaaatttaggttccccaccctcaggttgtccctcactggtctctgcctcatacctttgaagaaaacaactcgtggaggtcgtcttattcataaaggtgaacatttaacagagcagagcactgttgtgggttgaattgcatcccctctctcacaaaagacttcttggagtcctgacccccagtacctcaaaacgtgacatatttggagatagtcattacaaaggtagtcaagttaaaatgaggttgatagagtgggctttatccagtataatgggtgtccttatggaaaggggaaattggccaggtgcagcggctcatgcctgtaatcctagcactttgggaggctgaggcaagaggatcacttgaggccgaggttcaagaccaacctggccaacatagggagactcccatctctattaaaaagataataaataaaataggccaggcacagtggctcatgcctgtaatcctagcagtttgggaggctgaggcaggaggatcacttgaggctaaggtccaaaaccaaacctggccaacatagcaagactcccatctttaaaaaacaataaataggccaggtgcggtggctcacacctgtaatcttagcagtttgggaggccgaggcgggtggatcacttgaggtcaggagttcaagaccagcctggccaacatggtgaaacctgtgtctactaaaaatacaaaaaaattagctgggcatagtggcaggcacctgtaatcccagctactcaggtggctgaggcaggataattgcttgaactcgggaggcggaagtggcagtgagccaagattgcaccactgcactccagcctgggtgacagagcaggattctgtctcaaaataaataaataaataaataaatacatacatacatacataaatatatatatatatacacacacacacactacatatatgtgtatgtgtgtgtgtagatatagatatagatatggaaaggggaaatttggacacagatgcacacagggagaaggccacgtgaagattggacttctgctgccacaagctaaggagctggcggaagctcggagggagatccttccctagcatcttcagagagagcatggccctgagaacgccttcatctcagccttctggcctgcaggtgtgagacgatgcatttctgtagttctaagccacccagcttgtggtaccttgttatagcaacctgaggcatttaatacagcagcattctgagcccttcccatataaactcttcattgaatcttcaccacaactgccccacccataagtgctgttgttattgtcttcatttcgtcttcattttatccatgatgtctgcagcacagacaggttcagtagtttgctcatggtcacttgagataataaaaactccactctagggaacctctcatgcctgcctctggctgtcgccttccctctcccctttcctcctgtccccttcctctccatctcttttatgaggccttctttgttgtcccatctcttttttgtatttttactttgcagtaattttttttttgtgggggggaaagggggtctcgctatgttgtgcaggctgatcttgaactcctggcctcgagctatcctcctgtcttagcctcctgagtagctgggattacatgtgtgagccatcatacccagctgttgtcccatctcctaaatgtctgctttccccagcatccctgcccacagttccggcctcagtagcccctcctgagcctcattcaccacctatgctgatgaactgctgctcgccctcctcccaggcaggttgccccatggccactgaaggctcagcccatccacaacagattcacaaagcctgtccttcaatgctggatttcctagatttcccagccaacagtcccaccagcttaaaaccctgcagccatgcctaaatcctctatcttcctgtaccccacatccccacgaccaacccctgctgatttaatggctaaatccctctcttgacagtcaggaccagctgcagaatttgcaaggtccagtgcaagatgaaaacatgggcccccttattcaaaaatcagaggaaaagcactgctgaagtattaacatatacagcattttctttcctctgtggtctctgtgtctcaatttatcatgatgctttcatttgttatttaatgtccttctaagtaaaaaaaaaaaaataacattttaaattaccagcatggattatactgttcctctttatattgtgcaatgccagatttcaacaggaacattggactcaaatgtggaatcacagaaatgacataatttgtactttgcatgtgggatttttttgcctcacagaaacagtgagatgttgcaggaaactaattcagctgtttttgtttgtttgtttgtttgtttttatttttttccctgagacagagtcttgctctcttgcccaggctggagtgcagtggtgagatctctgctcactgcaacctctgcctcccgggttcagaccattttcctgccttcagcctcgtgaggagctgggattacaggagcccgccaacataccctcctattttttgtatttttaatagagccggggttttgccatgttggccaggctggtctcgaactcctgaccttgtgatccacccacctcggcctcccaaaatgctgggattacagacatgagccaccacactcgccattcagctgtttttatttcactttttcacacctatacaatctaccaccactctctacctttggcttactgatgtgtaaggaagaattgaaaggaaaaataactatgactctgttatctttgcttctcctgtgtcatcatttccagtggaagtggctggctactacagggaatcagatgggtagaaaagg

SEQ ID NO: 96410 - DNA, 28067 bp, Homo sapiens
ctctcgaactcctgacctcaggtgatctacccacctcagcctcctaaagtgctgggattacaggaatgagccaccgcgcccagcctgtttttttttttttgtttgtttgtttgttttttgagatggagtcttgctctgtcacccacgctggaatgcagtggtgcaatctcggtcactgcaacctccgcctcctgggttcaagcaattctcctgcctcagccttctgagtcactgggattacaggtatgtgccgccacgcctggctaatttttgtatttttagtaaagacggagtttcactatgttggccaggctggtcttgaacccctgacctcaagtgatctgcctgccttggcctcccaaagtgctgggattacagatgtgagccactgcacctggcccatggctctattttgaagtatgttcctttgattcctcgtttcttgagtgttttttttttatcaagaaagatgttggattttatcaaaagcttttttttctgcatctgttgagatgatcatgtggtttctgtttaattctgtttgtgtggtgaatcacatttattggtttgcatatgctgaaccttgtatccttggaatgaagcttacttgatcatgaactttttgatgtgctgttggatttggttcgccagtattttgttaaggatttttgtggctgtcttcatcattgagattaccttttagttttcttttttttattgtgtctttgccaggttttggtttcagggtgatgcaggattcatggaatgaattagggaagagtccctcctcaattttttagaatagtttcagtagaactggtaccagttcttctttgtatagttgatagaattcagctgtgaatacatctgatctgggctttcttggttcgtaggtgttttttttttcgagattgagtcttactctgttgtccaggctggagtgcagtggcatgatctcggctcattgcaacctctgcctcctgggttcaagcaattcttctgcctcagcctcccgagtagctaggattacaggcacctgccaccacaccaggctaatttttgtatttttagtagcaatgggttttcaccatattggccaggctggtctcaaactcctgacctcgtgatccgcccacccacctcagcttcccaaaatgctgggagttctttaggtttctattaggtccaattgatcaagtgttgaatttaagtccagaatttctttgttagttttccgtctttatgatctgtgtaatgttatcagtggggtgttgaagtcccctgactattgtgtggctaagtcttttcataggtctagaagtatctgttttattaacctgggtgagccaatgttgggtgcatatatatttaggatagttaaggcttcttgttgaattgaactccgtatcattatgtaatgctcttctttgtccttttttactattgttggtttaaagcttgttttatctgttttaggaatagtgacccctgctcttttttgtgttttgtttgtgtgacagatctttcttcaaccctttactttgaacctattggtgttgttacatgtgagatgggtctcttgaagacagcagacagatgggttttgtttttttaatccaacttgccactctgtgactttatttatttatttatttatttatttatttatttattttcagaatctcactctgtcatcaggctagagtgcagtggcatgatattggctcactgcaacctctgactcccaggttcaagtgattctcctgcctcagcctcctgagtagctgggattataggcatgtgccatcacgcctggctaatttttatatttttagtagagacagggtttcaccacattggccaggatggtctcgatctcctgaccttgtgatctgcctgctttggcctcccaaagtgctgggattacaggaatagccaccgcacccagcccactctgtgacttttaagtggtgtgtttacattcaaggttactattgacatgtgagcttttcaccctatcatgaaattgttagctggtttttttgtactttctattgtatggttgttttatagggtctgtgagctgtgtacttaagtgtgtttttatgatagcaggtatcattctttcatttccatgtttagaactcccttaggcatctcttgtaagactggtctagtggtaatgaactctcttggcatttgcttctctagaaaaatgtttttatgctccctctccctctccctctctttccacggtctccctctccctctccctctctttccacggtctccctctcatgccgagccgaagctggactgtgctgctgccatctcggctcactgcaacctccctgcctgattctcctgcctcagcctgccgagtgcctgcgattgcaggcgcgcgccgccacgcctgacgggttttcgtatttttttggtggagacggggtttcgctgtgttggccgggctggtctccagctcctaaccacgagtgatccgccagccttggcctcccgaggtgccgggattgcagatggagtctcgttaactcagtgctcaatggtgcccaggctggagtgcagtggcgtgatctcggctacaacctccacctcccagccgcctgccttggccccccaaagtgccgagattgcagcctctgcccggccgctaccccgtctgggaagtgaggtgcgtctctgcctggccacccattgtctgggatgtgaggagcccctctgcctggctgcccagtctggaaagtgaggagcgtctctgcccggccgccatcccatctaggaagtgaggagcgcctcttcccggccgccatcccatctaggaagtgaggagcgtctctgcccggccgcccatcgtctgagatgtggggagcgcctctgccccgctgccccgtctgagaagtgaggagaccctccgcccggcagccaccccatctgagaagtgaggagcccctccgcccggctgccaccccgtctgggaagtgaggagcgtctccgcccggcagccaccccgtccggaagggaggtgggggggtcagccccccgccaggcgagacgccccgtccgggagggaggtgggggggtcagccccccgcccggccagccgccccgtccgggagggaggtaggggggggtcagccccctgcccggccagccgccccgtccgggaggtgaggggcgcctctgcccggccacccctactggaaagtgaggagcccctctgcccggccaccaccccgtctgggaggtgtacccaacagctcattgagaacgggccatgatgacagtggcggttttgtggaatagaaaagggggaaaggtggggaaaagattgagaaatcggatggttgctgtgtctgtgtagaaagaagtagacatgggagacttttcattttgttctgtactaagaaaaattcttctgcctttggatcctgttgatctgtgaccttacccccaaccctgtgctctctgaaacatgtgctgtgtccactcagggttaaatggattaagggcggtgcaagatgtgctttgttaaacagatgcttgaaggcagcatactcgttaagagtcatcaccattccctaatctcaagtacccagggacacacacactctgcctaggaaaaccagagacctttgttcacttgtttatctgctgaccttccctccactattgtcctatgaccctgccaaatccccctctgcgagaaacacccaagaatgatcaataaaaaaaaataaataaaaaataaatttaaaaaaaaaaaaaagaaaaatgtttttatttctccttcactcatgaagcttagtttggcaggatatgaatctgttgattataatttattttctttaacaattctgaaaatagatccctcaatctctcctggcttctaaggtttctgctgagaagtctgctgttatcctgatggggctacctttgtatgtgatctggcctttttctccagtgcctttagggctttttctttgacagtgaccttggacagtctggtgagtatatgccttggtaatgttcattttttatagtatctcacaggtgctgtctggctttattgtacttagatgtctatctagcaagattcaataaattttcttgaattattccatcaaatatgttttccaggctgttttctttttctgtttctctctagggcatgccagtaattcgtaggtttgatcactttacataatctcatatttctgactttcttcacttttaaaaaatcttttttctttatctttgtctgactggattagttcaaaagaccagtcttcaagctctgaaattatgttttctactttgtccagtctattgataaagctttcagttgtattttgaagttccttaagtgagtttttttaattctagaagttctgattgatttcttattaagatgtttatctcttccttcatttcctggattgatgtagaagtttctttttgttgatttcaaccttgaatctcattgagcttccttgcaacccaagctttgaaatgtttattgtcatctctgagttttcattttggcacgaagcattgccagagagctagtgtgatcctttggtagtgtcactacattcagatttctcatggtgccagaattcttgcgtgggtccctctcatctggagatgctagcacttctaatttgtgtaattatttttgattgggtaggattttttctttttctttccttttctataatattattgttattttttttcttctttccctttccctcctctctagggggtgtggctgtagagcatgctgggtagggtcttttggctttgcttctgcagccctatgcacttctgctagcaggttttatattgggtgtgtggtttgacctacaagccagtagatggcgccatgggtaagagctggctgttgccagtgcygctggctgtgtacttgatccttgtttattgggaggagctctctgctgccccaggaatgggctgatttcctgagtacacattaatctgagctccctcagccctaggggtagggggattgggggcacaagatgggtggagccagatagggaagattcccccagtgttgtcctgctcccagtccaggtttgggacaatgccggcagcgtttccctgtgtctttcccccacaaagtctccaagtctttcctcaaatgatcgtcaaggtttgggagaaacaatctcttcctctgcccgggttgcgtggatctccagtggaaaggtgagacagagggatgctgtctgcctctctcacatactgaggcttcactcacttttatcagtcaaatgctgtcctgagggctgcttgcctgcaatgtcctccccaggatctgggatgtccttcatcattctggggaattgccattttctttcttgaattaaagctcacagagttggtctttatgtacttgcttgctatttccaaatgactgaggcatgctaaaagcctgtaatctgccatcttggaaaaaaatccttgcatccttaagagaaatggcacttggtgttgatacatggtgtttctacgttgctgaattcactttgaaaatatatgtatattttaaaatctacatttatatgtgagactggtgtaaaaatatcctactgtatttgtgcaattttggaatcagttatattaatgtactcaatgagttgggaatttttcttttttactattatccaaaaaaattataaaagacataattgttgctttcttacagatttagtaaaaacctcatcgtgtccttttrtggagagatggtgagagatatttttactgtaaatgtaatttgcgtatttttcacctgtgaggcagaggttgcaatgagccaagattgtgccactgcactccagcctgcgtgacacaagaccctgtctcaaaaaaaagaaaaatcaacttaaaatgcactccttgaatatttctgagtgtatttttataccacgtatgttccttgaaatacttttcttttctaggaagaaccggaactatggtttgtgcctgccttattgcctccaaaatatttttaactgcagaggtatgaaagatgttctacaaaatttgtcttatgatgattgagtttgctagttctgaaacatcrctggtaggacgttaagatgattatttgattcatggtgcttagtaaaactgtaattagagaagcagtttttagaaagtctgtttttgatactttcttgtttaatgtgcactagttagtagctgactgcagaatctctttgggccaggactagagtgaggtcaatgaggtgcaacatttaagggaatgctaaaaattgtaataattaaaataaataattttaacgcaatattttaataaaaattaatgcaaaatatctatgctgtatacaatatcaacattttaaataaagacaagacctgatggggcaggattaaggtgaggggagtaaagccatgttacacagaaaaaaaattcagtaatcaagatacttccctcacttcacctggccctgttcttactcctgccagtaccatgacttcttccttcctcgtgagaatagtatcaagcttaattagataaattctccaaagagccttgcccatcctcacaactcttaggtagataaaaagcaacatttcacaactcaaaacaaagcctctcctgaatgtaaatatctttgcttagtcaatacatgtggagtctgtgacctctagaaatttctgataagacaaggtgggctgtttccacttaaagcagagttctcaatyatttttctttctgccattttcttgctgagatgctaccatttccagcagctctgctcgagttgtttggcctgcagtctagggaagaggtggtggttgtgcacaatgcccagcactcccattccaccacctttgctttctctaatttgagatacaaagattttgaaaatgggtgttctaggatggtgtttttcaagctatggatcatgatttatcagtgagttgtaaaataaagttactgggttgtaactgacatcttttaaaaataaaatggaatagagcagaatagaaaatatcaaaaggtttaaatattggggggtgtgtgtgtgtgtgtgtgtgtgtgtgtgtgtrtgtgtgtgtgtgtgtctcctaggtttattaatgtggattgcagcttaaaaaacaaaaggtttgaaagtcattgacagccattgatccggagccctagactgrgatccagggacctgtattccagacctgtgctgcttctaactggctgcagcatctccttggcaggttgcttggttttcttttggtttcagtgttgtcatttgtaatatggaaagaagggttggaccagatgctttctaaggtctttccagctctaaaattttatgaatgtatgaatycttgaatgagagaagtcctaattttgttattttcggtagcttctgcccaaagatcactcggccgggcacgggtggctcacgcctgtaatcccagcactttgggaggctgaggcaggtggatctcttgacgtcaggagtttgagagcagcctggccaacatggtgaaacccctatctctactaaaaatacaaaaaattagctgggcatggtggtacacacctgtagtctcagctactcagaaggctgaggcagtagaatcacttgaacccaggaggcagaggttgcagtgagcttagatcctgccactgtactccagtctgggttacagagcaagactctaccaaaaaacaaacaaacaaacaaacaaaatcactgactttaggaaagaaggtaggcgtagaaaccctaagggtacctaatataggaaaggaaagagtgcagatgaaccatggttggattgtacccttttttgcaggaaagcctgtattattttggagaaaggcaaacagataaaacccacagcagtaaatttcagggactagaaactccttctcaggtaagttttctttttaaaaatgggagttttttttttaggggagtgggttaagattgccacctgttatttggtttcactttagactcttctcctttggtgatcaggcagcagcagttgggtgccctgcaacaggccttggtccctccctgagtctgagggtcacgctttaggtgctgcccacatgctggggactctggcttctcctcagagaatcctgctttctattctatactggttattgtttatggagctcaggagttgattattttcccaaagtaggaaggtccagtacccaaggctccaggaccctgaagtgtatctaaaatcaccagcctttgatttcaatgtaaaaaagatccaagtctttcacaaacccttactagggcaattcaacccttgcagaacattacaaagactgtttttggatgactcctggtgtgtgtgtgtgtgtgtgtgtgtgtgtgtgtgtgtgtgtcttttctgtgtgttgtgggggaggtgtattttaaaagagaaaataaaaggagaaataaacttttcaaaaccccttctgtatcccagacagtattgcacttttacatatmtcatttaatacccataacacctatatgaaatatacactgttactctgtttttycttttagaaacattttgttatagagaattttaatcatayacaaaagtccagagaatcatacaatatatccacatatagtcgtcacattgctgcaacagtcatttcagccggcagccagccacatttcatccgttctttcccactccactcacacccctcaaccccactctccactcttgctttccctaaatctgagttattttaaaggaaatttcagtcatcagatcattttatcccacagcattttatgacatttaagtactcttaaaacaacaacaaaaaaccttaacactttttatcatatctaaaaatattataccttaaaaatccttcatatcaaatttgtactccatgtttgtttccaaaattgtcttaaaatctttgaaaatttagtttgtttaatcagaattcaaacaaagtccacacatttcatttggttgctgtgtctcctaagtctcttttaagaatctgagtttatagatttctcaccattttttattacttgtaatttgtttattgcagaaaccaggatgtttatcctatagcatttacaacattctagactttgctgaactattctaagagttctatattcactatctcatttaatattctcagtaactctatgagtaggcactactatgattctcatcttataaattagaaaattgaggttcatagaaagtaacttttgaaccaaggactgaaatctagatgtcagtctctgaagccctttttgtgcacagcttctcatttatattgccttttctatattgcccctgaaactgaagtgagagtgggttgggaattccgaaatggatttggatgtggctgtaaatgagtttttctttaagtggtgggagctgagtaagtactcttggccccgttagaagaacactctaactactggccctaaacctttagtttgggccagaagaactcagccttatccactgatacttttctcccacacccaagcccaaaacaaaacaaaacaaaacaaagatattcatagaccctaagctaaaagtgrtaagtgaatttactgaagtgcagccctaatcatgccatttccatgctcaaaatccatactatgtccccactgccaatggcaataaactaaacgtttcaacctggcactcaagagccacagtttgacttttccaaccttctcttccactatgtgcatgcacacatcccatactccaacacatttagactgtgtgctctttcccagcctatggacacttgataccctcatgccgttgctcatgccccttttcctagagtccctttcccttctcagcctgaagtagtctcttgctttttcaattcttagagccctttgtgtttcttttagggactacgtcactttgcatcattctctagttatttgaagtggtgacttctgtatcccctttaaaggcaaagcccatggcttacccatctttccacccttttctcataatatcttgttgtttgtagtgagtgcctcctatgtgttggttgtattaatttctactacaagtccatgttgttttaagttgtaggagaaggaagcgtgggagcacaagcagcttgagggccctggtggtttacagcccttagggaaaggtggagaatctagtggcagaagctaaggggatgctaggtggagctccttcaacaactctcccccacacatctcctcatccccatttcttctgcagtcgtgcatagtttccctaactttagtccagaactagcacaccaaagctgcaactgaatctcttctgattcactaaaaaagcaacaaagggattcagctgcacgtttgagagctgtgttggcaagacctcaggacagagtgccctctgtgtctggtggtgattctcagacaccatcacattctgatcctgcattgtgggccattctactgactacatctactcctaagtggaggactttcatgagcctatctcatgactggccctttctaaagggaagtatggcagttagttactttaatgagcatttcccaatgggtaaggaacagtctgtgaacctatgagttttgttttgttttgttttgttttgtttttaatttttgagacagagtctcgctctgtcgcccagactagaatgcagtggtgcaatctcagctcactgcaacctcgacctcttgggttcaagtgattctcctgcctcagcctcccaagtggctgggattataggtgcccatcaccacgcatggcctatttttgtayttttagtagagacaaggtttcaccctgttggcraggctggtctcaaactcctgacgccaggtgatctgcccacctcggcctcccraagtgctgggattacaggcgggagccaccatgatggccaacttttgaattctgaaccagttgattgagtaccagagctcttcaataccttgaagaaagattcaggggagarccgttgtgaacagcttgccccagggaaaggacaaggctgagagaattccagggcttccttgagaaaacagaattgaggaaatgcaaagtgaagaattctagcatcaggaacaagagaagaatgatggraaacctgctactgaggtatggaggtattcctctggagttttcacttataccattctctcatgcccaggaagctgctcttcaccaaaccacaagccttcctctaactcagtcacaactaagcttctatcyggacactgatgatgctgtaactgttttgttgtgcttctgattagttgccctctcaaccataagcagcctataaacagggcctggctccatccttgttacttccccattgcactgaattcagtatttttccctcaaggtagatagttgtggggcagcatccctaaaaatgtccagttatataatggcatccagtaaatgttttcttaattacttacctccattaacaagctttatgcaaaaaaaaaaaaaaaaggaatgctgactttagacttcatctccacttaaaggaagatttctgttgcttttcacaatagatatgttggatattttgcacaagtgaaacatctgtacaactggaatctccctccaagacggatactctttataaaaagattcattatttattcaattcgtggttaagtgctttatgtgtaattgaagaattgggcaggagggccaatgtccccactctgggagagttttgctcatagttatatatacagatgagcctaactcatacctgtctttttacatattgtcacacaggaactcctccttatttatgccgctcctcctgcaattgcccattgattgccagcccttagatgttcttcactttttcttttccatcaccaacttgggggacttcatccccttcccatctctcctgttctcattgctcctccggtctcaacccaggtggacttttccgggcagagggagcctctgatgagggaggaggaggacccatgtgccctcaagcctgcttatttctcagaaccacctctagttcagagtttgccttggtggaggtgtctccgtatcgtatcattttctcaccttcttttagaggcatatttttttctcatcaccctgggctctccctttcccctctctcctccatctgtaaccctctcactcccagcttacactcaggggaggcgggaaagcaggatgtgtctgtgtggaaggaatggggmctcaccactcccactgccagagaggtagcagggaggtgatgcttyggaacccctaaagcaaacctcttctagcagccagcttgtggacctgagatggtgccagtgctgggtgctataggtgccatggggccaggatgctggtgtccacacagacagcctagtatttttagccttctgagtttagttctacatttcactgatttctggtagacatcaatagaaagaagttctgcacctggaatgggaaaragggaactgaggcaagaaactgtgatttctaatgacaaatgaatatcatggtgttagtgaaaacaaaactaaatgaaaagaaaacaaacagcatatgagatgagcaatcaaagataattaatacactagtttattaaaatatttgtttwaattttctacctttagytttgtacatatttgaattaaaattaatgtagagttgagaggaaagcaataaaacaattaattggctgagaaaccaagtctttgaggaaatgctgagggaagtgggtcatttgaatygaaaaaaaggaacaaaagagcctttgtctataaatatatactgaacaccacgggaatttttggataaaactatcctatatttttatagagattgcatcaggaactggccttaaagtagggccaaagtagttaaactmcagtatttattattaagaatcattatgattagaagtctgaagaaagcaacatattagcaagaaaggttgcaagtcaccttcccagaattgtctttttctttctttttttttttttttttttttggagacagagtcttgttctgtcacccaggctggagtgcagtagtgtgatctcggctcactgcaacttccacctcccgggttcaagcaattctcctgtctcagcctcctgagtagctaggattacaagcatgtgccaccacgtctggctgatttttgtatttttagtagagatgtggtttcaccatcttggccaggctggtttagrattcctgacctcaagtaatcctccacccacctcagcctcccaaagtgctaggcgtgagccaccatgcccggcctaccttccctaaatattttttctggaaagataaagtgatgggattctaagtctttgaagcsgaactatatatatatattttttctcttctctagtcttataaaatctgctttaagagacagaactaggcttgaagccttgtctttcaaagacaaaatccatgcaagaccaaataagtaactattgatacattgttagcttggataattttttctctttttaatccatgatgttaattggtgagacatattgatgttcacgctaaccaacctaactttttaatttcatttaggtgttggaacaggcgatgtatgtgatctaaaattccaaatagtaatggagaaaaaggttgtcttttccagtacttcattaggaaattgttcagtaagagaaaacatgtgaactgaaaaactctgatgttckttttaaggttgaatgtcaaaccagcaatgttcacctccctaaactatcactcacctaaagagattccataacgctttctggttaccatccaacttggtgtcactgggtttggatgcaaaccagagataaattaacctgtttgttcaaaacagtttcttcagggtgctttccagaatttatttctggtcagtgttgctttgcctttcacacttccacaaacactgagcatgttcccaggaatgtattaaggattttaatttacatatctggtcatttttaaacatattctcttcttctcagtcatttgatcttttattatataacactgattctaaaagtttagtgtgcatgaaaaccactgaggagcttgtaaagatttacattcctaggttgtacccccaaagtatgattcgggaaatctggattggggcccaggaatctatagacttagcaatgtcccaagtgattctaagtcagacgttctgtgggatgaccctgtgagaaacaatgcaagggtgaatgaactggggaggaacctctttatccaaagcaaaagggacctggtagtcaatgttttgctacaatgaagaaatgcctaaaactatataccttttctgaaacrgtaagaaagcatccttcatggtctaataaycataaacttttagaattcctacccaggcctttgtctcaaattctcctattactaaccctattccctgccaccccctccccactctgcccccggcttttttggcctctcccaactgaggacattcacccaggcctgacccttggctttctgttcttagcaaatgctttattcttaaaggatgacccattccccttacttcaaccattatttgttcatttactgaacagctatttatgagcacccactgagttttagatgcaggagctacaacatgaacagtttccactccaactcaaatgcattcgccagtctgaattatcaaggagctttctctctgcttctgcaaatggcaccagcattcttccactcacgccttgggctctgattctctttgcctcggccccctaaatccagttagtcatccatctctgttgattatgcctttgacagttttctacgttctccttcctttctgttctcactgccactaattgtccagaatctcctttgctcagcgtagatttctgcagtggtctccttaccctttctttctccttctataatgcaatgtatagaatcctgaaatatgcatcctgaaatattcmtctcattgtgaaaaattgtagstagagcagaagacacactgtgtgcccrtggtcagagccagttaacacctttggctcaacatctttatctgtaaaataaatatcacatccaagtgtaatgggaattcaattagataatatatataaagtttctttgtgaactataaatcactaaataartgttatatgtgataattatcaggcctctttttcacataggaaatgccccaccatatttttcaacaacttctttcttatttctttggctcgagctctgaagatataatagccctaaygtaatacctgagcttttttccatcagtagcttgaccagcagacttcattccaaataaactgggtcatcccttttggctcttggaacacaactctaatttagttatttggttataactaaccaaataacttatttctttctttccttcctttcttcctttactttttttttttytttcttgagccagggtcttattctgtcacccaggctgtagcgcagtggcakgatcatggctcactgtagcctcaacctcttgagctcaagcaatcccccaatttttttttatgttttgaagaggctgggacttgctatgttgcccaggctggtctcagactcctgggctcaagcaacctgtccacctcagcctcgcaatgtgctgggattataaacatgagccacactgcctgatattgtttgttgttgtttttccaattttttttcttttctttttgttttttgagacagagttttgctcttgttgcccaggctggagtgcattggcacaatctcggctcaccacaacctctgcctcctgggtgcaagcgattctcctgcctcagcctcccaagtagctgggattacaggcatrcactaccacgcctrgctarttttgtatttttagtggagatggggtttctccgtgttggtcaggcttgtgggcaaaagaaagagagatcagactgttactgtttctacatagaaagaagtagacataagagactccattttgttctgtactaagaaaaattcttctgccttgagatgctgtgctggcagaaacatgtgctgtgttgactcaaggtttaatggatttagggctatgcaggatgtgctttgttaaacaaatgcttgaaggcagcatacttgttaaaagtcatcaccactccctaatctcaagtacccagggacacaaaacactgaggaaggctgcaggaacctctgcctaggaaagccaggtattgtccaaggtttctccccaggtgatagtctgaaatatggcttcctgggaagggaaagatctgaycgtcctgcagcccgacacccataaatggtctgtgctgaggaggattagtgaaagaggaaggcctctttgcagttgagataagaggaaggcatctgtctcctgctcctccctgggcaatggaatgtctcagtgtaaaacccgatcrtatattccatctactgagataggagaaaacygccttagggctggaggtgagacatgctggtggcaatactgctctttaatgcaccaagatgtttgtgtatgtgcacatcaaagcacaacacctttttcttaaccttgtttatgatacagagacatttgttcacatgttttcctgctgaccctctccccactattaccctattgtcctgccacatccccctctctgagatggtagagataatgatcaataaatactgagggaactcagaaactggtgccagcgtgagtcctccctttgctgagcgctggtcccctgggcccacttttctttctctatactttgtctctatgtctctttcttttctcagtctctcatcccacccaagragaaacacccacaggtgtggaggggcaggccaccccttcaaggctggtctcaaactcccgacctcaggtgatctgcccacctcagcctcacaaagtgctaggattacaggcatgagccaccattcctggcccatttttctaatttctactttgcattattgctggtctttttccctccgtttggactagagtctattttcagagctcttcttcgtttatctaaactgcttcatgcccaattcaatttctacctccttaatgaaatttttgcattctgtaccttctgttaactagcccctaatagtgcataacagcacacccagtctttatcatacagattaagttatgtaccattctactattgtttcttatgtgtacagctcccaaaaggggccaactgagtctgcacctccttttgtgttttccacagggcctagcatagacctttcttactgtgggtgcctttatttatatgagagtgagtcaaagaaatagtatcktgagctatctttggtyactccatccagcagcctgcattggtcaagttcaaagatcccattgacaaacacaagagttctgataaaacatgatgagcagggggaccccaccctccctctcccttgggaggggcatgcrggcccaacccccaagtgttacagacccccgttgttatttttaaatttagaaaataaaaaaccatgatgagttacgcattgctttttgaatgtcaatgctagctttaaaattgagcttcttaatatattctcaaaaaaggccctaacacatgaaaatcaaatgacacacattaaatgataatatttaattgattaaagtctaatagaaaattcaatacttttgaaaagtgcctcatgaccaggcacagtggctcatgcctgtaatcccagcactttgggaggccgaggcaggtggatcacgaggtcaagagatcgagaccatcctggccaacatggtgaaaccctgtctctactaaaaatacaaaaattagttgggtgtggtggcacatgcctgtagtcccagctacttgggaggcggaggctggagaatcaattgaacccaggaggcggaagttgtagtgagccgagatcatgccactgcactccagcctggtgacagagtgagactctgtctcaaaaaaaaaaaaaaaaaaagaaaagtggttcatgataacactcaaacatgttggcctttaaaagacataaacaacaggccgggtgcagtggctcatgcctgtaatccagcactttgggaggcccaggcaggcagatcacttgaagccaggagtttgagaccagcctggctaatatagtgaaaccccatctctactaaaaattcaaaaattagctgggtatgatggcatgtgcctatagtcccagctactcgggaggctgaggcacaagaatcacttgaacctgggagacagaggttgccgtgagccgagatcacgccactgcactccagcctgggtgacagtgagactactgtctcaaaaaacaaaaaacaaacgaaaacacacacacacacacacacacaatagtattgcaactagaaaagattattaataattatttatgcatgtagtgattgggctgtgagaccaaaagtacttgataaatataggaagtcatgataagtgaaaaggaccttttgttatcgttatctaggtttgtagttctcaattccatgtgttcattcacagatactgcatgacattgaaacagccggtgtattaactaatgtatatgacagtccacctctgtatgatgatgtgaaagtgcaatttttctcttcagtgagtaatcacaaaatagcctctgccattgttcttgtctggtctaatgattttatttaagatttgctttactacaattccaaacaagggagggggagggggaagaaaacaataaattagatctataacaaattttttkaaagaamatatgtaatttgaataatttttgttcatttgtttttttctaaattgtaaattttctaaatttttctaaatttacatgtattctcaaatacaaaaaatacaaaataaacacaaaaaaartaaaagccaagatgctaaaaaaaaaaaaacccaaaggtaygttttactgcatagcaatgattacattttgttttgcatcttttttaaaaaattaagaagttgagacagggtctcactctgtcacccaggctggagtgcagtggcatgatcatagctaactgtagcttcaacctcctgggctcaagcaatcctcccacctcagcctccttagtagctgggagcactgactggaaagagagttaggtttgggcgactcagttgggtgaaacacagagaaggcagcacaatacaacacaagaaataaccaaagcagttttttattaattccagagagaagagggcagcacacttcgcaggggcaactggaagagggagccatccaggagacctgtgcttgactgatgggtgggagcaatagcgagagasagggagggacctgagagtggaagcctttattgggatgtaaggtgcgacctgagtaggtttcctgcagggaggtctaatttggtttaacgcaagcagccatgagtctctgctgtggctgagaggtggtcactaatatatccacgtggtccctgcagagtatgggggtctgttgggtgagtcaagtaggttatatctagctgtcccataatgaaggggtcaccaggagaagattgtataaggcagatatcaggatcagtcacatggagaaactgggaggaggtgaactggaaactgctgagggtgactgaaccccgcttctgatatcagaaaagtcctgacatcagaaagtccagtttatatttaaaagggatgctgaggcaacaaaaaaattataagaattcactacaatctagttgggtatatataggcataggtccttagtagagtctgtttggcactatctaaaccagattcaaatagcagcatttaaattaaatacctatcatggaaaaaatactattccttgaaaattttgatagaaacagtaagagaatgcaatagcattttcttaaagcttcctcctttgtgtcttgagtgtattgttatagattgcagagtgctacatatttaatggttataattgtttgataaatataaaaaggaataaaggaaggaactttaatttctttggaatgattagttcttggtatcagttttactttgaaattttttttagaaccttcctaagtactgtgacaattgttcatttttcttctggttcaacacatcttttattcaaaataacaggtatgaatataatataaacccatagaaacagcctaatcttcaatgtctatatacaaggcataatggcaagtcttttgctggttgtcataaacttaatttatagaaagcaaaaaatccttgagccaccattgttcattgccttactcctcttactctggttattttaaaaatacctttgttcttgagacccactgttgcagtatcctcaaggtccatgccatagaactgtgttatgagttcaaaagtattacaatcagatcttaagtgtggtagtaaattcctcttggagaagttcaatatgagtctgctcagcaccttcagtatgtcaggtccctgtcagtaggtgctgatttaccaatgacgaaccaccaccaaattttgtgctaaagtaaggcaggacctagggaggcttcagctagctgaaaagctgactgacacacttatatctaggagaagttacaagacacagtattaaggaatacagctaaaaaatatcattaagtaatagtctatttaaatagccattcaaatgtggctttctaataactgaattgggaaacctttctgaaaaattattaattgggtttggagattattgttccaaaaaaaccttctaccatatttggaaactcatttctcagtctagaagttctccactataagtagcatttgttttgtgatggtgaaaaattgggatttttttttkstatcaaccatactcttcaatacaaaaggacaaaatattttttaaatgatttaggtcagaattgaagaagtggctatgattatatgtggcatgaattgatagttattgttacatccagtcctaatcttttcttcaaatgtgaactggatcgaataactccttaagtccagcaaggcaacaggaaattaaacctctggtctacacacttgcaatgcaaaacatttaatggattttgatagagtgaactttggatttgacggaaatttttacaagtttttttttttttggatgcatacaaacaataagctttttcttctaacatgagcaaagtccctcaaaaagtgagacctggatrtaacttcacttgatgctgctcctcgaaagtggttcttgctaaaggatacagtctttttcctttaaaacactatgttcattttggagaagtgataagctagatcacttttattcttacttttatataaatttctaaagatttctgtaacatttacatttacatacaacttggtaaagctgtttttgttagttataagattgttgtttagccaaaaatgctaacttgtatcatttagaacactaggcataaatgggttaaccaatttatgcctagtgttccattattggaacgctcagcatgtgggagttatgtcctactgctcaaggtcatttccaaggtctgattgtaaaaattcaaaaaattgcaacttcacacataaattgaaagagatatagtattttattcctgggttttcattcatgtctatcctgactgatttctgtcacagagagaaatttagatattttattaaacttggaagtcattaatgccatataaagcaatgctaagagagtcagcatgtgttactgatgtgttgctgaagattaaagtatttttaagtctcaccaaaaaggtggaaggagccaaccgagacacaaaaaaggagctggggttctattcatggtgagtttcttttttttgtttcttccagctctaacgtgggtacccaactgcgtggcttttcggtgagccccaatataaaatgtaataattttttttctattcttaggctttatctaccaagaaatgaattggataatccacataaacaaaaagcttggaaaatttatccaccagaatttgccgtggagatactttttggtaagaaatgacttccagtgatgttgtagctggatccgattaagtacagctcccccttccccttctgggaaagaattatgttctttccaaccttgccacatattcatatatcctaaatcttccttgatgatatatttatatatgtttatatatgttcttcataagtctactaaatatatatagataaaatgtcagtgttttttttttcttttttgaaggcacatacttcacaatttccatcttgtatttacataaatttggaacacagtatgcaggaacatcagacatcattttgaagaactttgaaatagaactttcatagcaaaaacttgagatatttaaaaattgtaattccccaacccccacttacttacatatttttggtcaagtatttattccctgctttggttcacatttgtaatttcagatttattagaaagctaatttatattttttcttccacttcatttacaaactgtctgttaacagactggcaacaaagactaagttttaaatccagaagagagaagtgtttcacacaagcagtcccccaactcccaacacacagtctctcattctgagcactaactaggtagcttacttgacaagcttcctttaatcacacacagacatgggggttggggtaagaagattgtggtaaatatgaaggataagtaatctttggtaacttctgcttttgtttaaaattgtaagtgaagtcaaaagaaatatttgttcttagagtaatctaggtgtattattttgaaattcactactcctgctcacaattcacctaagcttgggaggactctgaagggaggttatcttttcattataaacactggttagccttatgtctacaggaaatcattattatttcctctttggtgctgggtgctactttttttttaacaaattttttatttgtattttttatttcttgagacagcatctcactctggttgtcaagactggagtgcagtggtgtgatcttggttcactgcagcctcaacctcccaggctcagttgattctcccacctcagcctcccgagtagctgggactataggcgcatgccagcacacccggctaattttttgtatttttagtagagacaaggttttgccgttgttgcccaggctgagctcaaattcctgaactcaagcaatctgcctgcctcagtctcccaaagtgctggtattaaggcatgagccaccacgcccagtccgtgggtgttactttattcaaaatacctttattgccactgtatcttcaggccatgattgtccttgaaaacattctatcttggccttattgaaattattcttatttgaatgattttccttttattgtcaaggccctcaacaatctagaccaagatgagttcatcaggaaacgaaaggtagcaactaataagacaagtgtcactgctaaaacacggtatactcattcctgaaaaacctggcactctacagaaaggactaaaaaaagaagcggtccatgaaaatacagtttgagagtccagggcaatcctgtccggcatagcaactttctaaccaacacactaaccgctcgggccacccacatcagcagctcgatgtcgggagtttgccatagagctttttaatttttgagtggaaatagaaaaatacttgctctaagggctgtgggtaccagaatggcacagatgagagtagagccctgagccatggtgggcacggaaggcagcaacctgccaggagccaagagccccactaggctggtgagccacctcgctgcaggtgattttttctcctctaaatattccaaaaacgttccgactgcccatgcagcagcccagctaaggcctttctcctttactccccctgacctggctcccgctttgaggaaaagatcatagatcgtgctttcaaattcctttcatgttaatattacgccctgccattcatatgacagaaatgtgtaggcacaacataggttacactgtttcctttaaaattcacacagcaataatctacagagggcagattatgtcctggctttaggtgaatagggaggaaaatacttagctggcttagtgaagattaagatctgtctttttcagtactagaaatacaggaaggaaggaaacccccttttttattttaagaatgtccctttttgaaataaggagattaccatgaaggtttctcttccccagacctccaagacccaccaaaatttctggaaattatgagttgtcacactattctgctttcgcttattcaaagaaaactcatttacggcctctttgggtgttgctttcttagaatgcaaaatgaatgattctttgaataactcaagaaacttagatcagagtgatactcatgtcttaaaattttagctttaattttaaatatagggggtatgtgtgcaagtttgttacatcagtatattgcaccccggtagtgagcatagtacccaataggtagtttttcaacctgcacccctctccctccatccccctctagtagtccacagttgtctattgttcccatccttatgtccaagggtacctgttttttagctctcataagtgagaatatgtggtatttggttttctgttcctgcattaatttgcttaggataatgacctccagctccatctatgttgctgcaaaagacatgatttcattcatttttatggctgtgtagaattccatcgtgtatatgtaccacattttctttatccaatccaccactgatgggcacctaggttgattccatatctttactattgtgaatagcacagcaatgaacatatcagtgtgtgtgtcttttggtagaatggtcttttttccattgggtatatatccaataatggggttgctgggtcagatggtagctcgttttaagttctttgagaaatctccagactgctttccacagtgactgaactaatttacactcccaccaacgatgtataaacgttcccttttctctgcagccttgccagcatctgttgtttttgactttttattaatagccattctgactagtgtgagagggtatctcattatggttttgatttgcacttctctgacaattcgtgaagtgaagcatttttccagatgctcattggtcacttgtatgtcttcttttgagaagtatgtgtcatgttctttccacatttttaatggggctatttggtttctgcatgtggatttgtgtaagttccttatagattctggatattagacctttgttgaatgcatagtttgcaaatgtttcctcctgttctgtgggttatctgtttgctctgtcgatcatttctcttgctgtgccaaagcactttagctttattaggtcccacttgtcaatctttgttgttattgcaattgcttttggggacttagttaaaaattctttcccaaggccaatgtcaagaagggtatttctgaggttttcttctaggatttttatcacttgaggtcttacatttaaatctttaatctatctccagttaattattgtatatgatgaaaggtatgagtcgagtatcattattctgcatattgctaaccagtaccgcaacaccatttattgaatagggagtccttcccctattgcttgtttttgtcagccttgcaatatcagatgactgtaagtgtaaggctttattctgggttttctattctgttccatgggcctatatgtctgcttttgtgccagtaccatgctgttttggatactatagccttatagtttgaagcctctggctttgcccttttgcttagatttgcttaggctattgaggccctcttttggtttcatatgaattttagaatacttttttctaattctgtgaagaatgacattggtagtttgatagaaatagcactgaatctgtcaattgttttgggcagtatggtcatttgaatgatactgattcttccaatccatgagcatggaatgcttttccatttaattgtgttatctctgatttccttctgcagtgttttgtagttcttgtagggatctttcacatcctttgttagctgtattcctagttatttcattttctttgtcgctaccataaatgggattctgttcttgatttaactctcagcctggacattattggtgtatagaaatgatgttgatttttatacattggtttcttatcctgaaactttgctaaagttgtttatcagttctagtagccttttggcagagtctttggttttctgggtatagaatcatatcatcagcaaagagaggtagtttgactccttcttttcctatttggatgcctattcttcctttctcctgtctgagttctctaggtaggacttccagtgctatgttgaataggagtggtgagagtgggcatcattgtcttcctccatttctcatgggaattgtttccaacttttgcccattcagtaggttggtggctgtgaatttgtcatagatggctcttattattttgaggtatgttcccttgatgcctagtctgttgaggtttttaatgtgaagggatgttggattttatcaaaatctgtttctgcatctattgagatgatgatatggtttttgcttttagttctgtttatgtggtgaatcacatttattgatttgcatatgttgaaccagccttgcatccctggactgaagccttcttgattgtggtgtattaacttactgatgtgctgctggattctgtttcctagtatttggttaagaatttctgtgtctatgttaatcagagtaattggcctgaagttttctttttgtgtgtttctatgccagattttggtattaggctgatgctggcttcatagactgagttagggaggagcccctcatcctcagttctttggaatagtttcaatagaactagtaccagttctttgtacatctggtagaattcagctgttgcttcatctggtccagggcttttccttgttggtagattttatattaatgatttgattttggaactcggtatttgtctatttaaggtttcaatctctttctaattcaatcttgggagattatatgtttccaagaatttatccatttcctctagattatctaatttgtgtgcctagagttgtttgtagtattctctgaggatcttttgtatttctgtgggattgtttgtaatgtcatctttgtcatttatgattgtacttatttgcttcttctctttttttctttgttcagctgtcagtctatccatcttgtttattttttgaaaaactaattattggtttcattgatcttttgtgtggatttttgcatctagtctaaaaaaaaacagcacttcaaaaagcacttcattcagtgcttctttaattttagttatttctcttctgccagctttggagttagtttattcttttttctagttctcttaagtgcaaagtaggaatgttaatttgagatatttctaacttcttgatgaaggcatttagtgctataaactttcctcttaacactgctttagcttcatcccagagattctggtatgttgtgtccccattttcattaattgcaaagaatttttttatttctgccttaatttagattttcacccaggagttattcaggagcaaattatgtaatttccatgtacttatgtagttttgagagatcttcttgatactgatttctatttttgtctcactgtggtcagagtgtgtgcttggtatgatttcaaactttttgaatttattgaggtttgctttctggccaatcacgtggttgatcttagaatatgttctctgtgcacatgagaatgtatcttctgtgtttgttggacaaagtgttctgtagatgtctatcaggtccaattggtcaactgtcaagtgcaagtacggagtttgttagttttctgcctcaatgatctgtctattgctgtcagtgggttgttgaagtctcctgctgttattgtgcgtctaaatctttttgtaggccaagaaaaacttgttttatgaatttgggtgctccagtgttgggtgtgt

SEQ ID NO: 96411 - DNA, 68085 bp, Homo sapiens
agagaattaccatatgatccagcagttctactcctagatatatacccaaaagaactgaaaacctagactcacacaaaaaaatgtgtacacaaatgtgtacagtagccaaaaagtggaaacaactcaaatgtgtatcactatgaatggataaacaaaacaaaacatagtagatccatacaatggaatattatttgggcataaaaagaaatgaagtactgcctgtaatcccagcactttgggaggtcaaggtgggaggattgcttgagtccaggggttcaagaccagcctgggcaacatggcaaaaccccgtctctacaaagaatacaaaaattagccgggcgtgttagcatgtgcacctgtagtcccagctacttgggaggctgaggtggaaagatcgcttgcacccagggggtcaaggctgtagttaagccaagatcatgccactgcactccagcctgggtgatagagcaagaccctgtctcaaaaaaaaaaaaaaaaaaaaaggaatgaagtactaatatattccacaacatagatgaactttaaaaacactatgctaagtgaaagaagacacacaaagggccaaagtactgcattattccattggtatgaaatgttcagaataggccagtccataggacagaagtgattgccaggggctgggaggaagaggaagaaatggggagtgattaccaatgggtaagaagaatttatttttgaagtgattaaatgttctggaattagataatggtgatggttgcacaactctggatgtactaaaaataacaaatggtatacttcattacttttttttttttgagacagaatttcgatcttgttgcccaggctggagtgcagtggtgccatctcggctcactgcgacctctgcctcctaggttcaagtgattctcctgcctcagcctcctgagtagctgggattacaggtgcccaccaccacgcccagctgatttttgtatttttagtagagacagggtttcaccatgtcggccaggctggtctcaaactcctgacctcaggtgatccacccacctcagcctcccagagttctgggattacaggtgtgagctaccatgcccgacctgaatggtatactttaaatggctcaactgtatgatatgttaactatatcaccataaagctgttatcttaaaaaaaaaaaaggaatagaaaaaggcgtaacaaatatatactaaacaaaagaaagagcaacccaaatcagcaaaaataaactttttttttcttttttgagacggaatctcgctctgtcacccaggctggagtgcagtggtgcgacctcagcctcccaagtagctgggactactggcgctcgccaccatgcccggctaacttttttgtatttttagtagagacgggtttcaccatgttcgacaggatagtcttgaactcctgaccttgtgatctgcccacctcggcctcccaaagtgctgggattactggcatgagccaccgcacctggcccaaaaataaacttttaagcaaaaactttaaagagggataagagggttattacacaataattagaagcacacttcacaagaaaaatattaaaaacctgaacaaatatgcacctgacaacccagtctcaaatgatatgaagcaaaatctggcattataagaaagagattaatccataatcataatgagagattttaacacaagtctctcagaaactgactgatcaaagcaaaccaaatactagtaaagatattaaaaacttgaacaatataattagcatgcattatctactgacctaatgcgcatatatatatacgtgtgtgtatatatacgtacatatataggtacatatgtacgtacatacgtgcgtacatacgtacatatgtgcgtatatacgtacgtatgtacgtacatatatacgtatatatatacgtgtatatgtatatatgtgtgtattatatatatatatattttttttttttctgagattgagtccctctctgttgcccaggctggagtgcagtgacacgatctccactcactgcaacctctgcctcccaggttcaagcaattctcctgcctcagtctcctgagtagctgggactacaggtgcatgccaccacacccaactaatttttgtatttttaatagagactgggtttcgccatgttggccaggctggccttgaactcctgacctcaggtaattcacctgcctcagcctcccaaagtgctgggattacaggtgtgagccaccatgcccagccctaatgcatatagttagaaccttaaacccagcaattagggaacagacattttcttcaagcacacatacatcatttacaaaatctgaccgtatcaggccagagagcaggtttcaacaacctcatatagactcatgttttcagaccacaatgcaattgagtcagaaatcactaataaaaaagtagcccaatcacccccaatctctgtatggtaagaaaagttaaagaccaacgggcaaggtggctcatgcctgcaatcccaacactgtgggaggccaaggtgggtggatcacttgaggtcaggaggtcgagaccagcccagccaacagtctctactaaaaattaaaaaaaaaaaaaaaaaaaatggccgggcgcagtggctcacacctgtaatcccagcactttgggaggccgaggcaggcggatcacgaggtcaagagatcgagaccagcctggccaacatggcaaaacccagtctctattaaaaatacaaaaattagttgggtgtggtggtatgcacctatagtcccagctacaagagatcgagaccatcctgaccaacatgatgaaatctcgtctctactaaaaatacaaaaattagctgggtgtggtggtacacgcctgtagtcccagctactagggagactgaggcacaagaatcacttgaacccgggaggcggatgttgcagtgatccgagatggtaccactgcattccagcctgggtgacagagcgaaaccctttctccaaaaaaaaaaaaagtccattaagtccatgtatagaggcctgagctcctggcctcccctcaccagggggcctgcagagggttggagtctacctctctgccagggagaaatgagcggaagtacagccacctgcccttctctgaacccaggcctgctgaggccagacatggcactggggtgggtggcctgcaagaagccccaacctctcggcagctgctccggggagggcggggccttctccgtctcctctggccgctcctctcgggctctctccttgctggctgggctctcgtgcttgtcctcactctccactctatccaaggcggctggaagggcctgcagaggaaaagccaggagaactacaaggcctggggcctcaccaggaacggagggcggggaacgtgcgctgggctgggaacccagtctcctggctcccgtcgcttgctcctagcctgctccccgccgattcagagccccgaaaagggagccaggaggcctgggttccacctcgctgtacagggcctgagaaggtccccagacccaacctccaccccacacacaccacaggcccagacgccagcaagttccacacctggacttccaggggctgccttggcttctgtgccccggggtctttctcatccatgtagcccagctgggcttccattttgtctgaaagatcaagggaaagagctgagacaggtgggctcagacgggaaggagtagggcagggagtggggtggcagagaggagagatgggggcttggccttcgggaggctccactgcagccaagcacctccaggagagacaagcaggatccccggctaagtcagagaggccaggccaggcctttgactcaggagtgcttggaggaccttgaacccagtaagaccaaagtgaggggctgtcaggacggggccgcacacagccgtggctgctcatctggaggcagggaagtgaggcagatggaggcccagattgggagccacgacacccgctctggtcccagctttcgggcgggctggctggtgtgtgcctctggacagggggtgaatttcctccctgccaagccagccgccaacacactgcaaagtgctggtcacttacacagctctgagaagccccgggaggtgggcacagccgggaaagcggaggcccacagaggttaggtgacttgcccaaggttagacagagttcaggccaaagccaagaagcaaaccaagatgtgtccacctccaagggctcccttgtgcttggaggtgcagcttctcagggcctggcctcacccatcaccatgggatagctatgtccgccccaggcctgtgaggcccaaccgacggaccaagtacttaacaggtatttgcttcacccaaataaatacctagatcaccaaagtgacacgggcacaaatgacccaattaagtgtgcaaagaatctgaaaagacatttctacaagtctacaaacagccaatacgcacaccgaacaacattcagcgtccttggcatcagggaaatgccaatcagaaccacagtgagacaccacctcatgctcccaggacagctagaaccatgaaggcagagaacaattactgctgaagacgtggagaacctgggactcccgcacaatactagcaggaatgtaaaatggtacagctgctttggaaaacagtctagtagtttctcaaaagggaaaacagggttatcacacggcccagcaattccattcctagatatctgcccaaaagaactcaaaacgtatgtccacgcaaaaacataaaacacagcagcattattcacagcagccaaaaagtagaaacaatccaaaatctatcgacagcgcaatggataagcaaaatgcagtaaattcatacaagaaaacgttatcggccaggcgcggtggctcacgcctataatcccagcacgttgggaggccgaggagggtggatcacctgaggtcaggaattcaagaccagcctggccaacatggcgaaaccccgtctctactaaaaatacaaaaatcagccaggtgtggtggcgggcacctgtaatcccagctactcgggaagctgaggcaggatcgcttgaacctgggaggcggaggttgcagtgagccgagatcactccatcgcactccagcctgggcaacaagagcgaaactccatctcaaaaaaaaaaaaaggaagaaagaaagaaaaagaaaacattatcagccataaggcagaatgacagaatgactgaagcactgatgcacgctgcaatgtggatgaacctggaacccccaggctgagtgacagaagccagacagaaaggcccacgcactgtgcagtgccatatacacgaaccatccagcattgcgaaatccagaaacaggaagcaggttagtggctgcccaggcctggggtggggggataaggagtggctgctaatgggtacagggtttctttttcagggggaatgaaaatattccggccttaggcagtggcgatggttgtacaccctacgaatatactagaaatcactgaatagtacttttttttttttgagatggagtcttgctttgtccccccaggctggagtgcagtggtgtgatcttggctcactgcaacctccgcttcccaggttcaagcgattctcctgcctcagcctcccgagcagccgggattacaggcacgtgccaccatgcccggctaatcttttgtatttttagtagagacggggtttcaccatgttggccaggttggtctcaaactcctgagctcaggtgatcctgccgcctcagcctcctaaagtgctgtgattaacaggtgtgagccaccgcgcccagccagttttttaaaagagtgaattttgcagtatgtatataaattatatctcgtaactgtcattaaaatggaaaactctctgtagagtgacatttcagcaaacagaggctttgggggaaggagaggccgtcttctgtgggattgtgggttagactaggggtttctgtgaccttgccactttccatgaccccagtgccctccccggcccgcccagcccacagacctggcaggcccagcggggctggcaggaggtgggcagggctggcgggcactggtgtgttggggtccgaggagatcacctcgcccgrcttcttcccctcgggcccctcagggatcaagtctggggtgctgtacttcccgttgacatgctcaaactcctgaacctggggtggtgggagggaaggtggragggaaagagggagggcagtggtggcaactcagccctaagggcctcagggcagccaggggggctgaaagtgtcacaggcttggggtagctgctrcctccgcccaaggctggccaagccaggcccctcctgaccacaagctcccctgcccaccctcccaccctctgtgtgtcctccaactgtatgtaacccaccatcctggcctccaccccacaggcccctcacccagaaaggctttccaggtcagtccctctggagtgactcggaccctgggcagctgtgtggcctgaaccaggcacttgttctctgaccactgacccacaagggacagcaccaggagcccaggcagccaccaggaagggccctacagagagttactcacccaccttcttcctaactagtgacatgaccccgatgcgggtcagcacgtgctgcctggagaggccctcccggggcacgccgtctgcgaaggtctctgcaccatccgcccccggctcacacaggtgccgcatgaagagggacacataggctctggggtggggggggggggactggggctcagggagtggggggccggcaagaaccctctgagagggctggcaggaccccaggggaactcctggctgatcttcaaccatcgcccacctcctagtcaggcctgggccaggcccgggaaaggacagagagggcctccctggcraggggacctcctaggacagccctgggtgacsgggatcttcctcgctgccataacaccagctggtttgggcaggggcggatggtcagtgtttgcaaatcagccctgcccggcaccaggactctagccacccaaagtccaagtggcagtgaactttccagacggcctcatcctggcggaagcaaatgctgccctctgtggggctcacccgcaggaccctgccctactcaggggcaggtggtcacaccctgggccaccacctagcccctttacctaaactccttctcgctcttccctcgaaggtcccgcaccagccagtgggagttgaaggcgtcctgcgggggcatgccccagcgcatgatggcgttcagaaaggccttccgctgtcgggcattgaagcccagcacctgggcgagtggagcgtgggagtatgagcccaggacagagaggggtgggggtggaggattctgggatgggggaagaaaagcatgggaggaggagaaggtaggaagggggcacagagaaggcaggggcctccacctggggcaggaccctgacggcgaagaccagaccaagttctgtccaagctccgcctctacctggcatgagacccggggcagtcccccagccctcctccataccccargggcagcaggaagcaggggcagaaagagatgcgggaacagacaggccccacctcgatgttgccaccaactcgggcgagaagcgggggcaggggcttgtccctgtcactcttcagctgcctccgggattgtcgtcgtccacctggggagcagcccgccacagttcctcaggtgggagcccagagattcctgatccccaaggacagcgggaccccagaccagccccgctcctgctgccatcagctcccctgacatggcctcagcagtagcccagaccactaacactgagactcactctgcccttccggcctctcttcaaagtcctcatcctcatcctcagagccaatggaatattctgactggttatcagagagctcatcctgccactctgcagggggccagacagaggggcacggagtgagctgtacaagcaaagcccaccctcaagttcaagcatgcccagggccacgccgagcccctgcaccccagctccataaaaaagcagtgacaatggcccacatacttcctgtgggctcatttagtaatcccaacaccaccacgttatacactaagggtaccatgtgtacccacacattacacatactgtgtgcaagggacgtgcccaaggccacgtcacgagcagtggtgaagtcactgaactgagccacaccttgttcccccaaacacccagcacctctgcacctgcccccagtcccctttcctccaaaaagctgcctcccagctccaaccagcgccgcccagcgttcctggcccccacctcccgggggggtcctgcacagggatgccccaacagaatcctgccccaccctccacctctgggtatgggacacccatccctcctggcacactcgcccagctctcccggcccgcacctcccgggggttctgcacagggatgccctgacagaatcctgccccaccctccgcctctgggtatgggacacccatccctcctggcacactcgcccagctctcccggcccgcacctcccgggggttctgcacagggatgccytgacagaatcctgccccaccctccgcctctgggtgaggggcaccagtccctccctcccggcacgcaccctggtcctcctgggaggcatcgttgtagttgacctgcttgcggatgcgcttgcccttgcccaggttgcgggccaggtcctcctgctgctgctcatagtggtgccgcagcagcttctcccagtagtcggggtccacgttctcctcctgcttgatgatttcccgctccacctcctcctggggacgcagcaccacgggttccatgggtrgagccatctctgccctcccggaagcctcaggctgcctccacctgacctgccctttgcccyctcagggctcaaggattaatgggatggcctgcctactccaggaagycttctctgatcaccccrgccctagctagcttttctctccctgcccctatccagtcaatcatttacttattcatccatccattcacaaagcaagtatttcctcgcctcctgtcaagcactgaggtactgagttgaataagctyccccttgcctgccctcaggaggctcctggtttcaaaggaaaaggtcatgggctcaccaggtctgcacggagggtggggagcagaggaggaaacggaaaggcctccaggagagacccacaaggagctcttcggggacagctrgggtttgcccggtagagaagggagaaaagtgtggggtggaccaggcgtggtggctcattccttaaccccagaactttgggaggccgaagcaggtagatcacctgaggtcaggagttcaaaaccagcctggccaacatggcaaagtcccatctctactaaaaatacaaagatyagacaggcgtggtggtgcatgccagtaatcccagctacttgggagctgaggcacgagaatcacttaaacctgggaggcgttggttgcagtgagctgatactgcgccactgcactccagccggggcgacagagcgagactccatttcaagaaaaaaaaaaaaagaaaattgtgggscgtcctggaacgttggcggtccaggtgcagggccgagatgcaggccctgaggaaggggcgggagggtgcagctgggtagggactgaaaccagaccccggggacagggctctgtgcaacggggtggcagatcagcttgcacttcagagagtggggaagctggactggagccgggatgacgccacggagcaggcggctgatgtgtgcaagggcagtggccggcccatgtggctgtactgccctcagcgctgcctccgtcccttccctcactgttgtgtctctagtcctgagcccgcgggtggagcgacagggccgccctgcagaggccggagcacgtggttggagggcggagcacacgctggagtgcggggcacagcagggagggcggggctgcggctggagggcggggtcacagcttggagggctggctgcggcgggagggcggggtcacagtggaaggcgtggacacagtggggggcggggctgcggatggagggcggggytgcggatggagggcgggccggggaccttaccacgccgtcctcctcgcgcaccacgtactgcgccaccttgaaggagctcaggtactcgttcatgttctgtagctccgtgtcatctgtagcgtcctggttccggtccagcagcttggagatggccgcatcgtcatagtggatcacactgctgtcctccacgtccttgttgtcacctggggagcaggcaaatgcagtgtgaggacaaagactgccctggtccagccccggggtcccaggaacagactcccaacaatggcccttcccatccccarcaggggctgcagctgagaggcatggtgaccagacagaggaaactgcgctgtaacagccccactcgccgcccacctggcagtcccaggacgcccaagtgagggcaggtcagggaacccctcctctgcaggagcagccacctggtcggaggaggagctgaggctgggctgrgttggcccctacctggcggggtgctaccgtgcttcttctttgcactggcggccaagttcccccctttggaggactggacatcagggatgggtgtgaccggcctctggccctgagacatcatgcctgtcagacagagaaggaaagcactggtgcaggaccacagagggctgcagggttggcgggcagtgcccagagacaccaccctgggctgtcctagccaggagatacaggtsgggggtgcagaagagaggctgtgwgttggagcgggcagggacccaagcaagccctggatgggtgtctcagccgggccaccccagtcccctgccacgctccctcggaacagaggcccaccctccacgtcgtccttgaagagttcctccgtgccgaacttgaggatgtcgtccagctcctgcttggtcatggaccccgacttggagccgaggccgggccgcaccaccaggtgggtgagcatcatcttgcgcttggccacctgcgtgatgcgctcctccaccgaggcccgagtcacgaagcggtagatcatcaccttcttgttctggccgatgcggtgggcgcggctgaaggcctggggagacctgcacctcagcacccgtggctcacccagggctccaggcaatggaggagatcacacccatgagctcaagagcatggaatgggctgcatgactgtgtagggaaaggcgtgtggtgcgtccaggtgtgtggagcccaccactgcagctgggctccctccctgactgcggagcctcccacaagcctgggtgccaggctgggtttggagtggaaaagcttctagccattggaagcaggcaggactgcaggtgtgcaagagtgtgtgagggatgatacggccagtgtgctgggtgtaactgaagccacacagagcttcrtgggggccacggggaggtaggaggctgcatttccctgtgagcgaaccactaatgggaccacaagaccatgtgctggagacacgcagccaccttctgagggcagcaaggagctgaatctgcccagtataatacaaggaagtgcctgagactctgtgcagccctacatgaggtgacctgggtgtggccgtgtatatctgtgtatgtgcatgggcgcacacacatgtgaatgagacatcaatttgtatgtgttcccctacatttgtaagcattcaatgtgtgtgtcccagcgcccgagaggggtggccaggtacactagggtggctctattcccatacccctccccccacagcccttccatccttccttacagccccatctgccccttgcactatcttatcctcccctccacctccaacaggccccactctctgctccccacccccttcaaaatgggtgcccctctgggtcccagggctccctcttcctgcctccctccacggccttggtcctgaggatgatgggaaagaccagatcagtggccactaggaactgctgtgcgccctgggacacttcccctgccctctccaagcctgcttcctcctctggacaaggacagagctggagggatgggggccaagcttccactcactcccagagcccctcttggggccgagactccacgggggagggaggcccacagcaccaggataggtgagggggtgatggcaagaagggcatgaaggacagaacctgcctgaggcycgggatgagaggccccctgggagggtggtgggcggcagcagcacagacctggatgtcattgtgcgggttccagtccgagtcgtagatgatgacagtgtcygccgtggccaggttgatgcccagaccacctgcccgggttgagaggaggaagcagaactgctgggccccgggggctgaaaaagagaggccagcagatrggagtgtttggggggktacaccttgggtgggcagaaaggatgggggagagaacagagagaaggaactgcagcaacagatccctggcagagaaggacaaagccggagaccccatcagagacgggtggccacagctgcactcaggggagccagaggaggcctgcccaagcccacttagcccccagcgagctctgagccctrgtgcagtgggagggcactggaacgaggaggtcaattttcaaaccccagatgagcaaaaaacaaagtgcaagccgccagcaagtacaagcagagccctagagagctcagagtccttcatgtccccgcagcttcccacccctggcttcccttagcccaccgatgctgccagggcagcccgggaaaactcaggggcgcagctccgggacctggggtcccaccccactgggcaaccctgtcacaggatggctggttctcagcctctcagggcccttcagtgacctgggactgaccacagcccccactggagctgcaaacaggcccctggcacacccagggcttcagccactcctgcttccacatgtggctgggccacgtctagaccctgaaactctgaacttgctattcctcctggctctctggcacaagtgtttgagaggaatcactgctttgggcgtttggagagcgtggccccagcccctaagggctgacgccccagggaaacaaagcttgttactatttgctgcaaacttgctactgaagcttacagccgactgcttcccactccagaagtttcttttgctacaggaggaactccaccggcaagaccctcctgacctccaccctcgcctctccttcccaggcagggaagaccaagcatgggtgactctggggaaagagcctgatcatgtgtggcccagccctttcactctctcctgcctctggaagtggccccaggtagcacgtgcatctctgtaccttctgccaccattcaccatacggcaggctctgtccaacaccacttgtaactggggctcacctggcgtcaatattagaggccccgtctgcgtttctcattgtctaactccattcccaacaggtgttatctactgggcccctcagaactccgattccatgggaggaatccttttaacattggaaactcggactggcctgctgtctttagctgtttgtgaggctgctcaacacaacaccagctgggtgacctggctaagaaccaggyctgggagaagaggccaaaaaggagtctcaatcagaacccttgggcaggatgggggtaccattgaatctgtcgattgcctcctgccggaggcccccggtgatgccaccatcaatccgctcatacttgtagccttcgtactccaggaagtcctccaggaggtccagcatcttggtcatctgcaggggagacgggcacgtgaggaactgccaaggagcaaggggccccatgggccatgggcggggaccccgccacaggcaggggaggagagagctgcctgctaggtggggagacagctgggacccaggcaggcccaatgcaggactctggggaagaacaaagcttccaacctcaccccttggagccaatccatcctcctgcctagccccacagccacttacctaaatcagggctctgacatgagcctcccctgctcccaccacacagaattaagttccatctcactgccctgtattcaaggcgctgcaggacgagtgctccttcacagcccccagccattccaaactacctgactctcttcctggaatgcccacccccttactgcctagggaacataaacatcacctctgtgatgtcttccctgatttcactcctccccataagaaaagaaaggcagtcccttctgagctcccatgaccccgtataattccctttattctcragagagagtttagctggatataaaactatcagcacacattttccctcagtgcaccggagattttgccatggtctctgccacctgttgttgttaagaagtctgagaacgatctggctgcccttattttgtaggtactaggtctaaagtacctagaggttctaacgtgtctacgggttcatttatttatatttatcttgcttgctattccagaatgcactccagatctgagacctcacatttctctccaggtctgcaaactctcaacaaatccaacttcttcaccattttttctgtttcttctgcaactccaattggatgattgttggagcatctcaaggtgtcttccatgttctccctgttttatctttgtctctgtacattgcattctgggaaaatgcctcagcaccaggttccaatttatcaatgttctcttcaacagtgttcagagtctgtccagtctgttgaaatgttttatctcaatttcatgcatgtttctatccaattgttcctatttcagttcttcctgcttttgcttaatttcttctttattttagggtgtcaattactccatcatttttgaggatcctaaacacatctatgtaaagtcttttcaggctatcctattcttttctctctctctctctctctctctctctctcaagagacagggtcttgctctgtcactcagactggagtgaagtgacaagatcacagctcactgcaaccctgaactcctgggctcaagcaatcctcctgcctcaacctcccaagtcgctgagattacagggtgagccactgcgcccagcccctattttcttatttggattctatttattgttttgggggatgtctcagcattcacttttgtatgggtttggaattggggttcataggctcattttgggcaggagggccccgtctctgtyrcttgccctgtgtgcacatttctggaagctgtgtggttcccattacttggtatctcaaggcctctgrtcagacttgcgtctcgtgytggtaccgaggtactggggggatgtgggtccatctccactccagcccactccttggctcagcccctggtctcaaacttgccctgctttccagtattcttcgggctgaagcagcccagcagggtgacctggggctgcaggcrgcggacgctgctttcagttgatgtttgtgcacaaggagccatagcccagactctgggtttgagcaaggggcctggctcagtgggcccacgagaggagcatttttagccccatgaccctgtaggatcatcactgtggcctccaacacagagctgaccacagggtcgggtacctgtcccttgagctgtctcccacagtagactgagcagcttgaggacagggactagatcactggtccctgcacccatgtgccagcacagagcctgactatgacagacgcaaacaaagggatggaggaagaaatgaacacacctgagccggcggccctgcctccaagccaaaaagccaggtgccagtggcccctcagggcctattggagagaggggctcctcccaaccacaccccagggccctaccttaatgagaagccaggctkcgggggagagggccagggcaggggaggaggggctgtcctaccagcctggacatgcagaccagaagggcaggtgtggggagatgttgctctttatggcaaatgtgttctgagctcctcagcygcattatgccagggcacgggggagtgacccctgacacacagtcacatgacccacatgggaacggcactgggccctgaggggtgccagcaagtttgcgcccccaagcatcagggcaggatgctctctgtggggtgtggagccggggcgggggtgggcaggggcagcgcacctgggagaagatgagcacacggtgcccctcatcccgcagtttcttcagcatcttctgtagcagcatgagcttccctgaagacttgaccagggagcttccatcgtaggagccattgggcaagacaggggcctcctgcagacacagcaggaggtggggcatkggtgggctcccctctcctctctgactctgcaccaaaggggccgcagggaacagacaagygctgagcaatggggtgatggcctgtctgcccactgaacatgagacccacacccgagccaggccaggccccacagtgcggggtagaccktgggtcccacggccctggctccaggccccccgttcccaggcagggctcacagccgcaccagccctaccacagcagcgggttccacrgtaagttccccagcacctaccagagtggccacaggcaaccttccatgatggccagggaaacctaccatgacagccacagaaatcgccacaatggccaggagaacctatcacagcggccacagggacctaccatggcggccacaggsacctaccatggcggtcatggagaagctgccatgatggcyggggaaacctaccacggcagccacagggaagaggtaggggtggttgcagcactttttcaggtccatcatgatgttgagcagcgatacttggttcccgccccccttggagttcagtgcctcaaagttccgtgtgaggatgaacttgtagtacttcctgcagcagggcacgaggaaaggcaggctgggtcagacccgcctccatgagggctctctctgctctgcagtggggctggaagctggtggccaagcacccatttayagagagacccaagggacccccaagaggtgaagccaccggcctggagtccccctgcaagtgactgggggacactgccagcactcaagcgacccaaactctggtcactaaaacctgagaagaggccccacgaagaaagtgtatgcaaagcattagccragacctcagtgaggctgaagagccctccrcccacctgggaatcgacccaggagaccagcccaggggaaagggcgagcacaggctgctccggggtcagcccatcactcacttctgcatctggctcagctccacccggacaatgagctcggtcttggccggcatgttcttgaacacgtcagccttgagccgcctgagcatgtgcggccccagcaggtcatgcagcttcttgatctggtcttccttggagatgtcagcaaactcctccaggaagccctccaggttgctgcaacaaaaagctgggataacagccagragcagaggaccggggcaggggaggcagggtgcagagcgcctagcccatgtaggccggctagctggtgaaccagggagccctggcattgccctggatatcgtctcmatttctgtctaagcctgtgtcacctccacacatcacagccctcttttcctcagccacactggacacctttccatcctcaaaaccgtcctggacaggagctctctattacccagataacagatgaggaaactgastctgatgagtgcccgagttgatacagtccagctgtgccaaaaccggccctcaaatctacatctcctggtggctcatgcctgtaatcccaacactttgggaggccgagacgggcagatcacccgtcgggagttcaagaccagcctggccaatatgatgaaaccccaactctactaaagatatacaaaaattagccgggcgtggtgacacatgcctgtaatcccagctactcaggaggctgaggcaggagaatcacttgaacccaggaggcggaggttgcagtgaactgagatcaagccactgcactctggcctgggtgacagagtgagactctttcttttaataaaaaaaaacaacaaaaaaaaaaaacactgcatctcctgattccaaaatcgacactgtgcaccctgaaccccccattctgagcaggcaagtggaggtaggtgaagatgagggggatggggcggtgggctccggccaccggggagcttgcctctgcctccaccacggttgcctatgtgagtcacttgggtctcagtggagggaaaggaacctgccaggggaggcagtccaggaggaaccccgggtggtctagggcagagctaaggaaaagtcgtggtattagcagcagttgatatttaccaaacattcccatgtgcccacgccacccaccccaacaccctgctcctgcaggaggtcaaagcggggacattgctaatgctcccattttactgatgaggaagcaacggccgagcaggtctcacagccaggatgggctattgatccgtcttcactggggccacccagccccaccaccacctccctagccagatccaggtgactcacttgaacctctctggagtcaggaagttgaggagatggaacagctcctccaggttgttctgaaggggggtccctgtcagcagcagcttgtaatcaatcttgtagctgtttaagaccctaaaaaactgaggggaggagagtggggcctgtcagggggctctgggcggcccctcgccccgggaagctctggggtctggcggccagcgccacctaccttggactggttgttcttgaggcggtgggcctcatctaccaccaggcaggcccactcgatggagcccaggatggcctggtcratggtgatgagctcataggaggtgagcagcacgtggaatttgatctgcacttctttctggagaaaagaggggcrttggggawgagacggctgggagcagagcggatcacagtcccaggagacaaagagccaagaaggaggtgtgcacaggaacccacaaaggctccacggagccctgggccggccagcctaggaccagaggggcagatgctgaccaccaagcagaggggcatccactgaggctcagaacacagccctgagagagggtggtgtggaggaggagaagaaacggyctcsgcttgtaacagctccagtgagacagtgtcttactcccaccccccagcgtggagtacagtggcacgatcaccactcacttgcagcctccacctcccaggctcaagcaatcctcccatctcagcctcccgagtagctgggactacaggcatgccttaccacacccagctaatttttgtatttttgtagagacagggtttcaccatgttgctgaagctggtctcaaacttctgaactcaagtgaaccgcccrcctcgacctcccatagtgttgggattacaggcgtgagccaccacgaccagccctggctctgggcttattactttgtttccactctcacctcatcctaacaaaacatacaagctcaattgtgtcctttatcccccactccccccagggttatgtttgtcttttggagagagatctctctatgttaactaggctggcttcaaactcccggcctcaagcaatcctcctgcctcagtctcccaatgtactgggaatacaggcgtgagctaccgcacctggccttttatccccatttaaagctcagggggcctcaggctggagcactctcccaggtacccatagctaacaaatggcatagccaggatatgaacagagaaagggaccctgcacttggggtttaatgccctgaggttgctgatgtgaaattattaatcattttgttgtttattgttgaatttgtgttttgtaacaaatatcccagggsacaatggagtgtgtgctgggggcgtggagcctccctgggacaggttctcattccctgctcccctgcccctgcctggtgaccactgtccccctactccccctggtgggggcctgracctgggtgctggttggggagggggagccaggcacccggtctatgcaccaagttccaggacagggcctggtgcctgtgagggtctgcactctcccggtgaggatccccacacctgaaggaacaygactttaaaaagcaaatttaggccaggcacagtggctcccgcctataatccctgcactttgggaggctaaggtggaaggatcacttgaggctaggagttggagaccagcctggccaacatagccaaaccccatctctactaaaaaatacaaaaatcagccaggcgtgttggtggacatctgtagtcccagctactcaggaggctgaggcgggagaatcacttgaacccaaaaggcagaggttgcagtgagccgagatcacaccattgcactccagcctgggtgacagagtgagtctctgtctccaaaaaaaaaaaagcaagcaaatttaaaacacyttggcatgttgacagagaccacagaagaaaggaaaaagctgttttcctgcgagccctgcattttcattttgcaccggtctccyccagtgatgtaggcctgtcctgtgctgcaccaagcctgcctctcccagcagcccacatgccygtgagagagcagagagggccgaggatgccgtgcagcataggctttgcctgcacgtggcacctgggtttgcacacaatcttttagccgagcatcggtctcctcgcctatctaggtgaagaatgctatgagawctcaaagagctaagtctgtttctcaaaaaatcagaaatagaattaccatatgatccggcagttccacttctgggtgtatacccaaaagacaggaaagcagggacacaaagggatatgtgcacacccataatccttcccatcagcgttactgacgaccactaaaagccagaagcagcccaagtgctcaacaacagatgaacagataaacaaaatgtggtctatccctgtgatgggggttctccagccttggaaggaaattctgacccgtgccacaacatgcatgaacctcaaggacattctgctcagtgaaatgagccagtgacaaaaagatagatgtttcccgattctactcatatgaagtacccagagtagtcaacctcgtggagacagacagtagatgggtggctgccaggggctcgaggtggtggggatgttcatgtttaatggggacagtttccactttgcaagatgaaaagagttctgcagactggttgcataccaatgtgaatgtacttaacactactaaactgttctgttgttgttttgttgttgttgttgttgttgttttggtttttctgagacagagtttagctcttgttgcccaggctggagtgcaatggtgctcactgcagcctccgcctcccaggttcaagcgattctcctgcctcagcctcctgaatagctgggattacaggcacccaccaccacgcctggctaatttttgtatttttagcagagatagggtttcaccgtgttggccaggctggtctcaaactcctgacttcaggtgacccacccgcctcggcctcccaaagtgctgggatcacaggggtgagccaccgtgcccggctgattttttttttttttttaaagagacagagtctcattatgttgcccaggcaagagtacaacagctattcacagacacaatsatggcgcactacagcctcgaactcctgggctcaggcaatcctcctgcctcagcctcccaagtagctaggactacaggtgcacaccactgtgcccagctgaactgtacttttaaaaacggttaagatggtaagttttacattatgtgtattttaccacaactcttaacaataaaatagaagagccaaatcagcaaagtgcttggcacacggcagggtcccagtgtggctcaggggaggttcttttgcgtctgatgatccaggggctcatccatctacaaagtcacctgtgggatcatcgattcattcactcattcaacagtttccgagcatctctaagagccacagctgctaggaggcagtggaggaggccgacctgagggactcggagggcctgtgcgaggatccaccagcccccaaggctgtagcactgacatcttctaggggccaatggctacaagtcctcattcctcaatgtggagagggtttagaaatgcagaggctcaggccaggtgcggtggctcaagcctgtaatcccagcaccttaagaggccgaggtgggcggatcatgaggtcaagagatcgagaccatcctggccaacatgtgaaacccagtctctgctaaacatacaaaaagcggctgagtgtggtagcacgcgcctgtagtcccagctacttgggaggctgaggcaggagaatcgcttgaacctgggaggcagaggttgcagtgagcccagatcgcaccactgcactccagcctggcgacagagtgagactccatctcaaaaaaaaaaaagaaaagaaaaagaaaaagaaatgcagaggctcgggccccaccccagcactgctgggtcagagactgtgctttaacaagaccttgcagggttcacagcaccatgagacctcatgcttattaactcacttgactctgtggggtgtgtctgttaactccattttgctgagaaaacactgagacccagtgaggccacgtgacttgccagaagtcacacagctggtgcactgcattgaatagtgtccccccaacattcatgtccacccagaagctcttttggaaatagggtctttgcagacataattagttgtctgggcatggtggctcaatgcctataatccccatgctttgggaggctgaggcaggaggatcacttgagcccagaagtacaagaccagcctgagcaacatacggagamtccatctctacaaaaaatttagaacttagctgagtgtggtggtgtgtacctgtagtcccagctcccgggaggtcaaggctgcagtgagctatgatcaatcactgcactctagcctgggtgacagagcgagaccctgtctcaaaataataataataataataataataataawaataataggctgagcgtggtggctcacacctggaatcccaacactttgggaggccaaggcaggcagatcgcctgaacttaggagttcgagaccagcctgggcaacatggtaaaaccctgtctctaccaaaatacaaaaaattcgctgggcattgcggcatgtgcctgtaatcccggcgactctggaggctgaggcatgggaattgcttgaaccgggaggcagaggttgcagtgagctgagatcgtgccatactgcactccagcctgggcgacagagtgagactccgtctcaaaaaaataataataataattaataataataataataataattagttggggccaggcacagtggctcactcctgcaatcccagcactttgggaggctgagaagggcagatcacttgaggtcacaagctcaagaccagcctggccaacatggtgaaacctgtctctaccaaaaaatacaaaattagccggccatgatggcgcactcctggagtcccagctactcacgaggctgaggtgggagaaccacttgagcccaggacggggaggttgcagtgagtcgagatcgccccactgcactccagcctgggcgatacagtgtctcaaaaaaataaataaataaataaataaaataagtagctaagatgagatcataytggattagggtaggccctacatccagtatgaatgatgtgtttataggatgagaaacagacacaaacgggaaaaccccatgtgctaacagaggcagaaactgacgcgacagctgtaggccagtgaacccctgccgccaccaggaggctggaaggaggaaggaagggttctcccctagggctttcagaggcacgtggccctgccctcaccttgatttccaacctccagcctccagaactgtgaccgaatacatttctgctgtttgaagccactccatttgtgacactttgttacaggagccccagaaaactgacatggctgtaactcagcctctaggacaagcccctcagagcctgccggcctcggtagccctcccaggctgagggaccccaaaggagtgcacggcacccgtggtccctgaactagaccgggggccttcctaccrtccttccaaggatagcgagccctcaccttcatacggaataccttcttcccactccgaatggcgttgtcctcaaaggaaaactcrttctcccgaatcaccgagcggctctccttgtcccccgtgtaggtgaccacgtagaagtcgggcgcccacatctcaaactcgcgttcccagttgatgatggtggagaggggcgcgctaaccaggtagggccctttggagtggccctggagagagaggccgatgccgtgagaccacctgcccttggccaggaccagccacccctcctggccgcctgccccgcctgcccacctccttgtagagggagtaaaggaacacgatggtctgcaccgtcttgcccagacccatctcatcggccaggatggtgtcagtgccctgggcccaagagaagcgcagccagttgaggccctccagctggtacgggtgcagtgtgccgcctgtggagtcgatgtaccatggctgcttgtcgaacttgaccgtgggctgcaggggaggcagcggttcagacacgccccagatcctgggccaccagagtccacactacaggcctttgcacatgcaattccttctgcctggaacactcttcccactcctgtctgtcttcctaactcttctccagttcttggatggaacacctcttcctctaggaagccctccctgactcccagcctggctgaagtgctcccacagtgtcctcccatggcagccctgtacttctcctatcagggaaatttcccgactgttgaattctctgactctgagcccaggttgtcatcaccaccttggtcctgttcactgcctcctcttgagtaccacacagtgcctgggacatgtggtcacttactcaccattttttggatgaacaacaaaacgaacatccatctggggcattcgcaacgcccccagtaacaggctcctccactggatccagacatttacttttttttttttgagacagagtctttgttgcccaggctggagtgcagtggcacaatcatggctcactgcagcctcaatttcctgggctcaagggattctcctacctcagcctccctagtagctgggaccacaggcacaccaccgtgcctggctaattttttgtagargtgggatctcactacgttgcctcaaacttctgggttcaagcggtcctcccaccccggcctcccacagtgctgggattacaggcatgagccaccatgcccggcccatttgtctcttgatcctgctccaggtcactggccccatgcagtcctcccaatggaccaggcccatctgcctttccccagcatctgacaggcgcctgatagtcccaggccaggccctccgtgttctgtggatacccaccaagggcccctagaagacagtgtgtcttctgaaacagctacccagggctcactggccctcgtctcctcagggccaacccagggccaggcgctagtggacacccagggagctctgctgagtgagtcatcctgggtctcctcccaggtgagagtggtgtgtaagtagcatgtcagctgcagtgttatgaggggccttccagctgtcctagcctacatgggcatgacactgtctgcataagccatgagggcccaaggaaacatccttttgagaacacacaccccctgcacattcaagtctgaggtgggcaggccctggcaaccccacccactgctgccccaccctccccactcacgtccacaatgggcgtgtccggcggcttctcctgcttgtcgtccctcagcttcttgcccttcttgagcagcctcttgggcagcctggtgtcttctcccagcatcagctccctgggaaacggcattggaggcaggtgagcaaggctcagcccaggagcaggtcccggcagcctgtgcctagcagccggatccctgcgacccacctgtggccccagtaggcctgcttgaggttgtcgtagtaggggatgtcgatgtcatcgatctcccaggtgcactggtcgtagggcaggtctttccacttgatcaggtagtgcacatcccccttcttgtcaaagctgcaacacggtgaacagatgtgggtcgctcagagcagtggccacagcacrggtttgatgaagggcacctcccaggatgcagagccattcacacccagggtcccctcggatgctgggcccagccaggaggaggagacgagggcagaagctccagggaggtgcagcggcttgcctggggccacacagcgaatgagagggggatgtggcagagctggagagggacacggaggccagctaacagaggagcaatgagccagcctcccacatcctttgcagcctctgtggcagggatgaatcccatttgtcacagggtctggattttcacaggagttctggatttctaagttggaaagttctccttcctgccaatggactcagttttctaacttaaaatacgcaaaggacttgtgcagtgcccacgtagggtgaggagtcatctctgcaaagtagataaggatgcaattcctgcgtgtgaggtggtctcttctggggacacaaagacccagtgaccaagcccagcagcacacagcttgattctggccactgggagggtctttagggcctcccacccacccaggctaaggcaaccaggccagaggagtgctggagggccgggctggggcttgrctaccccacacagcagtgccgaggaggcacacagacccggtgagcagcggctgctgcgggcctgggaacattaagagaaaaaccgatcccgttaccacggcaaccgatgtttgtttgttttcccatacataattgattgttttgcagattgggggaacaaatctgggggagattcacctgccccactttggggcagagagaaaaactaccatgtatatttttagcatgtaatttagtaaaggtagaaaaccatgggccaattcattgccgggctcaggttcccacaggaactgacccttgaaggtcattctcagggaggcctggggaggaaaaggggggtgtcccatagttgaaggggggcagtttttcaaattccgcgaccctcgtactgaagaccacccacagccagcctctggcaagctcctgtcacccgtgcagcagcctgttccctaaaagggcctcaaagctcagcagatgggaaccgggattgaaatctgaacatctggytcaggcttttaacctctgctctacccaacagctgcctgaagccagaagcactgagtgtcagaggccaccgatcctaagcccctcaaaaacagaggccacagggtagctgggatggggagcacaagctccaagctgccaccaggcagcaggtactctgggccccaccccaaggcccatctgtcagccaccaccagttctcaagcacctcaactcaagaatcagcaggcattcccaccacccaccaaatcaaaaccaaagcccacgggcctcctgcctctggctctttgtgccagcctcctgcagcctctgattgctaaggcatcccagggaactgccagactgctccaggaagagctgctgctggggcactggggggtgcaacagtagctaagaaagcaggtcctgcagtcagaaagcatggggttcaaatcccagctccaccccgtggctgtgtgattctggcgacttaaccttgctgtgcctattctcacatcagtaaaacagaggtgaaagtaagacgcctccctcccagggtaggcagtgctcagtacagccagctgctgttacaaacgcgggggaaatgtggacatactcccacacctcgggcgtccctcgtcctcagaaccctcttgctggtrtcaagcactaacccagcatgagggtcccgacgccccaggggtgtgaacacgtatgcatgagtgtgccggcatgcatgggacggcccctctagcaggtcaggcagatctccagcactgggaaccctgggcccttccttgtgcccctgctgtgcccacatgtggttcygcacggcagccccaaagcaagggccctggcaccctgcgctgcacccattttacwgggcaaagaagctgacgtggcccggccccagcgatgggcagggtggccgcctgcaggcacacacctatggttcaggattcggtgaatcatcatccactctggcttgatgccatagcggtagaagcgctcctccatcttggcatagagggggtccttgttcttcctcttctcgctcttgccgtcttcatccccagagccgtagtcaaaggggggcggctcatccatgtcgttctttctttggtagttgcgatacatcaccgtgtggtacagctccagctgctcatggagcggcacaaagtcacagaagggagatgggccatggtcccctgcatctccctacccagctcctctagccccagcccaggtcccaggcaggacaatcytcccgctcagcaccaccccaactcccaacagcacccctcagtcagaggcgcttcagcmccttcccgccagcccaggagggtccagggctcaccaggtcccgggccttagcacagccaccctcccgggcactcacctgtagctccttcacccaggagcartgccagtaggacagccctgcccacttgacaaagaactctctctcagggatgccctccaggggcttaggtggagggaggctgggctccacgtcaggccccggcagccccaccatgaagggggcagggggctccgtccacctccagtgtagaatccgctggactttgcccttcagtggggggcactgtggacagagaagggtccccaaggtggggctcagctgcagggccccaccctgaggctcccatgacagcaggctgccatgcaggctccctcccatcagtgccactgcccccaagtcagaacagtaccacggtgacgccatgacatccaccccgtccccaggagccgcatgggtcatgcacacaggagatgggcagtgggggtctgtgagaccacgtggccctttcactcaatggtgaacttatcggcacccagaatatctgagccagcgtaggtgagactgccaygtgcataggacagagggggaaactgaggcccactcggcaagggacagcagagcagggagcagaacatgagattctggacttcccctaccttaggtcttcccattgccccctgaaaagaggtcacatcactgtgtgatccccaagcactcagggagcatgagccctgtgctggagcccagggacacggcagccccatccaccatccctcacccggggcagggctgcacccaggcaccgtgcgtctaggctgggacaatgaggccccatctctggcagcccacagacacactgcaggggccctgacagatgctagggtgacagtgagctgctggctggcaaaggcaagaaatacaacagccacaaaccacaccactcgggccctgagatgggtgggagcagccttggccctccaaggaggcggtgctgtctgactggacagggtcgggggtgactgattcagggagacagctctggtggggatagcaggtcccagctttgctactacctgtcctcggaaactcatccaagcctccagagcctgctttcccatctgtaaaatggcccaccccttcctccacctrccagatctgtggtgccacatcacacctgaaggcattctggaggtgcaaggtacaccacacagccagccttcctttggccttggtgacagcaaaggcygagaggcagaggaggaggaggaggacatgggaggcaggaaaggctcctccactggctcttgggggagtggaagaggggacccttcctacccaggccatggaccctcctacccccatcccagcccctcagggaagaagctgagaggaaccccactcctgcccccctcccatccccagggccttccatcaatcctaggaaagcacagaaggctgcacccctcaaaagggtcctcccctggcccctacacagacacagacaagtatgcgcacggatgcacgcacacacatacacacgcacaatgcacacaggacggcccagggctaaaggaggcacagcccaggacctgaggggtggaggatctggcaccacagggggcaggacagacagctcagagcaaggggccttccgatgtctactgtgactggggggtgacggatggggggtgcccctcttcctgtagaaactgaggctcccgccctaggagcctcctgccctagaagcctcctgccctctccctatccccagccttggaacaggagccaggtctggggtggctccaggaacctgaatttgagtggatagttctgcccttgtgtggccttaggcaggtcactctgcttccctgagcatcagttttctcatctaaaaagggagtaacatgcctggtgccagaatactcagtaatgttaaaggacactatgatggatgtggagcccttgcagagcacgtggtcactgaacagtggtcgcggtgttggcatgatcaccacacctgtctgcctttccctaacactcatgcctcccgtctctaggggagtcagacgcggagaagggcgcgaggaagctattgtggacggggyctcgagcagcgcgggcgaagctttgcgggatcggctaccgaggcggggcaggagccggcaggggcggggccttttgaggagggcaggccttcccctgggggcggggcctgttcctggggtggggcggggcgtccggcgcggggcgggcggaacactcacagtacagcgcgggcagagccattcaccgtttgggatctcgggcagcggcgggttgaggcaatgcaggtggtaggaggaggggcaggcgtcgcagcagagcagctcgcccccgtccttgcacacgcggcagaactccatgtggtcgtcctcctcctcctcgcagccgccctcctcctcttcatcgtcgtcgtccttcggctcccactggatcccctccttctcctgggggaggaggccaggtggaggcaccctgggcggggtccccgctccaccaggcccgactccctccctcccctacagcatctccccgcattctgcccccaaatgagggcacaggggtgggggagccagkcgtggccccgcccccagcccggggctctgccaaggcttacacagtgggggcagctccacttgccctcgggagccttctccagctctgggtccaggcayacgagatggtaggccctcgggcaggtgtcgcacaggatgatctccccaccctgctggcacacctcacagtaatcctggtggtctgtctcatagccgtcaccatcatcaactagggtaggggagaggcagtcatggaagtcctcatccacactcccagcacacaaccaactgcatcgccccaggccagacaggcacagagtagatgtctaatagagggtggatggaaaggtgggtgggtgaatagactgatggttgaggtggtaaaagggtgaggagatagaagatggataaaaggaaagaaggaaggaaggaagggtaggagagtgggtggatgggtagaaagatgaatggataaatggatgatggatggatagacaaatggatggatagatgaatggatggacaaadggatggatggatggatgatgaatggacaaatggatggacaaatggaaatgggtggactgatggatggatggatggatggacaaatggatggatggataggtggatggaaggatggatggatgatgaatggacaaatggacggatgatggatggatggatggatggacaagtggatggatagatggatgtatagatggatgaatggacaaaagaatggatggatatatggataaaccaaatggatggatgaatggatgggcaaatgaatggatgatggatggatggacaaatggatggatggatggatggatggatggatgggcaaatggatgagtaatggatggacaaatggaaggatggatgcatagatggacaaatggatggatagatggacaaaaggatggatagatgaatgaacaaatggatggatgggtggacaaatggatgatggatggacaaatggatgatggatggacagagtggtagdatggatggatgaaccaatgaatggataatggatggacaaatgaatggataacggatggacaatggatggatggatgatggatggatggacaaatggatgatggatgaatggacaagtggatggatggatgggatggatgaatggatggacagatggatggatggacaaaaggatggatggatggatggatggatggatggatggatggatggacaagtggatggatggatgataggatggatggatggatggatggatggatggatggayggacggacggacggacggatggacaaaaggatggatgaatggatggatggatggatggtggatggatagctgayggatggatggacaaatggattgatgatggatgatggatgaatggctggatggatgaaggatggatggataaaaagaagggactgagggaaggagggagaaggagggatgggaaggaaggtgaggtaaagatgggtgttaagtgggtggggggtgactgaagggaggatggygatgagatgaagcacttccctctccagtcaccacactgctaatgcaaatgccctggggtagctcccaccataggttccttgttctttccttactgggacaggatgcccctccccagacagtagaaaccagggccgtgtgggaaacacaggggccccacctggctgagacatgaggatgccctccccctgcttcccacrgggaggttccatgccccgcacatccacccggcaggccgagaaccgtccagatggggagtcctactcgtgccccactacatccacccagcaggccaagaactctctggaaggggagtcatactcctcttcttcttgcgcctcctcttgctcttcttgcccagggctgcagagcattcggagcgcacggaggcactgtggatgctggcgctgtcraagtccgactcctccctctcatcttcttcactctgcaggggaagacagggtcctgtgatcccagggmttcaccmagaaggcttcgctggcccaggcagtgtggggtgggacaaagcacggaagaggctctggagacacagtgctctctgtgattcayctcagcccccaacacagctgaaaacctcacattacagcctgcctgtccagcctgatgtcccaccgcctacccagagccctgctctccagcctcagacacttcccacaatttccacctctgaacagcttcccaggccttgccctccatcctgccaaactcctaaacatccttcaaggggcagccctagggacacctcctccaagaagtcttcccagatctctcctttactggacctactgtggctgcgtgtgtgccaggtctggcctgtcctgtctgactggtacatcacgggctctccaccagcaaacatgcctgccaggtgacgagtgctacaggaccacggcccactgtggctgagcagcgggcctggtacacagtatgtgctcaacaaatatctgctaagctgaactggaccgtcagctccagggcgggccacaccttctctccatgctcccctccagacctaacactggctcctgccatggtgcagggaaagagcttccaactccaccccaccgcagggctggggtgaggtgagggaggcagctacctgtgggggtgaggagggcgaatgcccctcacactcacagagaaaggggggccccaaggctgagtaagacctggrcttagtgtctgagcctgggcccagagctggccctgaggacaggaggaggtaactggggctccagccagcctgatcctrcccacataccacttctctagggtccagcccccacccaactactccccccgagagcagacctgggtgctgggcggccaggccccaccaggacagatccctccacctcctgcccaaatggagttgcagctgtggacagcaggagccaggactgagctcccactcaggagggtgagccaggggagcactccctgcccagagtccaggctagaagggcccttggaaggattcaatctaaactcctcatcacacaaatggagaaactgaggcccagcacacctgcatgtaggatggaaggagaatagtggaggggtgcracctgccccagctagtttgtaatgaactgaaggccctcgcctggcccttgcrtgctcatgtgcagacacacatgcatgcaaatgcacacacacgcgcacacacgcacacactcaccgaggagcctttcttcctcttgttgctgatccccccgaagcggaacttgagcccggccgtctttttccctttgccctttttcttcccatctttggagcctttgatcttcttcctcactccaggccctgaaaaacagcagtgatgatagccaaccactgccaccactgacggcctgcttcctgccatcatctcactgagctctcggttacccaataaggaaagggtcatttctaccatcaccccgtttcagatgagatgcctgaggcttggagaggtaaaccccttgcttaaaatcacacagcaagtgaggcaaaaaccagatgacggctctgactggaggctgccctgaccgccttgctgccccttgtccaygacccacagaaatgtggcccttttggraggatcccctataccgtctccaaccactgaaaggaggcactagccatcccccacagccagcagggccactraaggcacagccgcccacctgtggtccatgcctgagcccccaaaggatgtcttggagccaaaaggccttttcccacctgccagccaggcaatgctggtcccacccaagactgccccacctctgccagtcaaccccagcaagggccagcagggctgaggctgtttttatggagctggccacagggcaattagctacctggggagtaatgacccaagaaggaagkggggcctggaggcagggatgcacaccccacagaggcrgcctctccccaggccgtcctctggccacaccacacacacggacatggagctaggagcccagctgcaccctccatggcgccgcggaaaatctatttcaattttccaagctctgaataagcagctcatggaatcgatagctcagcagctggagcgcgagaggaaatgagaaaacaaggcaggctgggcagacaggggcgggccaggagcccctcccgagatcctgatggcccagacagatggagcaggacagggaacagactctgacccttgtcacttcacccaccaggctcccttcagagacttggcatggtgatgccagacacagaaccccagaaactaaagctccttggggctgaaagaagggatccccggagccccctcagccccttccatcaaaacccaaatcagccagacgcggtggctcacacctgcaatcccagcactttgggaggccgaggtgggcagatcacctgaggtcaggagttctgagaccagcctggccaacacggtgaaaccccgtctctactaaaaatacaaaaaattagccaggtgtggtgatgcactcctgtaatcccagctactcaggaggctgaggcaggagaattgcttgaacccaggaggcggaggttgcagtgtgcagagatcgtgccactgcactccagcctgggagacagagtgagagtctgtcaaaacaaaacaaaacaaaacaaaacaaatcagggcacccaggaaagctgagctgcaggtgactgacagccctggggagatcaacatccccagcctccaaaaggccagaaacctgcacccagaaagctccctccccagggccttcaagtcacagggggcstctgctgcctgcatcctccccacccagacgccctgccactgaggcagaatttggatctcgatctccttccaggcctgtcccagaacagcctccctgggaagcgagacctggccgtgcccagtccctccaactcctgcctgcttcccggatcctaaagctggaggggcagggcctccatgctccacattggccgagggcctggagaacaaccctgcacacagtgggtatgcagacaagaagaagagacgggctcgactggggcctcctcctcctccccagaaacggcacaggctcaaacccaagagcctgccaactcccagaaacccaggctggagcggctccactctgcgtacctctggtcccgccctccctccaggcccacgtcgggggcacctcctggctggccaggctcaaacctcccagacctctgcccacatcatcgcctctgcttctccaccaaccccaaaagggagtcaggcacaaaagaggcgacgatgctgcctcactgctgagaaaggaccgggcaatccaaggtcacacaggcacagagccctccattaggagcaccccagctgcccctccctgcccgcgtctgccccgtggcttctcctatagggtctgaaagggacctcttcccagcgggactaggtgcccacccaaccccagccttacctttgccctccttggtcttggccttgcggataggcacaggctggggcacctgcggggggctgacggctagcggaggggagatggtgaccgtctctacagccgcagccaccgccgccgccgctgctgccgcggagctgcccttgaaggggttgttggcgctgaactcccgccacttggcacccaggacggtcatcattttggacatggggatcttcgggttcttcttggcaatgagtggcctgtagggggagaggcaggagggtgagggcaaggccaggtgagatgagaggcccacccgacccccggcagggcccacccctctgccacatgtgcgatctatggcagcagccccaggttcctgattagagagattaggcgggaaacccactgaccacagcccacccccaaaacgccccagcttcctgtccacacccacagcccacccccaaaacacccagcttcctgtccacacccacagcccacccccaaaacaccccagcttcctgtccacacagttggtgattttctcattgggttttcaggccctgcaagacttgtggggccacaggtgggctacagtgggccttggggtctccgtcccacctctaccagagctgagaggccatggtggtgaaagaccccccaggaaagactggaaccaccttccccaaggggaagagactcaagggctgaggggcagggcccacaagggaaggcctggtggtctgttaacatgaaggggtcctgccccctccctccagctcccccaggttgctcagtcggtctgacagagcccacccctaccccaggtgccggggcttcactcctctgcctccctcccgacttggtaccaccagaggatgtgcgggcctggagaacagccctagtgccccgcccacctgaggaactggctgaaggccttgtagttggtcagcgtgtggtaatcctcctccgagaacaggtagtccacgtcgtccaggccccactcggccatgagctgccccgaggacttgggctcctacagagacccaggccagaggtagagttgttgaggggccttctgacctgcacccccatccccagggtctctgcctaggaggctttggcacaggggaaagaggaggggttgtgtctgcaatgtaaccagaccattctcacccaccctaggaaacattcaagccctgcagccccgcagccccgcagcccccaatctgtgccacgtctcagatgccagcccacgaagtgcaggccaagtgttcgacgtcagggtttggggagaggccatgtgtgtgccctgaacttccagaaagggaaatcagccaggtgtgggcaaggagactggatgcctgagaccaggcccccatcctgagatagggctgcccgaccagcctcgggacaccagggcaggacaacagaacttgccctctgtggggactgcattctggggatttggacagcaggacagcacagtggcctgaagacgggaagatgtccctgatgaggccgcagggctccagggctgcctaagccactttagaaagacatgaggcctccaggccaggggtggtggctcacgcccgtaatcccaacactttgggaggccaaggcagacagatcatttgaggtcaggagttagagaccagccgggccaacatgctgaaaccctgtctctactaaaatacaaaaattagttgggtgtgttggtgtgtgcctgtaatctcagctatttgtgagcctgaggcaggagaatcacttgaactcgggagacggaggttgcagtgagccgagatggcgccactgcactccagcctgggtgacagagcaagattctgtctcaaaaaaaaaaaaaaaaaaaaagacatgaggcctccccaggatgccaggtatagctacgtcagcccttgtgaaggacaggccactgccagtttccagtgaaaggaaagtgcactctgctggggcaggggcatgggacaatgggccagctrggggcacagcccagagaggatccaactactgctgaggcctggggtggagggacatcctgggggcacagccctgagaggatccaactactgctgaggcctggggtggggggacatcccaggggcacagtgagttctcaagagagctagcccaggggtcaggtgaccagatgaccaggcccgggctggcggggctcagaaagggaggtgccggatgtgggcatgggctggttctgatcctggctctgccacataccggtggtaagaagtggataagttacttaactttcctgcctcggtttccccatctgtaaaatggagataatggcacactgccttgcagaacagaatgacttagtgcaggtgcttggaacagggtgtgtcaaaatgcgttagcaattgttagcacccaacccacccttcttcttccttccctgacaccccacttcttccaagcagccctgagctgcccccacccaacctgatacattaagccaatcagtacacaccactcctaggccaaagtctggtcaggccagtcatgtcttaagccagtccaatcagagggaatgctggtctcctgcctgcatacctggacatgggaggcctgctctccctcctgctggaggggccaagaagccccgagctgctgctgccctcattctcagccacaagaatgctcagccatgagggtgcctggcctgagcccaacactgccacagcagaggcagagtgaatgatgcaaagagacagcctctgataacaccactgggtcccacaaccccgaagccccttgcctcttagttctcagggccctgatcccacacatccctctactgcctaggccccggagctgggcttctgctcctgcaacaggaggctgccctgagcgtctcccagcactgagaaccagtctgcccatccaggctgcgggaggcctccagagcccattcttgcctcctgttctgtgacagctcagagaattcctcacatggggccccctctgtggctgacctgcccccgtggacacacatggccattcctgatggcacacggaccccttggtccccacccaggacagcagagcagcaggtgagcgaggggatgatactgttacagggtgatcctgaatcactctcttaagtgaagctttcagaactgtcagccccgcagcgacgatccgtctccggtgactcacaacactccactgactcatgaaatcaccccaggtgtcaggacaccgccaggaagaatcgctcctcctcccacacctcccaacttcagttattcacattcatgatttctgcctcacccaacagcaactgtactaatatttacagagcgtttatctttaaatctgtgaccagcccaaaccgagccttggtgtctcttaaaagaacaaagggagcacagtgttcctgaatggcactgtcactcacccactgcctgtccaccaacctcacccctggcctctccatctccccaaggagccccagggtgcagcctctgagactccggagcacctcagcatgaccataaaggcctggcttccttcacatcatttcccatgttcctggggacgctgggcccaggggagagctggcccatctctgtagccgctctgccccacgtgcagtaggagactccgggaatgcctgcttgggcaggatttcagaacacaagttccctttctaccataaacaaagctgtccagcacttcttgtggcaaagactccatttgttgttttattttcccgaattgctccaagcaagaggttcctgacactaaacttgagctcacactatctatcactctcccctagaaatagctgctcactcaaaaattagctgtgcgtggtgatgcgtgcctgtagtaccagctactcagaaggctaaggcaggagccactgcactccagcctggacaacagagcaaaactccttctaaaaaagaaaaaaagaacaggctgggcgcagtggctcacgcctgtaatcccagcactttgggaggccaaggcaggcagatcgcgaggtcaagagatggaggccgggcgcggtggctcacacctgtaatcccagcactttgggaggccgaggcgggcggatcacgaggtcaggagatcgagaccatcccggctaaaacggtgaaaccccgtctctactaaaaatacaaaaaattagccgggcgtagtggcgggcgcctgtagtcccagctacttgggaggctgaggcaggagaatggcgtgaacccgggaggcgaagcttgcagtgagccgagatcccgccactgcactccagcctgggcgacagagcgagactccgtctcaaaaaaaaaaaaaaaaaaaaagagatggggaccatcctggccaacatggtaaaatcctgtctctactaaaaatacaaaaattagccaggcgtggtggcacgcacctgtagtcccagctactcgggaggctgaggcaggagaattgcttgaacctgggaggcggttgcagtgagccgaggtcacgccactgcactccagcctggcaacagagtgagactccatcacacacacacacacacacacacacacacagaacatacaggcaagaggctcagcccccttaaagggggatgtckctctgtccccccagccaggcctccacagttacctttaagcatccatcatcattatcatcctcatcctcatccttcttttttcgcttggcttttttctccttcttgtccttgagtttcttcttcttctttttattcggggagtagtcactgccttcactctccgacttctcttccagatcctcttcattctctgatagctcatcattgctcccctggaaaagaagggggacagtgagggcaacagaggccccaggaacatccagagtcctgggtggcaggacggccctgagagctacctcctggcccacgctggggatcgaccgatccccatcactccactcatcatcagaggccactgctcacagctcagccccaaagcccagccaaaggggcaaccccaagccagcctgagccaagtcttgtccccagggtctacgccacaggaagcagtagaacctgcaggtgaggcgaggtgaggctctcgtgagagcaggcttctccatctgcaagctcggctcagcccactccagcagccctgcgggtgaactcaggctccgcttcagtcatcattgggcttctatggactttgggggctgaattagttttacatgatgaggcatggacccaggagctggcggtggaggatgtggtcccagagtcaaaaagcaaagtgcacaggaagagccccagccagggaagggccccagccagagaagaagagccccagccagggaagggccccagccagggaagggccccagcaagggaagagccccagccagggaagggccccagccagagaagaagagccctagccagggaagggccccagccagagaagggccccagccagagaaggagagccccagccagggaagggccccagccagagaaggagagccccagccagggaagggccccagccagagaaggagagccccagccagggaagggccgctgcatctcaggccccagcgccacagctctctgcttaagttcacatcccatggaactgcgttcgtcaggtgaaacctgtaattaatgcagcaggcacatcacagttttctccatgtgcggactctgcagacactgctatggatggcacaagcccaccttccccctctcccaccccatcctggccgcttcctctccatatgagacaaggtaatttaggcagctcttaagcttggcttccttgatttagtttcctgtctgtacaggcagaaaatggcccatttatatggagataagggcgtttacaaccagagcaccccaccagagaggtgctgcccctcggagaaagtggtttacttgtggcctttagagacrcaagtcaactggcgaagccctccacagccccttcccagggaggggccgggcagcactgccatgatccccggkgcatgcggggcttgccatgcgcaggactgctgttaactgttttcggggtgagcaaggagaggcatgggatgagattaagacagaaccggagagataaaaaatgagctcaggaaacagcagtggccaggagggaggatgaaggaaagagggagggagggagaaggaaaggaaagggtggcagaaggaaagagaatgaggaggcagcaaaggcggggggcctccctggatagtcttgggaggcccccagcccaactctgccctttcaggccacactgtcaagaggggatgacctgccttttcccaggagagtggctccaaacagtcacatccaacagttcgtggagggggagacggtcactgacaggggaggtgggggccccctctgacatccagctgggaagcaccccttccaacaggctgcctgcacttccctcctctcctggaagccccgctccctctcccctgcccaccagcctccctgctcccaaacctcttagcccattaagcctccagagtcagcggcgctgccagctgccaggcagcagggcctctgtgctctttgcttttccggaacccgggtgtttccgggaatactgacacagccactggctgggagcctgctctcaaggctggaggagatgctgggccctggagccacggctcccaagctcggcctcggtcctttggggaggtggagatgagacagtgatgtccacgtcccgttgagggtgtcagagtttggccagcttcaagagaccgcccttcaggagatctgagagacacgctctcccyragccctcaccccagcaaaggtaaggacaagagaggccgccatgaacttcagcaccacggacagaggctggggctggccggaggaaggggccctgggtggccttcagctgctagagagcaaaccccacaaacctaccgaggatgaagtygagggacccacggttaatcctacgtggcctgccagtgagtcccgggctccccagggaggctctgccccttgcaagcctgagacttggccaagtcactgtrgcgagctaaacctcagcttcatcgtctgtgaactgggaatgccagaaaggatagaaccagggagactgtaagaaaatgccttgaggctgggcgcggtgactcacgcttgaaatcccagcactttgggaggccgaggcgggcagatcacctaaggttgggagctcaagactagcctgaccaacttggagaaacactttctctactgaaaaaaaaatacaaaattagctgggcatggtggtacatgcctgcaatcccagctactcaggaggctgaggcaggagaatcgcttgaacctgggaggcggaggttgcagtgagccgagatcgcaccattgtactccagcctgggtaataagagccaaactccatctcaaaaaaaaaaagaaaagaaaagaaagaaaagaaaatgccttgaacatctgtgacmcgggagaaacctaagcacagagaagcagggctctgagccagggtggaggggagggatgggacgtgcacccaggtctccagggctgggccgccttgctgtgtcctgggcaggggactcggccaagccagagcaggctgcagtcagaatgaccctttccccctgacaccaccacgaccacatgtagacaccagaggccgctgggattctgataatgcccagaaaatgcccaaacaacccatgatgaccccagctctgcatggaagccaaagatacagccaggacgacaagctggaggggacacaccaagctcacccccacatttttgctgtcgggattgggctccagccaactgcacagaggctgccagcagctggggcgagaygcggtacagagggagcaggacctggacaagaaggggctgctgtggcaacatctacggggagccaacccagcatctgatggcaagcagtcccctcggcgacctgcaggggagaccaggagtggcggcccagggagagccggaaggagggagggatagggaggggaaggcacctccagcagcctccactgtctggcaggagcagcagcgcatgccaccttgggagagtagggctggcagaaggccatgagcccagcactgacagggctcgcccagcgtccgctcagggttaagtggcagagcaggagggcacagaccctcagcacagaatgggctcagacaacgtcaggcatgtctgttgcccatctgtggccccttccctgctgtcacccactggggctcaggcaagccagcaaagccctcatttcttggaagcaggtgcacttctctccctcctccatccacctgcactggggaaagcccagtcgatgagaagggtctgacgcccaagtccccacctgcctcccctgccctgagcctctgccctgcctccaccacatggagcccgcacagctgggcctcccacctgcaccagatatcacctgaaccctcctcccctaccaggggctggccgagggtgggggtgcagggcagaaccctgcatccagctgttttgacattctagaactaggcctcctttttgtggtgtttttccaaaatctctccttgcagagaaagctgcaaatagttctgaaaacacctagcagagcagtggcccatgagcaggacctggagggacggagcatcatccagcggcaagaaggaaagaaacgatcaagaaccagaggcagattcacagttcagtatctcaaaacatactgagaggctcgtagaccaagccacgtgcaggggaggagacagagacgcagaccaataagtccctaactaagcccccgaaccaacccaaccctaaggtttgagggccatcaaaccacactgcaggcatgaagatacagatgacagttggccttcgaccttggcactgacctttcggctgcagcagccttaggcgtgactacaggggacgccctaccagctagcagaagaatcttagtggatgtggagtccccacatgaactccacctgcaaagctgccttgaatgttatgcccagcctatgtgtgccaggaggcaggggcaggcaggaggggtctctgctctgagcccccaccctgctgagggcacagcatgyggtcgcagccctggggatcccaatggacagtcccgccacccttcctccttcccagctccgcagatgtttcttggcagaggcctcccacctccatctcccttccctctaggcccgatgctccgcacacgcaccgcatctcctaaaaacggagacatttaaactcataaggaagggtgcggagagtgggtcattctccatttggggtccttcaagattgagagggaaaagggaagaatgaaataggagccttcccattcacgagtgttataaacagttataatttagcactgaataattggttgctatggtaaccgctgcagtacaggttgaaatcatttctccctcctgcgctcgctagggtctgacagggagcttcatctacatatgctcaggttccggctgcagcccggttattttatgtaaatcagaatccacgacttgctgccggcctccccccactaacaaactgctgcttgcggcccacctgccctggccccttcaccccgtcatcttggagccacctggttggaggcagagaggggcagaggggtgaaattcccttgtctttatcctggggctcctagtctgccaggcaggtgggcaaaggggcacccggcagctgggccacagtgtgctccagaccccttaagatctgacagctggcccgagccaggctctcaaatgcaggggagggggcacctctggaggcctcttgtccatcccagcccccttccccttccaagaaccagagctgcatctcagtagagagaaggagagagggtgaggaaggggtggagcaaatcaaagagagggagagaaatgagggtacagggggaagagagaaaagacggcaaaggagagagaggagatgccgagaggttaccaaggtggacaccaagcacaggccagagggaatgaccaagtctgagacccagagagagacagacagacaagagccagagagagataaggacctggacaaaaacaaaaacatattgtcagagaaagaagcgggagggaagacctgggccagttggaaaagggaaggctcagcgtgatcatggccctgggaatgagagcgtcggagaaccagccctcccaggtctcaaagaccccctggcccccagcccccaggcctcgcccctgtccaggcgctgcccacctcccaagcctccctagccagggctggtgctgtaccctgagcccaggagacgggaggggagccagccctatctggggaggatgggggctcccacagggctcccacaggtctctgctgcaccccactgggtccttcttctgcatttggaagtcaggcccacccagcccagtggcctgagacccaggcccaggtgacactgcccctcttggcctagactcccacccagcttctaagtcagaggaggtgggcagtgggtgcacaggtaggagtccctgccatggaccacgaggcctcggggtcctaaaatccacatcaccccgagcccatggagcccaggtctgaggagtgagggcggggatggcagcagagcaagattttacagcctccaccagacagtctcggtgtcttcatcccagggccttgcagctccagagccatctaccccatgcccagcacaaagaccgacctctggggccaggggacagcggccacagcagcagaagaggagggcggggctgcagcagggaattcagggagcccctcccaaaggagctggctcacagcctctccttccctgggggagcctccaggcacgcactccccgcttcccctgtcctatctccacttccccatcaaataacagggacagggagcttcaccctctttgagaccccggggaagatgcaagagccgcagagtgcaggcctgggagtctctggggcatgatgggccaggcaggagcctccacacccagctccacagacccgggttcccccttcacctcacaaatcctccccatgcagcccccatgctggcccagtggtaagggggggttcccgggaagggacagacacacatccatcccggacactgtgtcagacggggcacagagctgagggacaacagagaaggcaagcagaattgggcagaggggccagggtctctctaggggaagacagggtggtacacacacagtcacatgcacacacgtgtgtgcacggaggaccagaagggcctggattggctgcaaagcaggtgggggtsgggggcaggggcttggagtggcagcagtgggggtgctgcacaggctctggaccagggggccgtggggcacagtcagagcacactcaggaagctctcccaggagagcccagggctgcagaagccccrcaaggcaggggcygggagagaagggccggtaggaggtgggtgagaggtgctgactgccgcccccagcaaagagcacmggggcggtacacacctggggcaactctggccagagggttggggctaacacctcccagccccatcctttccccagcagtccctgaactccgtggggaccaaggacacagtccagggcgggctctgccctcccaacatccccaggctgacacccagaccagaaaaggaaccacaggctgcaggtagagttcagagccccccaaaatgcctccaagtacccgaacaagccggggaagtggaaatggggcacagacccgaggcccagaggcgaaggcagggaccctcgccccccaccaccaccatctctcccwccccagggccgccaggggagcctgccaggatgtcatgtcatagcagtccctcctctgctcraagccttccagtgatctcaccttgttcacgggacaagaggcccatggtgcaccacccgcaacaggccctcccgaaaccctcacagcacggagtgtctccagcctgggacaagctccccaaacccacccctaagctcttctggcagccacctccccacctcactctgcagggaggcctagatccgggcccagcgctgccaagggcacccccttagcattagcacctcacctcaccaccactgcgcctcaccagctacctccctgggcctctcacttgcaaggtggggccaggccagtcccctctaggcgggggaaagaaaggtggagagctggcctcaggtccccccggggcaggtgggaggggagaaacactcctggcagcggtggctggtggagctgacagccctggattcagatctcagcaccaccactgtgtcactgtgtgaccttgggccagggcacctctgagcccccgctctcatctgtgaagtgaggtgcttgccattgctctcaacatagggtcgcttggaggatcagaggagacgcccagaaggaagcagacagcatatggtgaggaaatggcagacctcagtgtcctagaccaagtaggaaggactttaagctgcaaacccacctcagtttccccatctgccaaccagcgatcatccctcccatgccaccaatttccagggctgatcatgaggatcaagtgagcccgcgtgaagcacagagaagcacactcggaatgtgtcagcagcgtgggaagacaagggacgtgttcacaccatcacaccctgccaacccaaggcagcggagcatgcggcagcctcgcccatccagaaccagccgagaaccagggacaaagtgacgggaatccagaggtcacctgcaggtgactgtccctaaatggggccttgcttctcttctccaactcacttcatcaggtttcagtttagagggacggagtcagctacagagcagggagtggggcagggaggtagggaggcaccgtggcgacggaatccagccctgtccctcgcacaggataggacaacgggaggaaggaaaaatgacgctccgacatcctgctccggaaacaggacagctcagcaacgtcttaaaaaggcttccgtgcacaacgcttcatacgagaaactggttatggtgtttttcatcaaactcagctctcagaaaccctcaaactccaaggtccagggaccccagccctcctctgcggccgggcagatgcagccacaaccccacccgccccaagctcgccggcgcaggtgctgcccctcacctctttcttcttccgcttccctttacacttgttttccttgagcttcttgggtttcttcttcttaggaaggctcacgggctccacagggaaaaagtcatcgaaggcttcaagaccaccatcttcttcttctggaaaaatcagaaggtggcagcagttactcctgagcttcctccaggagagccctggagacacagagccagccctggggaagctgggacccccagacacccaactgtgccaggtcacagctgccctgccctccccaaacccagtgaagtgagagaacacaggacaggagccccagctctagggactgtgtgacatcacctcacctccaggcctttccttccctcctctgtaaatgggacaataaccacctgcccctgataagacagtgttcagaaaactgaacctccatgaacaacaaacagaattgccttgttgccatcactgccggagaaacggagcatctctaccaggaaggagttggggctgatagagcagagtacagacctcagtgaggcccatctctccctccagagagaggaccacagtgtggccaggaggtggctcgagaatgctggacctgccaggcacagtggctcacgcctgtaatcccaacactttgggaggctgaggcgagcagataaccagaggccaggagtctgagaccagcctggccaacacgrtgaaaccccgtctctactaaaaatacaaaaattagctgggcgtggtggtgggcgcctgtaattccaactattcgggaggctgaggctggagaatcgctcaaacccaggaggtggaggttgcagtgagctgggatcgcacaactgccctccagcctgggcaacagagtgagactccatcaaaaaaaaaaaaaaaaaagagagagagagaattgtggagcacagggacactcaagccccaaacctgaggaccccaggggtttgcaggacaaactcagcaaggaagatgccaggataccccatgggtttgagaggatgccaccttaatggagaatccaagaccatatcgtatctcctcgtggatcccgcacctgtgcacacacaggcacacaggtccgcactcccccacctccaacacactcacaacgggaagccaagcgcattccagctgggcactagaaagctgtgacagtccacagagagacgccgtgcccagcacacgtgggtgttcaggactcacctcacctgcactgactcgaaaggccgagggggccctggccgggcaggctcgggaagggagtatgtttgacgacactggccacagtcccaggtctgcctccctcaacctccaacccagaggaagggctgccacatgtcctggggggtgtgacgtgagacccctgctgggacggcagtagcctggggtctgacgctcatctgggaaatcaggatagagaaaaggagttcccacgcaccagatatgagctgtggaggggctgtggggagggtcctcttggcaggcacagcagcaagaatcaaaccatccaaagtagagacacttctgcccgtgggggcaaaggaggcttccagaagggaagaacctccaagagtcctctagaagggcccacgagagagccggcccttcatgccagcctgcggccccagcgccccagccagcttgtcctactcgctctccaccatcccctgtgcactcaggagcrctcaggggaagctgaggggcaaagagaggcccctcagcctcagaccctctgccatggacaccccaggcctgaccttctgtgacagtggagacacaacagggagtgtcactcagagcctgagggttgcctccagtgggaccccgcggaggacgagaggtcctggggccaccaggaggctttcacccaggaagggggcagagtgtccctgctggatcaagtttagagacagagagccccttcccccgaggaagtttttgatcataaccacctacagctggcagtgttggagccaggttcgaacccaggcagtctggtgaccctggtgacccctgggtcaccaaaagggcttcgaggcgacccccagtgtggcccacacgctcagacacactcgccacatgcagacgcacagacatgcatgtgcacccaacactcacctgtcaccctccacacaggcccccaccgcccggcctgggacccccagagagtcctaagcggggaaagggggacaggagggctcctaccctgggtctctggggctcccatggcccacactatgggtgcagctttagccccactgtccccactcctcgggggcaccggggctctggtggctgagcggacgcccctcccacccttgcatcccacggggccaatgtgcaccagtggaaggtgtttgcaccagtggaaggtgggggctgcaccactgtcttggtgcctctctgcaccagggcctccctcaagggtggccaggtgcttggggctcccacacagggagggcaccctgtggagggctagggcacacaggggagccagcagcaagggccgccccaggtgggtttatgtgggtgaggccccaagcagccaggggcaggggctgggctgctccggctgaccccaccccattcctctgatcactagtgtggaaaggcggggatttttcaaaccagctgaaaacgtgcacggggaccccctcggagtcgtcctgcagagcaggtgtcggtggggcagtggcagggctggcggggagctgtctgtggtggggcagccgatgggatgccagtccacaactgcccgctctgccaccgggcctccgcctcccccgccaccgcaggagaccgcctgggcagagccacccccacaccctggcggtgcccagcactgcttatgtaacgggctctggctgatgcaatctcgagggggggcctctccctcctgcttcctcccagctgtccccttccggcagggtggtcccagacttaggaaacccagcccagcacatggtcactgactggtggcctgaccaacagaacggatgagggtatgcacaggtggctgccagaagttctggaaggaagtctgggatctgcccgtgggtaaggggaggacaaagggggacccctgctctggccctaacccacgcccagaacaggccttcgaggacaaggccccagaccctctgcccatggacagaccccagctccgttcccagaagacctcacagcccagggcctctgcctggtgaaacccacctctgagaaggctctggaactggcacacggagacggggactcagccctgcctaaccctgtctctgatgggcccttcctctccccagatggcttctggtgggtggccctgaggtcaccacacgcctgattctctatgacactgccccccccaacacctcacacgctcccgtcttcagccaagccccagcccctttctgcccttggacactctctgctcccgcagcaggtcctgagctttctaaaaccagatctgggggtcaccatacaagcaactgcacggtcagcctttccccaagcccagcctgtgcccttgagcccaccagtccctcctccctatggctccatctggtggggacagagcagaggcccagagggttccaagacgcagagcatgcagccagtgttaaggtggcatcctgcccgtcccgggtgaggggctccagggaggagcaacctcacctcagaactccttgtcctgccagctcctggcccctcgtggctgccccaccaccctcctggcccacctggcagtgccctcatgcaccagccctaaccctccagggcctgaggctccacggatccaagcctgctctaattaagacccattaccctgtgatcacccacctcctgggggtggaggcggggtggggctcaagtcgaccagaggaaggagaggcaccttctgctgctttctccagagctccctcagcccctctctagctcccagtatgcgccagctcagccctgtgggacccccaggctggcctaggctgagccactgcaggctgcggccaggccgatgaggtgggcccttctcagggtagcgcattgcaatagcagcagtcgtgataactgcataccacctgccaggctcgtgccaggcccaaagtacctaggactgattaatttgtatcagttcaacacagcaactcagagaggggtactattctttctggtttggggctttatttatttatttatttattttagagacagagtcgctggctggagtgcagtgttatgatcatggctcactgcaggcctcgacctcctgggctcgagcgaccctcccacctcagcctcctgagcagctgggacaacacgcacaaccaccacacctggctcagggttctattcttatccycatctgcagattgggaaactgaggctcaaaggacctcattatttacctacatctcagtcctacagctggcagtggtgaagctgccastgtttgaacacaggcagtgggcgcccacccccttgcgaagtctctccsccagcaccctcccactgaaacagcccacgctgtgtaaaccggctcggtggatgccctggggacactgaggtgactcaggctggtctgtggtctggcaggtcacaggtccctcaagggggtcaaggctggttcaccacactagtccccctgcacacagccccacagctctgccagacccaggctccagcccctcactcctctggggargggcagcagcagagcaaggacgcagccgccagggcacttggcaaacacaaggtgatcaaaacaaggggaaggcgcgtgactgtggagcgaaagtkaggtcatctgattctgggtggttgaaggatttgcaggggccaagccaggagctgggacgagaacaccatcaccaggttgcaaaggccggcaaacctgccaaggacagggaccccactcaatgtccaccactctctccaggacctggggagaggcgttatttctttttttttttttttagacggactctcgctctgtcacccaggctggagtgcagtggcgcgatctcggctcactgcaagctccgcctcccaggttcacgccattctcctgcctcagcctcccaagtagctgggactacaggtgtccgccaccacacccggctaattttttgtatttttagtagagccagggtttcaccatgttagccaggatggtctcgatctcctgacctmgtgatccacccgcctcggcctcccaaagtgctgggattacaggcatgagccaccgcgcccggccgagaggggctatttctgttccccacctggactccccaaccagcaacaagcagagaacaaggccaccaggaggtcaggaggagggagcaacaggggcagcagaggcttcaagctacccctcctggaggtgataccagcaagtcccctccccactgagcctctctcttcatctgtgaaatgggcctaatgtggcagcctttcccccagggctatggggagaagtaaaaactgtgaatgcaaaggacccacacgatgcctgcaggggctcagcaatggcaggcagagcccagcgagacccaggagggtcagggcggcagtggtgaagggcagagggcagcggtctctagtttggccactgctgggccagaggttctcagggccaccctagacgctggccaaggagttctcaggctgccgttagtcctcgaacctccccccatgagacagggcttatgctggyaaaggggggcagtacaccgcccaagagaggattcataatttatttatgacatttaacaaaacccagacatcacctcattggtgtcacatcaaaagaaagcatcagtcctgagtggggagtggagggaagagacggggatagatgaggcatttaccccaagtgactggggcctggggggagtcaccctgggggtgcagggaaagcagggagaggcccagggcatgggtggggaggaggaggacagaatggtgagaggggaagtcaacctggggggacagggagggacaaaagagagaaaaacggccagacagaaagggagaggcaggggcatgacctcaggggagacgaaaactgacagatatggggacagagggagagagagagacagggaaggagagtgaaataaggacagagccacagagataagcaaaagcccagaaagttagacaacacacattgtgttcagtacccagctcagagaagatattccagaagtctctgatgggtggacggataattgtatagtgaatggatggatggtggataggtggatggatgaatgcatggtggatggatggtgaatagattgatggatgatgaattgatggatagatggtgggtagatggatggatagatggatggatggtgggtggatggatggatggatggatggatggcagatggatggacactggacggatggtggatgggtggatagtggatggatggtggatgggtggatggacgaatggatggtggatagatggtgaatagatggatggatgatgaattgatggatagacggtgggtggaaggatggatggtggatgggtggatggatgaatggatggtggatggatggtgaataagtggatagatggtgaattgatggatggatgatgaattgatggatagatggtgggtggatggatgaatggtggatggaagatggaggatggacggatggataaatggatgaatggatgaatgacggatggatggatgaaagatgaatggatagatggatggatagatggtgggtgggtggatggatggatggtggatgaaggatggatggtgggtgggtggatggatggatggtggatgaaggatggatggatggatggatggatggcagatggatggctgaatggataatggatggatgatggatggatggtgggtggatgaatggtggatgaatggatgagtggatggtggatggatgcatggatggatggtggattgatgaatagatggacaataggtggatggatggatggcagatggatggatggtgggcggatggtgggtggatgaatgagtggtggatgaatggatgagtggatggtggttggatgcgtggttggattgtggattgatggatggatggtgggtggatggatggatggatgcatggatggatggtggatggatgaatgaatggatggtggatggatgaatggatggtggatgaatggatgagtggatggtggatggatgcatggatggatggtggatggatgcatggatggatggtggatagatgaatggatggatgacgggtggatagatggatgaatggtgggtacaggaatggatggatggtgggtggtggatgaatggatggaagcatgaatggtggatgggcagatggatggatggtggatgggcagatggatggatggtggatgggtggatggtggatggacagatgaatgaatggtggatggatggattggaggatggatgaatgaatggtgggaagcatggacagatagtgcatggatgaatagtggataagaagaacaagaacaaatggatggatggatggatggatggatggacggacggacggatggatatacatatggatagataggtggatggtgaatggttacttggttggttttgtgggtcgacgggtagatgtgggagagcaggtagatacatggatacatggatgcatggatggatggatggatggtgggaagcatggacgaatagtgcatggatgaatagtggataggaagaacagatggatggatggatatggtatggatatggattgataggcggatggtgaacggttacttggttggttttgtaggtggatgggtagatgtgggtgggtaggtagatggatggatggatgatgggtgagcgactgaatgaactgataaaatgatagatggatcctattacctgatcaacttggaatgacaatgaataacccactggccaagccactgggcaaagtgtgctggtcattttgtctccctcctcccagaaaagaatgttaaatacaatcaggctccctgggacccccctaccaaaccatgcttccacaggggtaggggtgcaggctaaaatgtcatggccttttgggaatcatgactgtcactctctcctggcccctggacctgaggaagcaagcctaagatacttacacatctagggccaattgtcactggggccagagaggtaacggtgcctagtccagacattgcccattctgggctcactagctttgtctgtgattgaggaaaagctgggccaatgaggcagggaatttgccagcccagcagtggccctaagagggctgagagccacattttctgaagccctctcctgcttcctgccacccctaccttgggcttcacagccctcctcccacccaggctcctactcccctgagcttactggctaaggatgcaagtatcagaagcatttccttggagaaggcaggacagctgccctccttggctggtgctaactacaccagccacagtttattgagcacctatcatgtgctgggcactgtggcctaatgttccacatgcactgtctcactgttcctcataataaccctctatgaggtagccagtgctatgtccccatactacaagtgggcacaccgaggagagggctgcctggcttgtccaagaccactcagctaatgctcagagctagaagccaaggcctcatcccaccagctcttgacccctggcttcaaccagccaccccaactcccaggagaatctggcaactgctggtcccccaaccagaagaggcacccgccctgccttcctcctagaagctggctcagacacctgcctcaatgccagagctggccagggcaaacctccccctccccaccatcactgcacgggaaacaataattcactgctgagagtgagcaactcccagggggaggtgggagatgagcagagtcaaagaaaaaagatcggacaagtcatgagtttaatagccgtagactgaaaaatcatcatgacagcttccaaaacactagctcctccagccacaaacttccatcttttggaaccagctggttctggtctttgggggtcaccgccactgagcttggactcagggctgcataggggctatgaggaagagctcagggtgagtggggggccagcagtgcgacttgacaggaggcctggctagggctgtcttcacagccagaagctggggtgacctagagagtcccagccctcagacactgaaaccacaaccatctctcaggaacgcatggtttcaggtgctgggcatggcaggttatcgagagttacattcgaaggggaacccacagatccaggaggaaactgatgacaacgtttcgagtatgtgaggtgtggtgacacaagcatgtagtcccagctactagggaggttgaggcaggaggatcgcttgagcacaggagttcaaatccagcttgggcaacacagcaagaccccatctcttccaaagaaagcatgacaatgtgtctcagagtgactggaaggcccttagcaagggtgtccctccccatcataacattcgagctgggacctaaatgaccaggaggcagcggtgagcagaggaaagagcaggtcaggcagaggtcacagccagggccccatggcaggatggagcgtggagcgtggagtgttccagaagcagcaaggaggccagcgtggctgctgtgaacaaaggggtacaggagtggacccgggacaagggtttcagaggcgactggagccatgcgggtcgggatctgacttgggttcacgaggtgaccccagctgctgtgcagtgggtggtcagaaggagtgggtagaaggccctggaggggaccggcaggaggggacagaggcttggacccagaacatggagagaagccaggagcctggaaaggctctggaggtggagcagctggccttgctgatggatggggacagaatccccaggccagaggtgccagagcagggcgtctcttctgcagggctctgggggcactcctggaggctctggggccaacccaccgagggggagcacgggtggtgggcaggatgaccagagccccgcctctctggcccaagcagtgagtcgggtgcctactagactgggggcaccttccctggcctcttcccctccccaacctctaagtccccacatagtcagagagagccggagtgtaagatgggaaagacagccaggggactccaccagcgggtcggtgcaaccccagaaatgccactgatcccacaaaagggccacaccccaaacaccataacaaacaacttgctgagaaaaccagtaaactggcttactggggagccagcctcctaggtggaaaatggccactgatttttttttgtgcctgtgcggggcctcagagttcccctccggagaatgggtctaattccaaggacccaggatatgacagtcaactattgtccaggcaactccaccccaagagaggactcccctattccccgtccccagcacgctcgctgccaacttggcctgtctaacaggcgaggtgagtgccgggctcctgtaggagctcagtgacagcattaaagccaccaactaaccaagcaagcaaacagaagggggcagggggtgtggccacctggtgggaataccctccccagaagacgctggctgcttcctccaacaggagctggaggtgtccatttgtggagtcttctcacccctggaagtcagaaggggccagatgcacgttcctgggcccgggagggcctccagcctcccacaagtctctccgaagtccagagaggccacagacttggcgcagggaagccgagaagtaagagtctcccagaaaggagggagggtggctgacagggtggggccctacccagctgtgccaggagggaaaacgtcccaaacaaatggtgagcagttaactaaagaactgtcccgcaaggcaacccctggcgcacagccctgtgtatactaaattctgagagagataaaaggagagagatggtaggggcaggggcggtggccctggggcgtcaggcccgtagccaaggcagggtgggctgggaacggccaccaccctgggcgatggtgaggctggagacagcggcgggcgctaggtcgcgccagaaggacgccggcggcccgggtaaagtgcttgggagcggcggtcacagcgcacagaggccaggaaagaggagcaggggtccgagcccgtgcgtcccagagcggagtcctcctgggccgggagggaagccgccccatcctgggcgctcaacgcgtccccaagcaccgccggtcctcgcccctctctgggccccacccagcccgccccgcggccgacatgggccaggggccgggtcccgcctgcccgcagcgaggccagaggcgcacggcggcgggacgcgagcgcggggtgcgccgctccgggagctagcgcgattcccgcccccttcaagggcacgcgggctgaccctgacagcgccgcgccccccagcgcaggccccggcccgcggtcctctggcccgcctggcccgcgtcgccgcccggggggcccggatcgcaccccgcccttagccgccctcacgccggcccgggcgctcacccagccttcgcccttggccgcgcggcgccagcagggcgggagcgcagccccgcaacccgggtgcccctcctgcgaggcgccagcccggccgcgccgcccccgccgcccgcgctccgccctgggcccggcccgtctcggcgcccccgccgctctggccccaggcgcacccgcgccccgctcacctgacatctcgtcctcattctccatctcctcggcgaacagccgcggcagctcctcctcggtgcccactgggccccgcatgcccggcgcggggaggaggggaggtgggcgccccccctcccgccgggcgcggtgccagccttaacccgtgcgctgccggaccggcgcgcgcggcgggcgaggcggcctcggcgagaagatggcggccgcctgcccccccacccccccaaacctccacccccccgtctcgacccccctttctctcggccgccttagcctgctccccgcaaagcccgggcgctcctcccaccgcgccccgcagcccgagtcccgcagccggccgagggtggcggcggcagcgccagaggcacggcggcacggcgggggggcggcacacatgcccggattgtgacgtccagtctggttgctgtggcaaccccatcccatcgttccggcagcgcgactagttaacagcagagaacaagttgggggactagtcctgagccgccgggtgagggtggggaccggggggcgccccggcagggggagccgtcgaggcgtccgcgcgcccgcggacccgacggccgagcgggcagtcggggcttggcgagcccgggcgcagggggaggcgaggaaacaccgcccccgcgcaccccgggcagagccagccgccgccgctcgcctgcgaaggcgctgggccccgagcccccaagggcgcggaggcagggtcttcagggcagcgcgcggcccgctcccccactcggttcacaggcgccgggacccaccccgctcccggctccggcctcggcacgttcctaaccccctctccaaagaggattagaagaaaaatgtgttccacacttggggaaaagacgctctggagactgtgggtctgatttacagcagaaaaatccgcgcaggcgggctcccctcacctgcttccccgctcccaccgcccacgtgcccccttccaaaaagcccctccaggctgggtgcagctgaaacccatgcagacccctaggggtggtgcggatctgcgatgtctgtgcccaaaactcccgctcagaagcgacacctgtcgcagagcaggaaggagccgccgccaccagccctcggtcgttaaaggtgaagatggaggccaaagccctcgggagcaagactggaattttaaatgagcgcctccagtctccgcggcggcaagtcttaaagctaccttaagaacgcaaaagttccaggggctggccgaccgccagctctctaaccccagaaggcccgtgaagggagggccccctctcactgcctcgcaggggcactgggggaacccacctgagacacgcaggatcggcagcagtttcccttcttcccgttcaattttattgccagcaaaccccaaacaaaagaccctctgcattcatccctgggcaaggagaggtcggtccagccttctggaaccaaagactggggtgttgggaacccctccatctcccagatccgctttaactacgctgtagatagagaagccgggtcagcccagtgctggccgcctgcaaggggaaaggaacactcttcagggaagcaggccaggaaaccaaagggcctcccctcccaaggccgtgtttccccacagagcagctagccagggggagccccagatcaccgaggcttgaaccaaacctgcctcttcctcgttctttccagaccaactgcctccatgaatggtgaccaacaagggaagaaagccctaagctgacacgcccacccctcagttaccagccccccaacacctctctaatccctttcaaaggtcccctgcccttcggtagaaaaactctgatttacaatacttctcatcaccagaaagccgcccccatcattaaccctggctccaattcccaaggcgaggctgaaagtcaagatatcgttcaagaaagaacagttctaactgcttaatctggcaacaaattagagccgagatgctcatcagtcataatcctctccccatcctgttcttcccgatgactgcaactaggtaatattatttaatgtccaaaagcaaaatgaaacaaaaactggaatgctagaaacaaatggatttttttactacaaatctccaggttttttgggttttttttttcaagggggggagttgagatggtgtctgtcgtcaggctggggtgcagtggcgcaatctcagctcactgcaaatctccgcctcccgggttcaagcgattcccctgcctcagcctccccagtagcagctgggactacaggcgcgcaccaccacacctggctaattttttgtattttggtagagacagagtttcaccctgttggccaggatgatctcaatctcctgacctcgtgatccgcctgcctcggcctcccaaagtgctgggattacaggcgtgagccaccatgcccggctctccagtcatttttaaaggtgagcccttattattgttaaactattaaatgggtattttaatgacaacggaccaaaaatgcatgacgttaaaagcaatccctgaaacttgcaactctgcgttgcaagaacaagcctatcattaaggttactgttttaggagacaagattctcatgtttgctgatcatagagctcataattacacctcagtgacaattccaaaatcaaaatattttttaatataccggttacaaaagcatcaaggaaaaaacttttttcggctgggtgcagtggctcacacttgtaatcccagaactttgggatgccgaggcgggcagtcatggatcacctgaggtcaggagttcgagaccagcctggccaacatggagaaaccccatctctactaaaaatacaaaaattagccgggcatggtggcgggcgcctgtaatcccagctgctcgggcgagtgaggcaggagattcgcttcaacccaggaggcagaggttgcagtgagccaagattgcgccactgcactccagcctgggtgacagagcgagactgtctcaaaaatagaaaaaaaaaaaactttttccaagaacagagtggaaaaagctcatcgtcttctgcacataccatactcaatttccattccaggactaaatgaactcctcatccaggaacccccaaggcctgcctgaggccatttcgttcaacaatgcatatccacgctgtggccacctggcaccaccagcttctcaagggcaatgaagtgcttgtacatacaccacctcacagcgagtcacatagatcaaaactctgccccacacctcctcctcggcaggggtgaaacggcgtcactcaggaccgcagtgtcctctgcaatgaaggctcagtgcccacctgctgcaccaagactttcgttgcacttgaaggctttttccgaaagtgtggaccctgcaccacctgaattcaaatcagttggggttgcaggggaggaaggagcttctcaaaaaggcagccctgggccatggccctgaacctgagaaaatccttgtgtaagcctgagaacgttttatgggtgttctctgggttctagctatggtggcagctaactcactccgctggtcagcacagcctttacagactgttttagctgggcccaaaatagcctgggggaaaaaaaagaatgtgtattctcaaatccatcccaaagacaagaaaatggctggatgagaaattcagtttcctgttcctagagataagcactatgattgcaccgtttaacaggcagtcctcacctccttcctgtaggtggagggctacctccttgcagggatggcaaatccccacaccaagcctctcttctaccctcttctccctcaaagagaatcaaccccacagtttattccactaaatacaggcccatcaccacgactcagcgaacaacctgggcaggtgccaacccaggctctccttcagggacctggcccatctctcaccgccgtggtgcccctaccctgcagcttctgactcgtcaccccagtattctgtccaagggttactggggagatggtctgtcccctggaactgccagatctgtaactgtcccacatcctaggtccccctctcctgtgggaggtcttggtttacaatacttgacaagtttaagggtctgagtcccatgtacaaatggaaagtgaaatcaggtgtcaacaccaaattccaggctcccctgacatcaatgacttcaacagccggaccattattccccatcaccagggtccttatcaccctccaggaaatcaagtgtcccctaaaaaggctgagctctagatagccccagatatcaactgtcttaagacacttggtattatccaacttcctcactttccccgtgtttctgaccacctctgtgctacacaccattcatgagcaaagttaggacccacgtatttcaacacctggctgctcctgaaaatgtatgaggacaacagtcctcaaaacccaaacacttcaccactggaagtgccatgggaaaagggggatcagaggctttttggagggaaaacatgaagcctttagaagtgactagttcgtagcacttagtgacatcaacaaacctcatttcctcagctgtaccagcacactcgagggaagggcgtgaaggtgttgtgtaactggcattggctgagacgagaccaacctcctgtttccggactcttatgaacttaaatcacggcttgaaactctccacgaccccagtcagcccctgtgcctcaactattttcgatcaggcaagtgaggtgtgagtcaaaacaaaggaaactggtctacagtgtgctttgggcgcagctggtgtcatggttgtgatggaattcaagttcacactacctattccccatcagaaaacggcatttgctggcaaagttgatccccaggctctggatctggagaaattctacacagagttcagtgacagccaacccctgaatctcactgcggcaaaacagcacaactaagggaagaaaagtggaaataaaggacatcttttcttctaagcctaataaagaccaacgtaactgttggtacagcaactaattcgtgaggacaaagcttttcttcacatgccagtccttaaaaaaaacaaagcctcgtacagtaagagtagccaggtgttagccactttaatagaaaatatgatcaaaactcgattacaagagttcaaaaagacatagaaaaccagtgagtttcaattttattacaagttttcaaatctgggactagtttctttttttcttttaactgaaatgccaacttcagcccagggttttttcacaaccaaactaaaaatgacttactacatgggaacatcaatgcaacaagtagaatttgtaaactcaagccacaaacttagttaataatcatggttaagggacattgccaaagagcaactgatgcctcagtgaagtttgaaagaaactctgctttctgtgacggcagagaagaaatatgcaagcaattctgcttcaaagaaatttgcatagaaatggaaaaatgccagagcctttaacacaagtgaaattgcaaagcctcaacacgttcaactcaatccacagagcaccaaatgtttaatgggagccaaggtaggactgagcattgaacttccagctatgcaactcgcagggcacaatttcaagtgtggaaaccatctgtaggcaagctcttttaaaaacatgaattttagacaccgtaaattctaatgcagacacttttgcattactgtttgaatttcagaagggcaccacaaggcaccagagtctttcaaagtcactcacagcaacaattgcatttttttcccagccttggtagcccctttcagttgtctagcctctgcactgtggcacaccactgacattaaatccagtcatggcctaagtggcatgaggcagctatttccagggcacctcccacctccttggcatgggaggcttcccagtcactcctccttcgtgtcccctctttcaagaacctccagagctcttggcatcaggggcccccattgctgggccccacacgggagaccacatctggaagcactattcctacagctccctctgctggagacgaaagtgacagtttgttgcaaagacctgtagaaacattacttacacgttcatttctgtacacatttagttaatttagaacctgggacttttacaatcgattccccaaacccctttatggcagcaacactgaaggagcacagtttctctctctaggaagaagaggattagcagacataattgtgtgcgtcaagagaaatttgtaatcaaaaaatgaaagtaagacgaatggcccagaaacccgcattttattgacagtcattttcccacagagaatcttagaaagatgtcgcgttttc

SEQ ID NO: 96412 - DNA, 12843 bp, Homo sapiens
gtttgttttctttcccttcttccctatctccttcctctccgtatgcctccttttctccccaattcccaatttgtatttctctcacaactccatcttgtttccaaaaggaggtaaggtacattacaaagattcatataaaaaaagagaaataccacaaagggaaaaccaggagagggttagtacggtatacaaattcatgctgcaaaggcttgcatattttctagaggtgagtcttagaggttgtaccagtttatatcccaattttaagtgggatatgtttgtgaagtatgtttgtcagactttttgatctatgtatatttcacttattaaattagcagttattgtggctttaatttgcatttctcttattagagaggttgagcatcttttcagatgtttaaaagccattagtgtttatgtgttcctggttctgcttatatttctttgttttatgaatattgatgctgtattatttggcccactatctgtttctccctcttaatgtaaacacccttcctgtttttctaaaatagttgtatagcattttaattgattatcattttttccgttatttaaataccattcccagaggggcacatagaatatctcaaattacttttcctctcatgcacaactttttaatttcctcagagtttaattttttcattggttaagtgttcttagttctttactattagttatgtatttatcattgtaaaataccttctatctcatttaatgctttttaccttgatttaaactgtatctcatactaagatcatatcctgttttccttggatagcatttgcccaaaatcttacatttttgtgttctgtgtttgtaagtcacttgttttagatgcagctctgatataatatgtagctgggttttgctctgtgatctaatcagtctatacattctacttatgttgctttaaaaaaatctttatgatccatgtttcctttgccttgttttttgtgattctttggttaatttaaaaggtttccatttttattctaggttatctttatgactataactttatataatcctttaactttctcacttttatttaatatgtttgattcccttccatgagaaatggcaaaactgagtatttttattttacatttatttaaatatttcttgagcacctactgttcttgaggtactattgttctagacattaatgatcagcaatgaacaaaacagatgaaaattcctgcctccatggagattacattctaatacaataaaatacatatttatatctgtgtattgactcattagttttaagtcattactttttccctctggctataaataagttcctatctcaaattatatccccagtcttccatcctgatagttttttgttattcattcctttgctttttgtagtttttttacttatgtatataaacctaaatggcattttatttttgaaaaactgagtagcatgtaccaaccatgctatataagaacaagtccatatgttcccaatattctagtatccaatatcaagtctatataatggcatgttttactttattctaccagcacttttgataacaccctcttgtttcttatagatgagtgatgtgtctgcaggaggagccactgtttttcctgaagttggagctagtgtttggcccaaaaaagtaagcctgtttgttttgtttttggtttattaattttttccctaaggaagagatgcacttgtattcatggtctaattaatgaattacatttttttttctttttcattttttgagacctgttctcgctctgttgcccaggctggagcccagcagtataaacatggctcactgcagctttgacctcctgggttcaagcctcagcctcccaaatagtggggactacaggtgcatgtcaccatgcccagctaatgtttaaattttttgtagagacagtgtctccctgtattgcccaggctggtcttgaactcttgggctcaagtgatcctcccacctcagcttcccaaaatgttgggattacaggcatgaacccctgtgcctgaccaaattacatttttaaaggtatttttatggtccttgccacgagtacttagaggtaatgaatgaccaggaattagtatttaaaatttttcatttctaaaatgggttctgcattgtgttttcccctccatcttgctatgtaagatatgttagctttcttttggcaaatacttttgttgtcaaacatttttatggtatttttcatatgatcaaaaacggttcttaaagtgatataaccatattttcagaattatattagaggaaaataaaatactgctatagagttcttccgcaggaacaaagggaaaattactgctgaaaacggccgggcacggtggctcacgtctgtaatcccagcactttgggaggccaagatgggcggatcatctgaggttaggagttcgagaccagcctgaccaacatggtgaaagcccgtctctactaaaaatacaaaattagccaggcctggtgttgcacgcctgtaatcccagctatttgagacgctgaggcaggagaatcacttcaacctgggaggtggaggttgcagtgagctgagatcgtgccattgcactccagcctgggcgatagagcaagactctgtctcaaaaaaaaaaaaaaagtaataactaccgaaagcaattacctggcattgtatacttggggataattgtgaattgttctccatagggaactgctgttttctggtataatctgtttgccagtggagaaggagattatagtacacggcatgcagcctgtccagtgctagttggcaacaaatggggtaaatatttcatatattctgcgaagataatgtaatttttgtttcttattttggaactattatctgtgtcttaaaaacaaaagcccccatgtttgcttaatatgattttaacattgtacaggattcagccaaacaagtgcctaatcataatacaaatttgaaatcagaattttgatgacagattttatttttaactatttttacttattccaagaaacaatgactgactcaaaattgaataagacaatatcttcccctcaaagggttaataatctgattgagacatactaatggattataatgtagtacatattaatacaaaaatgtaaacagaagatggtgactgcctaagtttggggagtcttcttcaaagctttttctttaaatttggtcctgaagatagaacagcagttttccaaacatgttagataccaggttctaatgtgaggctcgagtagcacctaatgtgcaaaatttaaagaggcactcactctcagtcagggacatgcaagtgcaggaccacatttttaaaaagtaaaaagaaacaggtaaaattagttttaatatctattaattagccccatgtatccatttcaatctgtgttactagccacatgttgagtggttacatacaggacattacaaggttaaggagtgaggcctgatcaggattttaaaatctccccttatgattatagtgtttaagaaccactggactagaatgaggagaggctagttggtgagagagagtttagaaagctgttttctgttgtctaagtgggagatgataatggcctggattaaagcatcagtgaaagggttggagagcaaatagatttgagagagatgtaaggaaaattgtcagggtttgatgaataaagtgtagatacaagggttgaagaaggaaaaagagttaagaattaaggttcctgctttagatattttgactgggttctatggtaccagagacaaaaaaaaaatagaaaattaactgcttttgggatacatttttacatggtatacattttttaaaggtattttggaaacttgatgagcatacaatagcaatggttgataagagagttgttcctttagagtgcaaagtttgtgttcattattgtctttgtattttggaggctgtactttgaaaacaatacataaagcaatattctactcttacctgtacctgtatcttaggtccatttgtgtctcatttcaagcctcacattgaacattggaaactgtaagaaatgcacatagactggcaaatatacatgtgtatacatacatgtatgtacatacacgcacacaagtgtgtacacatatgtatataggtatataaaatctgtgttttcagcatttagccaagtttttaagtagcatctgcctttatccggttttggtgttgaacttttatcccatgatgaaactttgttatagacctagcttttagaaactaattaaatactgattagattaagggggaaaattaatatattacttttctctcacagtatccaataaatggctccatgaacgtggacaagaatttcgaagaccttgtacgttgtcagaattggaatgacaaacaggcttccctttttctcctattgttgtactcttatgtgtctgatatacacatttcctagtcttaactttcaggagtttacaattgactaacactccatgattgattcagtcatgaacctcatcccatgtttcatctgtggacaattgcttactttgtgggttcttttaaaagtaacacgaaatcatcatattgcataaaaccttaaagttctgttggtatcacagaagacaaggcagagtttaaagtgaggaattttatatttaaagaactttttggttggataaaaacataatttgagcatccagttttagtatttcactacatctcagttggtgggtgttaagctagaatgggctgtgtgataggaaacaaatgccttacagatgtgcctaggtgttctgtttacctagtgtcttactctgttttctggatctgaagactagtaataaactaggacactaactgggttccatgtgattgccctttcatatgatcttctaagttgatttttttcctcccaagtcttttttaaagaaagtatactgtattttaccaaccccctctcttttcttttagctcctctgtggtgaattaaacgtacttgagttaaaatatttcgattttttttttttttttaatggaaagtcctgcataacaacactgggccttcttaactaaaatgctcaccacttagcctgtttttttatcccttttttaaaatgacagatgattttgttcaggaattttgctgtttttcttagtgctaataccttgcctcttattcctgctacagcagggtggtaatattggcattctgattaaatactgtgccttaggagactggaagtttaaaaatgtacaagtcctttcagtgatgagggaattgattttttttaaaagtctttttcttagaaagccaaaatgtttgtttttttaagattctgaaatgtgttgtgacaacaatgacctatttatgatcttaaatcttttttaaaaaaatgtttgttttctgtgtggtgtttttcgtatttaaatccgaatgtatgatgtggcagtaacaggttaacttatgtaatttctttagtacatagggcttaggtttatactcttggtttccactcacactaatgtcacatggttaagaaaaacttaggctctctgaagtttcagatatttcatgaatcaagatgtgcttccttcaaagagagctctaaaatactttactgtggttatgaagttattatgggccaggcatggtggctcacgccttcaatcccagcactttgggaggccgaggcaggcggatcacctgaggctaggagttcgagaccagcctggccaacatggtgaaaccccatccctactaaaattaccaaaattagccgggtgtggtggtgcatgcctgtagtcccagctacttgggaggctgaggcaggaaaatcgcttgaacctgggaggcagaggttgcagtgagctgagattgcaccactgcactctagcttgagtgacagagtgactctgtctcaaaaaagaaaaaaattattacaatagtggtacttaagactttctcctattaagaaatatgatgctctttcctaagtggcctgaggtaatctgaaaatggttcgctattcacttgacccggagaaccccacaaaatcatgcaaatcaagaggttccaatcttcgtgttcactttaagaacactcgtgaaactgctcaggccatcaagggtatgtatatacaaaaaggcacgaagtatctgaaagatgtcactttacagaaacagtgcataccattccgacattacaatggtggagttggcaggtgtgcgcaggcaaagcagtggggctggatcttctaagttgatttttttcctcccaagtcctttttaaagaaagtatactgtattttaccaaccccctcttttctcttagctcttctgtggtgaattaaacctacttgagttaaaatatttcggtttttttttttttttttttttttttttttttaacaaagtcctgcataacaacactgggccttcttaactaaaatgctcaccacttagcctgtttgggccacaaggtcggkggcccaaaaagagtgctgaatttttgctgcacgtgcttaaaaacacagagagtaatgctgaacttaagggtagattctctggtcattgagcatatccaagtgaacaaagcacctaagatgcaccaacggacttacagagctcatggattaacccatacatgagctcttcctgccacattgagatgatctttactgaaaaggaacagattgttcctaaaccagaagaggaggttgcccagaagaaaaagatatcccagaagaaactgaagaaacaaaaacttatggcacgggaataaattcagcattaaaataaatgtaattaaaaggaaaaaaaaagaaatatggtgtggtaatagctgtgagcttaatgaagtaagttaattgatgctttagactatttacattacttatggtgaatcctagttcacacaagagttctttatactttatgcagtatttaaatactgaaggaagaatttggtttgattctctgggaaagtaggtatttttacccacttttaagtgaactctgaagctcctttcttctgactagcctttgttccaatataagtgttttagaaatatggagaattaagttcagcactttgatccactcagattttgtgaccattgatgatttttaaaaaaattttttagtaaagtggatggaagcagaaaattcaaaaatgtagacataatataggggttcaaagaatggaaaatactgtttattgccatgtgtgttatagaaagtagaatacaagtgtctttcagaaggaaattacgtattccataatcttacaaatttcattatattcaacttggaaccccacgtgggaattattaaactctttcagaattagatcatacagaaccctttaaagttttataattaccaatgatttttctttccaaatgaaaagagggaaaaatccaatatgaagcttttagttccattactgcaattctgttatttcttttaatgctgaactttcacataaaggagggctggaactaccctggaaaatgtggaaactgttgtttcctcaccaaccctaagcctttccttccatattggaagtttcatcattcattaactaacttttattcttattaactttaaatagggagttatcaccaacatggagttaacggaagtatccaccagaacatcttaacagtggggtaagcaaatgtgataactagatggtaataacctagtaatattataaaaagagcagtgaactgactttacgattctttggaaagctgaatggtaaatgcagtaataaaagaagcaatcatctacctcagtgaaattataataaaatggttattgggcaggcatggtggctcatgcctgtaatcccagcactttgggaggccgaggcaggtggatcatctgagatcaggagtttgagaccagcctggccaacatgttgaaaccccgtctttactaaaaatacaaaaaattagccaggcatggtggcaggtgcccataatcccagctactcaggaggctgaggtgagagaatcacttgaacctgggaggcagaggttgccgtgagctgagatcgcaccagtgcactccagcctgggcaacagagcaagactccgtctcaaaaaaaaataaaatggttattacagtgtgagagtgtggagaagttacaaatagtaaatcaacacatatatataatttataaactaatatatgtgtgtgtgtatataaatgaaatcttattgctgcttaaaagaatctaagtatctttacgtagccatgtgttgactgctatatgtaacttccataccacttaagtccatataactgaaaaatgaacagcttctatgcagagcccaatggactaaactattgaatgactggattgctgttaagaaatttataggctgggcacagtggtgtatgcctgtaatcccagcacactgggaggccaaggtgggaggatctcttgaacccaggaatttgagacctgcctgagcaacatagcaagaccctatctctgctaaaaataaaaaagttacccaggtgtagtggcatatgcctgtggtcccagctacttgagcaggctgaggtgggaggatcccttgagcctgggggtcaaggctgcagtgagctgtgcttgtgccactgtactcaagcctgggcaacagagcaagaccctgtctcaaaaaaaaaaaaaaaaaaaaactgtgattctaaaacacatacaccaaattatgattaattataaatcacttgaacagacagaattatgaaatgaagattgctgggagaaagcagaatgggaaaaatgacatcttaatccagatggccagcaacacaaggaccaatctcttggcggtggttatttttactatagtaaaagttagtgttttagagggaacaatattgggtaacttagacaaaaaggaatgagttaatagagtaccataaattaccagatttatcagaataaaatttcaaaatcctgtgctcctaatgtccttggatattattcaaccactttaatgatattttgcaaaattaactgtagtagaccagtaaaggtctttggctgcctactttctgaaatttgaggactatgaagtttactttctgtgtaaatgtagccttaagttaaatataaatttctactcaggaaaactgatgagaatgccttactgtaaataacatatacaagcagatgttaagtaaaaggagcaaccaaaaggagtggaagtcctccatcgtctgcttttgaggtcttgttgaactttcattgtagcactgttctgttgaaattagttatgtgttgcttaatgagaggaaaatgcatcatcattagaagattgttgttgtgggaacatcacagagtgtacttacacaaacttagatggtatagtctgctacatacctaggctatatgatacagcctattgctcccaggctacaaacctatacagcatgttattgtactgaatactgtaaccagttataacacaaagctaacaatgtatgtatctaaacatagaaaaaggtacagtatagagtattttaatctacaggaccaccaccagataagcagtctgtcactgactgaaatgttaggtggcacatgactgtagtgttatatacaaagcaggataatcacataagaaataaactctaaaatctgaaaaaggaaaacttctcaaattttgtcagttggtcttttcaattcataataggcttatttctaaaagaaatctgttttaggctaagcacttcaaatttggaatagaacattttaaatatagattgatgtacacttttacatttcagtgctttttagggagaaggattgtgtttcaagttagaaaaggcattcacgtaagtccaacaaagagtcagaattatcataatatctactttaagtatagttgaactccattccaatgtgggttttacccaggttttgatatatcatgagtcatatataaaataactacgtatggttaacttataataaaaatctcatcttttgatacatgcatgataaatcattaagtctgagaagacaaaataacttacataacagttgaatttagttatgttctatttttactttgcttttaaaaagcaaaaaagtgaggttctgttacatgaaacaccttttgacttatgagatagatagaaaaaaagtagtccttactaaaaataatcagtgctatctttcccacgttcttttcttatttctgcaactatggagaaaatagtccatgaaaagttcaagtaaggtaatattaaaagtgctctgaaacagtgctagtcagtgtggcttatagatgagctgccgtggggtttcttgtccacaaaggcatttacatcaaaataaaaataaactacatcagtaagtacctccttcatttaattcagttgactttttgtagcaagtctttctagatgaagaaagcagtgttatttacattatagtataaacttctaatctcagtgtaaaccagaacttttcagtagtgttgctcatttccctcccttgaacgggagggaatagagcagaacttatttccagcattctaactcatctgggggcttcttgaaagagtgtgtttcacttaacagagggctcacatggggaaaggcagcatgtctgggaaaagctgcacaacttgaagctgtcaccccaggctgctcccaaggctcagaacacgcctgctaattagtgaaggaaggttgtcctcatcatgaaaccagtctgcaaaaactgggagagatgatttttttttttaattcccatttttccagcagaaaaccacaaggcaaaaacaggaaaacacccattcaaagggagaaaaggtgacagaaactgtctctgaagaaacacagttattaaatacttagaacacctgtcttaagtatgctgaacaagctaaaagaaaacatggacatagaaccagaagtagtcaggaaaatatatgaacaaaatgagaatatcaacaaagagatagaaaaggagcaaaacgaattctggagctgaaatgtacaatacctgagttgaaaaattcacttcaacatcaggctagaattcagattgttccaacattaagatgtaatcctcataactgcaaagaaaatatgtatagaatatagacaaaaggaaaagggtatcaaaaatacgttactaaaaaaaaaaaaaggggggtagggggagccagtaatgaggccaaaaaaaaaaaaaaaaaaaagctgccaggggcagcagcttacacctgatatcaacactttgggaagctgaggcaggaagattgcttgagaccaggaattcgagactagcctgggcaacatagatgccatcttttcaaaaaaattagccaggcgtggtggtacatgcctagtcatagctagtctggaggctgatgcgggagaattgcttgagcctgggaggtcaaggctgcagtgagttgtgcttgtgccactgcatgccagcctgggcaagagagcaagatcctgtctgaaaaaaaaaaatcttaagacatgaaaacaaaaaggcaaagaagttcttccccatcagtgactaaatggattaaaccctgtgatcaaaagatacacattggcataatgcatcaaaaaaaaaaggagctaactagatgctgtcaataagagactcactttagatctagagacacaggttcaatgtaaagggatggaaaaacatattccctgtggaaatcccaatgagggtgctatggttttgcatgtggtttgtccccaccaaaactcatgtttaaatttaattgccaatgtaatggttctgggagcctgggccttaagagataattaagatggattaatgtctttcccatgagactgggttagtcgagactcttgcaaaagcatgttgtcgttaagtgggtcatcctcctttgtcctgtctcttttatatacacttctttccccttctacttttccaccctattatgaagcaccgtgaagccctcaccagatgccaccaccatgcccttgtaattcccagcttccagaactgtaagcccagtaaatttccttataaattacccagtcttaggtattctgttacagctacagaaaagactaagatttttgcagaaataggaaaatccatcctaaaataaggaatctcaagggattctgaatagccaacaatcttggtaaagaataatattggaggtctcacatgtcctgatttcaaaacttaaactacaaagctacagtaatcaaaactggtactggcataaagacacatagacagattagagagcccagaaatccttgtaattcaatagcaaaacaattaaaaatgggcaaaggacttgaataggcatttctccaaagaagatacacaaacatccaataaacacatgacaagatgctcaatatcactagtcattagggaaatgaaaatcaaaactataataccatgtcgggattactattattaaaaaatagataataagtgttggctagaatgtggaaaaatcggaaccttttcattactagggggaatgtaaaatggtgcaggcactgtggaaagtggcatgacagcttttcaaaaaattatacagttaacatatgatccagcatttccacctctggaattgtataccccaaagaaatgaaaacagggactcaaagaagtatttgtacatcatgttcatagtagcattattcacagtaactgtaagtggatgcagttaagttgtacatagacaggtgaatggataattgttgtgtatacacatacataatacagacaatgttcagctaaaagaggaaggaaattctaacgtttctttaacatgcatgaa

SEQ ID NO: 96413 - DNA, 39934 bp, Homo sapiens
aactacttgggaggctgaggcaagaggatcacttcagcccaggagttgaaggctgcaaaataataataataataataagataaataaggaaataaataaaaatttaaaacccccaaagaaaaatttctgtctacagtttagctttggggttatgattcttcatcattaattaactaggtaactgtattagtctgttctcacactgttataaataactagctaagactgggtaatttatgaagaaaagaggcttaattgactcatagttctgcaggcttaacaggaagcatggctaagaggcctcaggaaacttacaatcatggcagaaggcaaaggggaagcaagcacatcttaccatggcggagcaggagagagcaagcatgaaatggggaggcaccacacacttttaaaccatgagatctcatgagaactcactcactattatgagaacagcaagggggaaattcactcccatgacccaatcacctcccaccaggcccctcctccaattagacatgagatttgggcagggacacaaatccagaccatatcagtaactaatcaaacattttatagtggtttttaaatattagtaagacatagttcttttaaatctagcatagataattaatatataagaaatgggttgggtacgatggctcatgcctgtaatcccagcactttcggaggctgaggcaggcggatcacaaggtcaagagattgagaccatcctggccaacatggtgaaaccccatctctactaaaaatacaaaaaactagctgggcgtggtggtgcatgcctgtagttccagctactcaggaggctaaggcaggagacttgcttgaaccccagaggcggaggttgcaatgggctgagattgcgccactgcactccagcctggcgacagagtgagactccatctcaagaaaaaaagaaaaaaaatatgatgaaacatgattaagtgctatgaaagccaaattgatcagaactggatcaaatgctatgacgcccggaggacagcatgcctaactctgctttacgaagatgacatgtgaagaggtcttaaaggatgataggactctgtgagcagagaatctgttggaagatatttcaggaacaatatgaacaagtcaagaacatggaatgaagcctgttaaggaagtaacgggtacttccgtatggctgaggcatatgattgtggaggcaggcagaggaagataagatgaaaatggtaggtagggaccaattgtgaggggccttatatggtgtgatcggactttagaattcatcctgtaggcactgaggagccattgaaagtttttgagcagggaattatctgtacagataggattaatttagaaagatactctttcagttacagtagtttggtaaaatgcagtaaaagcctgaacgaagacagtgatcaggaggggaaatgagggtatctactcatgagatattactcatgagacatttcagatgtagaattgttagggcttaagttgagagtggtgggtaggaagaggaaggaaggcgtttagtatgactcagatttcttggttggagaacagatggatgctcatgctatcaattacctttatagagaatgaaggggaaaggtggatttcggtggtggataaaatagtgaatttgcttttgcacatgctgaatttgagatacatgtggggatatttaggtagaggtgataccagagcttaggagaagagtggagactagagatcaagatttggatgtttacctaggagagaatatatactcagcagaagagataaacaaggacaaaatcctataaaacaaataaacaaacctcagtatcttataagaagtagaagaggagggaagccagcaaagggggccaaggagtcaaactatccattgacttgacaatctatgagatgatagtgtcctaactcagataagtgatctgaaagacagattgcagagaggcagtgggcaaatgggaggagaaaatccagaggcaggcaagacagccttctttttaagaaatgtgtattttttttaaaaatggagggtggtggttagaattattgttaaattgtgcaggagacagcaggctgatgcagtgaagctcaggtcttgttaattttcatcatttagcagtggtggacatttgaaaggatataactcatgcttactgagtgaatgtttagaatattctcatcttctctatgtcctctttatcagtggaccttgttgttgtctctctttggctttgtcatcttgatcctctttgctatttaccctttttctgactcgtgaaccttgtattgctcctacatctgttctagttggatagaccctgtgcttctttcaagctagatataatcgtattcctttgtagtgtcatatatgggctcattagagaggaaaagctttctgtgagtcatttagtctgatacccttgtataagaccctatttcatttaaatgataacttctagtgaagatgggtatcttttcaaaatatttaacacttgtaggtatttgtaatcatgtaaaaatggcatgataactggaggagataggcaaatgtatcagttcattcttgcattgctataaagaaatacctgagactgggtaatttataaagaaaagaggtttaactgacccacgtttccacaggctgtacagaagtatggctggggaggcctcaggaaacttacaatcatggcagaaggtgcaggggaagcagtcatgtcttacaaggctggagcaggagtaagagggaggatggagggaggtgctacacacttttaaacaaccagatttcatgatagctcactcattatcatgaggacagcacccagggggatggtgttaaaccatacatgaaggatccacccccatgatccaatcacctcccaataggccccacctccaacactggggaatacaattcaacatgagatttgggtggggacacagatccaaaccatatcagcaaatattgctgcagtatgtcctaaaagataagggggatgaaaactttaggaaaccctctgaggaagagaatcagttgattattatatgtttcctagagaaaatcaaaagcttgtctacagtgttatttagaaagctaactgttcttattttgagcattgaaccttatacttttagagaaaattgtactgattaatatgttagtaactacttaattgtctgcagtaataatattacattgggtacaactaaaagcttcatccagaagattctattttagggcattgagaatcagataattatttgtgagtgtgtatgatatgtccttatggtaatcaccactttctttctcccaccccaactgtcttttctcctttaggtgaaatcccaattgttccacttaattttgtcatgatatccctggagggtccatttaacagagatgtagtggaaggatgtgtgaaggagacgttgctttttttatcgcgttccatttccatgaaacaaaatgtggagtttacattcaaaggaattggggtcctcatgatcagagacagcaaagtgaagatgaggttttataaagacttcctttgtaccatggatggaagtggggctttggcaaaggccctagcaaatgtaaattaatattttccttctcctaagtcttctcctaattgtggttctgactcatctataggtgtgttgtaattaagaaaaacgaaggttgacatattttgagtgacagttacctgaagtacatggaagtgcttgtttatacttgattaactctttgacaaaaaagatcaggaaggcaaaggaacattaagaatcaaagtcaattgagggatataaatagtaacggaaactcttagaattctgaacattttatagtaccttataggttttttgtttgttttttgagacagagtctcactccgtcacccaggctggagtgcagtggcacgatgttggctcactgcaacctccacatgccgggtttgagtgattctcctgcctcagcctctcaagtacctggaattacaggtgcgcgccaccatgcccagctaatttttgtatttttagtagagacaaagtttcaccatgttggccaggctggtctcgaactcctggtctcaagtgatctgcctgccttgacctcccaaagtgctgagattacaggcatgagcctccatgcctggcgtatggtttaaaaacttcttccacatgtattatttcatttgagcctcaaaatagcatacaagcagcattattatcatcctaattttacaattgagaaaagtaggggctcagagaggctatgtgggaatcccaaggtgaactagaactggaattcaagcccagacttcctaaccacttggtttttgctggttctactattttattttttaatgttggttctactattttattttaatgaaagttctataacaaaatctaatttgagtcatggagtttttgaatctttagcttttaatttgccatgttgtagaagaaatttcctaattggcatcattattgtcaaccattaagtagctggtgtgaccttcatgctaagttggatacagcagagtttaaacaaatgaaatagtcaatctaccagacttactgaatacttagtgtgcctcaggtactcctctggaaactaacaaagtagacatgaatgaattgaattattatggaatgttatataatcctatatcccataaagccaaactctgatttttttaatgaaaaggctattaatatcatctcagtctacccatttctccttttatgaagctttgggatggggatttaggaaatgaagttgtgcataatgaaactcctggtgttttctacacaatctggtttcatacaggattgctaagaggattgccaaccctgtgtgtggaaagtgggaaacacatgcaggaaaaacccttgcttttccatgaaaacacaaggcaagatttgcaagtccataagcaaggccaaagtggctagctcatctctaaccctcagggattctgctgaactttgtagcttcaatacgtgtttaaaagagaagacagcattttccttgacctgctgaactgtaaagcacatcttttacagaacgttttccaaaagaactagtcctgaaaaatactctatgaaaaaagggtttggaggtcaaagctgactgaaaactgctgatcgaatcagtcaccctcatggacagagggacagagcacatcagcatgttaaaggagctgagaagtctggctggaaagcagtcagtttaactgcctgaatgtatttaatcatggaattgtaggttaatccaatatctcattagctctgtaagacacattttggaaaactgctgtgaagtggtgtgagtgagagtttattcccaaatgacccgtaacttaaaactgtcttgtagggtagtccccttggaaagctgtgtgcttatttcagtaatgctgcttttattagaaatattttctatacttctttttgggaattcacttcaaaggcttttgtaagtgatagcattcatgcaaaaataataattttatatattattctacagttaaaatgtgacaatgtgactattatgtttacagttacatgagaattaaaatagtcatttgttcagtatttactatgtgctagctacttacatagaggacctcatggaagtgctattagatccttttattatccccagaaacctagtgcctaaggccacatgcctgttagcagtgtggggatttgaacatgagcccacctgactcgaaagcttttctcttaattgcctaattttagttatttgggtcaagagtggaattagacagcttgctcactttccagatatttttacaaagtctgctatcttcttaaagacatctaaaagaatctgtcaactctgaaggcaattccctaaaaggaaatggtttgagaaaaggcaacaccgaaagaattgctgtgcagctacccagggtgattgctctgatgaatgagatcattcctcattggatttttaagctctggacttataagcgcttaacataaacaacaacaagaaaagtatygtggtagccttgcctatgagcctgcagtttttaatttgtctgagtcctggacctcagcctagatgtaaccttgctctgttgctgtcctctagaggcctggcactgtggactcggtgttgtctagcagagmggccttgaggaagtggcccagcagtgtgcttgcgtttccaaggtgagtgctttgcttcacgggttcctctaggcactagcactccttgctgatctgctgatctcattgggcagtgtttctcaatgttttgtagctcatgttccttttaatgtattctgtctgtctctccctctctaaatccaccaacaaagaagagtttattgcatacactttctgtagttaagttaaataacaatggacatttattcttttttatcccccctcaccgcgacggagtcttgctctgtcacccaggctggagtgcagtggcacgatctctgctcactgcaacctcggtctcctgggttcaagcaattctctcctgcctcagcctttggagtagctgagattacaggcgcacgccaccatgcctggctaatttttgtacttttagtagagatgaggtttcaccatataggccaggctggtctcgaactcctggtctcaagtgatccatccgcctcggcctcccaaagtgctgaaattacaggcgtgagccaccaggcctggcccatttactcttttttaaaactacccttggctcctggaaattctgatactaccttccattaaccttagtccctgcagtattagtaaaactcttctcacctgctgaactttccactactttgtaccacttcttctgccctagctgctgcttcttccttcagttcagcccatttcctgtccttgctcggatttttaccactaaacgggttaaacagataagttagaataaggaaacagctttactccatgagcacagtggttgttactggtggttgcatattactgtatttaatcttcacgacaaccatgtgacttatgtattataattctccattttatcatgatacaaaattaattttaatttttttcttttacatgaatgaagcaacatggtgcactattgagaacactggagtaggagtcaggagactttagttttatttccagtttggccatcacttattcattgtgtgcccttaattatgttaataatcttaattgctgtgccattaaccactgtgcatttcaggtggaggaagtttggggaataacaactagcttcctaaagcattattactttaggaagtatgagtaaagtataaaagtatgagaatttctgagatgttttgagtgtgacattctcttgtttgttgctttggaacaaccccctcctggaagagctgtatgacacatacctcagaagattcagtgtgaagtccagagtaagccttagaggttgttttccaaccgcctcatcttgcacacgaaatggccatgcaactaataagcagccaagcttatagaaataaaaccatggctcctggtccagtgttctttccattgcaccrtattgccttactcactaaaaataaatcagtggattgaaaagaattttattttgatggtttcggaaggcaaacatggctgttccctttgacatattttggcttaggcactccaggagggaaataattatagtgggtcaaagaacagagatggagtcgccatcaagtcaagggcctagaaatggacatggggacttaaatactcaaaacaattgttggtgttttatttatgtgacatttggcccctgaattgactgaaggtacccccacccccactccctactccaacctagtactccatacctgaggccaaagaaatcctacaactacacacaccaactgaacatcccccttcctccctgctgcaaattgtagctttgcaagtccttcacttttgcctggggagagaatgatgaagtgaagtggcaaaggagggaggagacaaatggttattttggggcatactctaccaggctatgaatctttgccttcaagctatccaacaaccttttttccactgtatcaccccatagcatctagttaaagaagtaggatataaaaattcaaattgaaacaaaaaccaataacctaaataaaggactttaaggcaatttctctatatgcaagctgctttgagactatggtatagagggaaaggccttggtcrgcttccagaaagccttggagaaaattaatctatgatatgtacttagcacatcagagcactcaccccttgaagaaagtgggcttatttcagaatcagccagctggctgggttgcttccaaaacttgagagttcacacagttacctgttcaggttcagtgcagcagaaaaacatattggctcattcctaggattgagctcaaggagatggaaaacaaactgcctatggagacccttgtagaagaatgtggagagaatagagaaaggaagtgcaagttaaaagaccagtcagacaaagaagaaggcaccagaggtaggccaatgatttctgggtccaatctgtcactctttactgctatgagcccagccatattgcttagcccaaggtaaataaagttaaatttacaaataatcactatattattattacttttttttttgagatggagtctcgctgttgcccaggctgtagtgcagtggcataatctcagctcactgcaacttccacctcccaggttcaagcgactctcctgcctcagcctcccgagcagctgagattaccatcatgtgccaccatgcctggttaatttctttatcttttgtatagatgggccaggctggtctcaaactcctggcctgaagtgatccgcccacctaggccatccaaagtgctgggattacaggcatgaaccaccgcacccagccacaaataatcactatattatttctaacaaatacgttctattcctagaatcctgcatttgaccttaattatgagcttacttactttatgagccttagatcctatgactctcaggctcttagatcatcatctctttgctggctccccattgctcaaaggggccaaaactcagatgactgcaggcaggtaacgcaaatgcaggaagtggtctggatgtaagtgggttggagacatgttagcttagttaacatttctaatgaaaaacaaagagtggcagttttatcactttgatgtctgtagaagaaagctggattctcatacctatgtctgcatctaatctgttgtgataggttgttttggtggaagcaaatgaagaaaatcctaggactccaaagattttttttttttttaaccaaagactttttattttctttttgagatggagtctcgctctgtcactcaggctggagttcagtggcacaatctgggctcactgcaacctccgcctcctgggttcaggtgattctcctgcgtccaagctattctcctgcatcagcctccctggaagtagctgggactacaggcgcgcaccaccacgcccagctaatttttgtatttttagtagagatggggtttcaccgtattggccaggctggtctcaaactcctgacttcaggtgatccgcctgccttggcctcccagagtgctacaattacaggtgggagccaccacacgcagccacagacattttgaaagggtcctagggaccccaaaaagtatggcttgccaggccacactttgaggactgttcctctagcagattgttgctttgcggaaatgtggcccaagtgatatcagatcttctaatttttctaattttactatatgtgctactaaagtgagcacaatcttctgatttttcaaaagaagcagagatcctgactttaatgtaaaatctattggctgttaaawgttgacgacttttgttgatattgaaacaaaaaatgctaattaggccaaacaaaacataccaatgggtgaacattggcttgtgcatgtctgttttctacgtgtggcctacaggattgcatatcaacttttagcctaatattcatatgcttttatttctctagtctcatctcccactgtgccctatagagaccccttttttgggaaaaattatctattcatgttcttctttttctttgaggtggggtcttgctctgtcacccagggtggagtgcactgtcttggctcactgcagcctcaacctcttgggctcaggtgatcctcccacctcagcctcctgagtagctaggaccacaggtgtgcgccaccatgcctggmtaatttttgtactttttgtagaaacagggttttgccatgtcgcctaggctggttttgaactcctgagctcaaacgatctgcccacctcggcctcccaaagtgttgggattacaggcgtgagccactatgcttggcctattcatgctcttctaacatgcctgcccttccccaacttcatccttttgttcattttttttttcctgcagcctgaattgtccttccttttctttcaatctatctccatcctactcaccttttagtacccttttcacatctcactttctccatgaaaacttatcactgaattctgaagtggcttctctcctctgaacatatcagatccttaaagactacracatttggctgggcatggtggctcacgcctgtaatcccagcactttgggaggctgaggtgggtggatcacctgaggtcaggagttcgaagccagcctggccgacatggcgaaaccccatctctactactactacaaaaaaaaaaaagttagctgggagtagtggtgtgcacctgttattccagctacttgggaggctgaggtgggagaattgctagaacctgggaggcagaagttgcaatgagctgagattgggttactgcactccagcctgggcgacagagtcagactccatctcaaaaaaaaaaaaaaaaaagaaaaagactgcaacatttatttgtgacttatacattttgcatcactstcctaagttgttatttattaaatgtatattataaagcacttagcactgttagcacataagatgacctccaaatgggagctctcacttttttgtttgtatcttatttttctcttcaactatatctatcgaaagatctttacaggcaaaatgtctaaatctacagatatcaaagttgtaaaactaccactgttcatttttcatgagaaatgttaactaaactaacacgtctcctggtcatgttatatccagcccacttcctgcatttatgttattgcctctttttgtcctctaaatgcttagcacagtgctttctttgcgaatatacagcaaaaacatttttttataccacaatagaayaaggggtgattatttaaagataagagagtgtatcttatatgaaaatttcccttggtaaaaactacacagttagtggtttgagagttgaaaggagactcgttttcwttcattctttattctacagatatctcatcacccmaaagacttcgagatagacmagctttgttccctgccmaagtgacaaatgtcagcttgctggaaaagtttgaacgaagtgagagtggtgggaagattatgacccctgaaaggtaatgcattgacttttttttttctgttgtactttactaaatatatttttgagtcgttgcttgatgcggggaactgtaattgttcattaattcatttatccagtgttctttagagctttctatatgcaacatgatgggaataataaaggtgaccaaggttcaccatctagtgggaaagccagacatatgcagagggataaattacgattcagtggaatagatgttatgacacaggcggaaacaaaatagcacagagttgggatcatccaactttttctgtagatttgggcttcccaaatctacaaaactttcatgttttccgagtgcttgsatattatgatgtgacacaatgttatatttacatcaaattggaaagtagttttgccaaacatagccagcactccattagttctcaataaacattacttgaatgaatgagtgtattacaatttatcatggtcgttttcttcttgtgatggtatgtcaaaagatttctaaaatattttatccttctctctgagtaggatactttttaagacctcaaatcagtcaaccatactcaaccatgctcattcattgtttactgagcacctaactatgtactttgcattgtgctgccaacctttaatttattaatgtgtcaaaatttatcagctatcatatgtgcaatttatgtactttgtggattactaaagtcatgttaaaaactctaggaatgcttgttttggataatatcactgttatgaaagataattgagaattagatgtatagtacttgggaatttaattcaatacaacaaatattgagcaccaccatgtgccaggtaatattctaggcactgaagattcagagttacagatgtataaacctgcttttataaaacttacagtsttgcaggaagactgaaattaaaaaaaaaatgcatgcgaygaagacaacaaaagtacagaggctgcaaaaggacagagtaattgttggaagtggttggtaaaggtttcctatagaagttgactcaaaaatgtttgtttcctgtagaagttaaccaaaaaataggccaggcgcagtggctcacgcctgtaatcccagcactttgggaggccgaggcaggcggatcacgaggtcaggaaatcaagactatcctggctaacacggtgaaactctgtctctactaaaataaaaaaaattacccgggtgtggtggtgagcgcctgtaatcccagctacatgggaggctgaggcaggagaatggcgtgaacccgggaggtggagsttgcagtgagccaagatagtgccactgctctctagcctgggtgacagagcaagactctgtctcaaaaaaaaaaaaaaaaaaagaagttaaccaaaaaatgtttttttgtgctgattactaaaacaacacgtttatcatagaaattttgagaaaaccaaaaaagcaagagttataaaaaatcacccataatccctctacatagaggaaactttatattaaccttatgatgtatgtcgtttatttcaatgcatatacaatatatacagatacttacacttggaatatacacagtttttaaataaaattgagatattatatggatttttgttacatttaataagtggtgatttccccatgacattaaatattctaaaaccttaacaaataattgcacatcatcttaatgaaaggttaaaccttttgtttaaccaatctcctattggatatttagatggcttccagtttttaagtactataaataatgttgtgaaaatataattaaacataattccttgcatacaactggatattccataggataaaaactttaaagttaaatttcagagataagaggtgagtccattttcatgcctttgatacacatttccaattatcttcttcatggttgtagcaaattatcctctcagcaacagtaatatgagagagtgctatattttctacagctttgctaataccatagcaaagtgaaatgatggtatttcattattgtttttaacctatgtttgtttgatttctagtgggtttttttgttttgttttgtttttgagatagcatctcactctgtcaccaaggctaaagaacagtggcatgatcatggctcactgcagcctcaacctgctgggctcaagtgattttcctgcctcagaccccgagtagctgggactataggtgtgcaccaccacacaccagctaattttttgatttttttttttttttttttttgtagagatggggtcttagtatgttgtgtaggctggtctaraactcctggcctcaagcaatcctcccacttcggtctctcaaagtgctgggattacaggcatgagccaccacacctggcctgcatttatttttatcttgtttcttggccatttgtagttcttttacagttttcctgcttgaatcctgtgtccttttttaactgggagctttactttttcttaaaaaaaagttgtatttttataaagagaacttcatatatcataagtatgaatagttttctgatgtrtatgttttaaacattttcccaattcttttttttctttttaattttgtttctgcaccatttagtgcacagaagtttaaaatatatcttttctgatttaccaacctgtccaagtccccaaacaccatgtttgggaatgtcagtccatgattacattttcattttgaaaaaaatattcttttagaagagtaaagaatgatttagagggataagattagcagcagaggaagaggtgtaataaaatggaaaagtgtagcacaatttagcagatcaaggcagtagtctaggcaatctgtttccaacaaatgaccctaaggcctcagagggccttaagagcatatcaaaggctgagagtgaggtaatatgggtgggactctgggctctatttcctcacttccactggaggatgtgtgctgtttttctgttttatattattgggatttgagtaacatttgtttaaactaagaaggataggactttcattgtttaacagttgagtataactcgtttggggaaaggtaataagggtatgaaacaaagatcagatggaaagctttasstttgttggggattagttaagggaggttaagaaggagatgtcaaagatgaccccagattttggcttaggtaactgggagaagatggcaccattattcaaaatagggactactataggaagtgcaaatttggctggtgctgaagggcatgtagtggttagtgagtctgtaaaattttcactccgagttagaggattaaaaaaaatacaaatgaatcctcttggatcataagaaaccagattgagacatatttcttattacttcctcatgtcagttgcatctgacaggttatttaaatcaaacctttagggaatcagcattcgccccaccccagattttgaggcctaagagaagttattaaaaaataaagtgttctgcttatagcaatatggtggtctaaataatctgaaaaggtcctctactgagagccaaatctagtccaccatatatttttataaacagtttcaccgaaacactgctatgcccatccatttgcatattatctgtacctgctagttgtgtcagggactgtatggccctcaaagcctaaaacattcactctctggctgttttcataaaaagttttgcaacccctgctctaaaggatcttattttcatctcaggctcctgacttctgacagatggagttgggctaaaaatgaagtcagaatccaaaattacaaagaccacatggaaataagctgccacataatgagagccatcagaaacaaaagatggaagaattgagctctcaaggattgtggatcctgaatattataaaatacagaatatagaataagatgtttaaaatctttacataaattaaaagaatggagagtatgaacaaggtataagaaattagaaaacatgaccagtgtggtcagagtcgagcatttgcattttggaattgcagtaagggagtgtagacttatacaatacttaattcattggttattcagaagacacattttattactttttccaaatgaatagaggtttgtagtggggcgctttctcattttatgctgtggttcatttaatgttagttatttggtactttgtaatttgctgaaccttcttttctagcttgagtacttttacagtaattgttttatgtatacttgaagacattgtatactactattccttagatgtaaatttctagatatttagatattagctaaaccttgttaaaataagttgttaaaagcttttaaatcctcactatttttttctttgagagagatattaaaaatctttcaccatgatggtatatttttcagtaattacatcaatttttgcttcttaagcaatattaaattctacatgtctaggattttttttggtagatagttccttttatcattatgaaatattttccttcatctctactaaaatcttttgccttcatttctgtactatgtaattaacagtgcaacatctgattagtatttacctggaatagccttttaatgccattttaagaatttttgtgtgtgttttattatttcatgtgtgtctctactaaatagcttatatttggatgttttaaaactcaatctagactttaatttcagttgtaattattggtatatttgaacctatctttactgtcttattttgtattttctatttactgtgcatttaacttcattattaccccttttctgttggactgatctcatttctttagtatgctttgaatttcctttgaccatgtttcttcagtatgctttcaatttccttcaaactgtatccccttccaaacctgtattttttttgtctagaacttttgttccaatttggttttaagtgttaaaacattttgtattattttatggtcaatgattaatttggatttgtcaacatgttttaccaatttctttggtcaccatcatttcttcttttttcttttttttttttttttgcccaggctggagcgcagtggcgtgatcttggctcaccgcaacctccgcctcccacgctcaaccaattctcctgcttcagcctcctgagtagttgggattacaggcgcacaccatcatgcctggctaatttttgtatttttagcggagacagggtttcaccatgttggccaggctggtctcgagctcctgacctcaagttatccacctgcctcggcctcccaaagtgctggtattacaggtgtgggccgccatgcctggcctgtttcttatatccctgtccttcctcctaggttcatttttcttcttgctaaagtatatcctgtaatggttccctgtcttttcagtacacttattctttgtattgcttaaaatgattcttactgtgttgtcgctcttgagtgctgattcttggttcacagttattttccttcagcattttaatgatattgctccattttctcctgacagttgtcctgatgcaacgtccgaatcaatctggttgtcattctttcttgtagcttttaagaatctttcttatttcttgatgttctgcatgactattcttaggagtcatgattttctggaaaattcttatctgttattttctagaatattgttctttgccatttcctttattctaaaaawtcagcacttctattaaatgcatgtttgagcttctgaatctgttctctatttctctacttttaaatattttcattcttggcctggcgcggtggctcatgcctgtaatcccagcactttgggaggccgaggtgggcagaccactaggtcaggagtccgagaccagcctgaccaatatggtgaaaccccgtctctactaaaaatacaaaaattagcccagcatggtggtgtgcacctgtaatcccagctactcaggaggccgaggcaggagaatcacttgaacttgggaggcagaggttgcagtgagctgagattgcgccattgcactccagcctgggtgacagagcgagactctgtctcaaaaaataaaataacataaataaaattaaaaaataaatattttcattcttcgagctgctttttaggtgatactatctgtcctattttctaatgaattaatactagtattaatattaatactcacccctaattcatctccctccaccacactgaccataggcaccttccacctgaaggactgcactggtttgtttgcttggaatgtcttttccatcagatatctacactgttgttctcttacttccttcaggtatttactcctatgtcacttccttggtaagaacttccctggccattctctttacagtttaacactccattcctccagcattgcaaggcatttatcatcatggaacatactatagagtgcacttatttatcttgtcactgggctgtctatccccatcagaatgttaattccatgagggcagggacttttgtatgtgtgtattttgttcttcattgcttctcctgtgcttagaacagtgtacatggtaagcactcaatacatttctgtggaatgaatacatttcatccccatttcacatgactggtaactgggactttgcaagattacacagctggtctgatgtcagtcatcttgcaagcaagaaagctgggattcaaacccacctttatctgacacaaattcagattctgtgrtacatattcttaacctctatacatatagctgttttgaagtaaaccactgaaatatttttcttcatcttatacttgcctctaaaattattattgcccttgaggtcagattgtattaaacattaattaatgttgcattgtttttatagcttatcatatccaagttgtctgaaacamgacagtgagatgaagccccaaacatctccagcttgccaggatcataacaaggcaggacaggtacagtgtttccaaacaaataagtcccatcagaatcttatactgatttttgtttctcaaagagagttctgggaatctctcttccttaattatatgagtatggctcaagtactcaagtactcaggctcaaaactagactgtgataaatctatctactagtcaagatgtactggtaaacaaaaaaagagttgagaaatccctttctaagtttcagctgctataaatacttctgatgaagtgagagttcagaagatcctttagagtatttctggggtccactctgcaaatctcattttgctgtcactaatatatccattaataataggtttcttgatatacctagcctttggagagcttgtgaagggaatgcgaaagcaaaaaggtaaaatgtaaaaatttatttgtcctgaaatttgggattgtaggaaatgtgctatgtatgtttgcaacgagcacaacgaaattccctgttgtactacagtgaggaaaggaggagagagatagaagatgagagactcatacagcagtatcagatgttaaaggatcaggaggctctcttcagacaccaggtagtccaacacctcgattagtctttaatatggggcaatagaacatgattatataatgtaatttattattattttttattggcrcagggtctcactctgtcacccaggttggaatgcagtggcacaacctctgctcactgyagccttgacctacttgggctcagatgatccttcgacctcagcctccagattagctgggactacaggcacacgtcactacacctggctaatttatgtattttttgtagagacagggtttcaccatgttgcccagggtggtctccaactcctgggctcaagcatccagaggctccaactcccgcctctgcctcccaaagtgctgggattacaggcattacccactgagcccagcctataatgtaatttaaaaatgttccatcatatgtctgtactgtgggatatctaatcacgtatttactgttagactaaaacttgcgttgaagttttcactaataataaacaacactgggatgaattccatgcagtcgaatgtttgcacatatcactgattttctttaacctaaggtctgaattttaaaggtggaattattggatttatgtttctttatttctgataaaatataactctggtgaaggcttttacccttcagattcatgtcctatttcaagcaaagacagaatggcacttttacacttgctgtatccagatttatgtggtgtctaataattgaccctgctgcctgccctttcctgcatttgtgatgaattcttccattccttagatccctctagtggtggtacctaaaggccaagaaaaggaaataaaatacctttcccmatctacttttataaatctatagagatatcagaaagtaccmctgcctccmaaaggcaggtttctaccatggctggattattttaatgtaatagaattaaaatttttgggggctccacttcaatatgtaatttaaaatttaaaaataaactttttttttttttaaacaatagatgaaaagtctggctactagagaacagaatcagaaaaatgctgcctataatcttggagttgctgaagctataagaaaccacaagaatgagaaaccggaattttatgtaagtcttttaaaaatttcygttgctaacacctggcccatctgtgagcctttggatccactccctgtgttgcaggttgtgccttattttttatttttattttttgagatggagtcttgctccgtcacccaggctgcagtgcaatggtgtggtctcagctcactgcaactctgcctcccgggttcaagtcattctcctgcctcagcctcccgagtagctgggattacaggcacccgccaccatgccccgctatttttgtatttttagtagagacagggtttcgccatgttggccaggctggtcttgaactcctggtctcatgatctgcccgtcttggcctcccaaagtgctgggattacaagtgtgagccaccatgcccagccagttgtgccattttttttaagcagcggagttgaaaagtgggtggtgcagtttgaagctttcttctagggcaggtgttgtccagtgtctatagccacaccactcacattcactgtaccattcctactagtcactgcaggtcttgttaattatggtaattctcaaccaggacgtgggatgggtggagaggagggagcagtatactactaaagtccagcccaaggacctaagagaaccagcagtatcagcattgcctgggaacttgctggaaatgctgaatctagggcctcaccccagactccctgaatgggcatctatggtggaataacatccccaggtgatttgtatttgcattaatgtttgagaaactcagattcagatggtggtgagccaactgcttcactgcttgttttaatgttttcaatcatcatgtgcctacctttatttctgcctgaatcttcctctttatatatcaccatctaggtagtcgacactccggacataaatcwaataaattataatttatttattcatcatcaaacatttattgaattcctccaggccagccactgtgctggtgtctaggaatacaaggttccctcttctgaagaggtctctagtgggagagacagacacttaaagagacaactgtgtggtataataaatgcratgataaatctctgaaaaaagggcactatatgagcaaaagaagagattcattaacctagaccagagatctggaaagactttctgacatacaagagttaggtaaagaaatcaagggaggaagagcattccaggcagggaaacagggaaggaaggagagagcgagcgagcatggggcttctgaaatttaggcatgatctttctctctctttatatataagctccagattatatttattactgctgtgtatctcttctttgatatatctatacacatcttaaatttaaaaagacctaaacagaacttttgattccctccttaacctgttcctttctgtcttctcatgttagtaagtggcatcaccaaccagccatttttgcacaaacctgtatttagtcatgatcacaatattcctttctctgttcctgacttccgatcatttgcaagtccagttgcctttacctccaaaatgtatccaatayctgtccaaatgtcttcatctttaatgytgccacactgaaagtgttgccaagccacattgttatgctcaacttctccaatacttcccttagattcactgcttgcattcttgctctcctataatttattctccacacaccagccaaagtgatattataatattgttaaccaaaacatactattctcccatttaaaacctccactggcctcccattgagttaaaatgaaatttagactcctcaccttcaactatcaaattctacacgctttgactcctgccttcctcttggtcactatgccttctcctttcccttggtcactatgcctcagccacagagactttttttctgctcattgaacatgcctagcttgtttccatctagtgtctttgcgcttaatgttccttctgtatggaacacgggtctccctgatatttacagtgaaggtgattcattttctccatggaaaaaccttccctaataaccaaccagtttagctcttttcccacccagccacttgctatcataagggcttcctagcacttagcactatcttaaatgacctgatgtaccgtttcttgctcattgtctgtctcctgcatcagcatgcaggcttgatgagtgcgaagatctctgttgttgctcactgttggatcaccagggtctagaatggccaggcccacagtaggtattcagtttgccctcctttcagctcctctctgtccttgcatgatttcgcatgcactcagaattccttcttccttccatctggatgttgtaaatgctaactcacaacctactccaggagtcctttttcatctctgtctcagcaatgggattccagttgaaactgacccaatagtcccacagacaggttttgtttttgtttttgttttaaataaacatagaaattgacccttttggtcttaaagcttgaaacttaacattgttttatctgagtttcttcctcagaaaagaaccactaggccttccaaaaagtgtcaaagaattgaaactcaccagatgattgcattcagacaatgagccaggcccctccattgaccatgattgcttccttatccctcccgaattctggttttcccatayatagtttcaattcttccctgctatataaacccctacttttagttggtcaaggagatggatttgagactgatctctcatctccttggctacagcacccaattaaatccttcttccytggcaataatcattgtctcagtgattggctttctgtgctgtgagcacctagaccaaacccctggtgttttggtaacacagctcagctcagcttcatccttgaacacactcatatgattctatgtgttacctcaacaccagctggtccgtgtgttgagggctgggcaaatattataaattaagaaatactttctgatttatyttagtcttctgaattattaaccttgtttttcagtactctagcataaatgaattgcttctctttcattctagaaatccttcctatttgacaaacggccactcagtccygcrcttaatgctcttaagcaagaggaatattcccggagtctcctgaaacaaatggataacagacaggaaaacgaaataaagcaaagacaatrcagagagttgatggacmgcctggaacaagtgcaactcacagaggagtgagtccagctacacacgctctgacaaatggatttggaattttcatgtgaagttacttttcatgtaggattgaatcagcattggtagtttcattagcacactgtaaccaactgagcaaactaacccagttagcagccagtactgaaatgggaaaagttccctcgtccccctcgcagggcatgcagtgggggtgtggcttgcttcttcagtgccctgctgctcaaacctctaggagagcatacagatgggcaggctgtggggctctggccacacggcagtatctaggggtgaatgtttacagctcctgaagccccagtgggcatgtgttacagagtgctcttttagtttagccatctgtaggtggcttgtgttagtcagcgcaatagacccctgtcttatcacaaggagagagggctttctgtatccgagggttcttgccttggtgtaccagaagaattggatcacatgtgggcttggagaatgagtgcaaggttttattgagtggaagtagctttcaacagatggatgagccagaaaggagatggtattcccctgagtcgggctgctgtgcggcccgggttcccctccaaccaccccagccaaactccacgtcattccactggttgatggcctgctgatgtgctctggacatcctctcagcatccagccacttgtgtgttcctctgctgatgtgtttctctcgacgtccagccgcttgtgtgcctgcctgctagggtcttgggggatttttataggcacaggatgggggtgtggcaggccagggtggtcttgagaaatgcaacatttaggcaggaaaacaaaaatgcctgtcctcatctaggtccgtgggcacagatggaaccctagccagggaccatgtcctagggtggagccctagccagggaccatgccctttccccacttccatatcgtttaaagggaccacgctcttcccttcccagcacttcccttctgtatcagtaccacaattttttattacaaaaatgaaaaagctgtcatagttatcattatggtagtgatggtcaatctgtaattactataatatagagcatcattttgtattgtttttgcaatcgccaataccagtagatgaagaaagggactcgtcttgagcagctgttcttagctattagatgttcaaatgacctcatggcaaagctgaggttttattataattatgtaggggtgtcccatggaacctgagggcaggaatgtacagggaacataggaaggactggaaccagagactaaaaatccatgtagagcggctttccctctgcttacatacatatgcctaagggggcccacatttttgctgctgagattgggagagcaactatggaggccattatagtgtgaacagaaactcctaaaacaaataagaagcaagtttctgtgatgaaaaaaatctatttctataaaatgtatatgttccattatactcacttgaaagatcatatatgggttctttagaagttacatataatagaaccataatttttaataggataggtaacttaagagatttcaaaataaatcagtttatagaatgaatagtcacttcctgctttcttatgtagatttttaaaagaactggtgggtgtgggaagaggtggagtggtggtgatgtgtctgctgttttagtagtaaggcatttggacaatatggtcggtcacctgcctatacttgtttgtcctgtgttcagcacattgttcactagcgtatggaatttttttttttttttagatggagtctcactctgttgcccaggctggagtgcagtggtgtgattttggcttactgcaacctccacctcccaggttcatgcaattctcctgcctcagcctcctgagtagctgggattacaggcacccaccaccacccccggctaattcttgtatttttagtagagatagggtttcaccatgttggccaggttggtctcggactcctgacctcaagtgatctgcccacttcagcctcccaaagtgctgggattacacacatgagccactgtgcctggccgcctatggatttgaattactcttttctttcttaaaatgaaagctaccagaataaaacatcaatttttatttaccagactcttgttcctatttaatacttattaaacatgttttgatgatgttaatccatattactaaagactgcaaaactgtggtccatcttctcttgttcttaactgccagacttgctgcgcaaagagcgaaatttttaaaagataagatggaagaaacacagtgttacaagagagctttggatgcacaggtaaggggacagacaaatattatttttaaaattatgcaatgcatcaataacatcctaaaatatgtgtaagttgttacgaatatttttatgtgttatgcatttggtagtttttgtgccccgcattccttcctgtaagatgctggtattttaccacattacagggttgtgcataaagcttattccctggtagaatgataacctgcattatgtgtatctctgtttaagataaagaacaaaccctctcggctgcccccctttgagccagactcctctgagcccatctttggtaagaatgagggtgaactgatggtggaaaagcaaaagcgagaacaaaattacatgaaacaccagctggaggcagctgctaaccacaagaggaaagccatcctgcatcaactagtggaccasaggcgggatttgcaaatgcktcagaggacacaaagagagtaaggagacccctgatctttctccctccacttctcctcacttattccgcttcctttatctctctttttccaccctgtccctgcccctcatctttctcatacaatagtggagaaataagaataatagctaacacactgaggagttatttgtgcaaggcattgttttaaacttattacatgcttcatcttgttttatcttaattcattatatgaagaaaatgttattaaataaatttttaaaaacctctcttgacactttagtgttttccaaagtggctgtactactttacattcccaaccaatagcatatgagagttctagtcctccccatcattcccagaacttggtgtaatcagtctttattttattttattgattgagacagggttttgctctgtcacccaggctggagtgcagtggcatgatcatggctcactgcagcctcaacatcctggactcgagcagttctcccacctcagcctctggagtagctgggactataggcgagtgccagcacgcccagctaatttttaaactttttggggagacagggtctcactatgttacccaggctggtcttgaacttcagggttcaagcaatcctcctgcctcagcttcccaaagtgttgggattacaggtgtgagccacagcacccagcctgatcagtctttttaattttggctgttctaacaggtgcatagtggtgtctcatgctttaatttggatttctttaatgactagtgatgttgaacatcatttcatgtgcctatttgccatccgtgtatcttctttggttaagggtataatgtatcaatccaaatcttttgcttattttataaactcttttcttattgttgagttttgaaagttctttatatattctgtatataagtcctttatctgatatatttgtaaagcctaaacatgcctgaaaggaagatgtctttcccactgattttttaaaaaaatttattcccttaggtaagcattcagctcctctttagcttctgttttataacagcagaaccaccatcacttgtcccatagtgggaagcaaagtgtgctttccatagccagatatgggaccctctgtatttgttgctaagactattgctacttcctcttctgcttctatctgttggcttctctagttatttcctaaacttggagggttaaagtgtcacttttaagttgtatgacttgggccagatcacatgtaaggtctctgagccttattgtcctcatatgagaaagaaggataatcacatctgcccctcctaaccttactgggagaattagatgagattatgtatgtgagagcattttcggaaactgtaaagctctgaacacatccctgtttctgtattggtcagatccttgttttctatttacatattctttactggttatggcagattctctcacttcccttatcttttccaactccctggtccttctctggttcatcttaacatgtgatctcagattgtcttgtgactcatagaaggccactttctttcagaggggataatttagtcagggtgatccagacaggactgctaagctatttatacttgttttttttctttttgctcttattttcaaaagtaacaattcatgctcattaaaagaagtcaattgaaggttagccgggcacggtggctcatgcctgtaatcctagcactttgggagaccgaggcaggcagatcacttgagcccaggagtttgagaccagcctgggcaacatggtgaaaccccgtcattactaaaaatacaaaaattagctgggcgtgttggtgtgcgcctgtaatcccagctattcgggtggctgaggcacaagaatgcttgaacctgggaggcagaggttgcagtgagctgagattgcgccactgcacttcagcctgggcgacagagattgcctcaaaaaaaaaaaaaaaaggttaataatctcccctactaagtagccaatacatatgtgcatattgcttaaataggaaaattttttaaattttttttgtaaaaaataatttaaaagtaggttacatattaaccttaattatttataaaaaaatttaaacaatttttcctttttaagcaatatgcacayatatttttccttctacttttgtaaatgaaatagtctatgagatcttatatattactctgcaaactaatctttctttaacctagcaatgtcatatacaactcagtacatatatatgagattcattcttctttaatagcagcatattatctataatatagatgtataataatttaacttttgcattattgatgaacattcactttgkttccagatattttgtattaaacatttttaatatatatttttatactggttcttttgtttctatcagataaattcccaaaagtggggctgctgtgtccaatgtacggtacatctaattttcctttttttttttgtttttttgagacagagtctcactctgtcgcccaggctggagtgcagtggtgcgatcttggctcactgaaacctctgcctcctgggttcaagtgattctcatgcctcagcctcatgagtagctgggactacaggtgcatgccaccactcctggctaatgtatgatacatttgaaatattaccagaaactgacagttacatttctaagaaggcatagcaactygcttctcagcaatgttgtgagaatgctagttgtcccctgcacaatctctgcctcattttcttactttctgggcatttaaaattattttaacctatccttaaaaaaataacataataatggccaacaagcaaatgaaaaaatgattaacaccacaaattattatgaaagtgcaaaccacaatcacagtgagataccatgtcacatccatcaggatagctactatgaaaaaaaataacacgcgttagtgagaagtagaaacctttgtgtactgttggtgcaaacataaaatggtacagttgctatggaaaacagtatggtggttcctcaaaaaattaaaaatagaactactgtatcatccagtaattccccttctggatatgtattcaaaaaaattgaaagctgatctcaaaagatatctgtacagccatgttcatagcagcactttttgtaacagccaagaagtagaagcatcccaggtgtccaccgacagatgaatggataaacaaaatgtagtgtgggtatatatatacactgtacaatggaattgttattcacttttaaaaaggaagaaagttctaacacatgctacactgtggatgaccctcaaggtcattatgttaagtgaaataaacaagtcacaaaaagacaaaatactgtatgactccacttatatgagttatccagagaagtaaaattcatagaaacagaaagtagaatgttggttgccaagggctagaggaggcagaaatggggagttgtttaatgggtgtagttttagttttgtaacgtgaaggcgttctggagattgggtgcataacatgaatgtatttaacactaagtaactgtacacttggaaatggttaagatagtaaattttgttatgtgtttttttaaaccacaaaaaaaaaatctacgaaaagaaaaataacttatgaaaaaagtaataggtactctttagtcattgagctccagttacatgataggcactggcacttcctgtgtatcatttagtctttataataaccatacaatagctgttcaatcaatgcttgttagatgaaaaggtgtgccgtttaaggaaaaagtgagacagtatagaggacattaactgatttttattggaggatcctgacacccagtggtcgttggtacctgtaacacaaagcccttcagagcaggctacatcaacagttacattttgtgaagctccttctagatttcagtgagaactgacagcaaaggtttcagtttagcaagaaatagacacataatcagaaccaggcttaaggtgattcacaacagtagtgatggagtgtttggagaccagtgatagaaacacaacactgggaatatctccctttgaagacagagattatactgcagtcacttcttcgatgacatggccttcaccaaacattcctgttttattttcttgccttcttcacaatgttaatgttttctctattttcttttcccttgcttagtcacttgtgtttattttctctttttgtagactttcatttgtatayctatctattttgccttgtaatatgtctgcagtgactggtaggctgagtactggcagctgagaggctggactaaaaggaaagaaacagagtataggaaatccatttgggatgattcttcagataagttaaattagcctcaaaggaaattaatggttttacaggttgaagttgttaactggaaaaaggtttcaatcctattaaatcaaaccaggattgaagataaaagacctttgayccataaattatttgagagctaggaatttcagtatgcttttacagtgttcatgctttttagtatatttcagagtagtgaacaaaaccagaaggttttttttgtttaacataaaaggaatggggctcccaaatttggtgcatgctcttccaagtattatggagccaggctgttcttttctctccaggcacttggcagacagaaccgctgagctggagcgagtaaatagagtcaaccaatgcttacaggaggactgggaaaggagtgctgcgatgaagaagcagcgagacctggaggacaaggcttttgaacggtaatgcctgattggaaccccaaaattctcctgctccttgtgggacagcaacaggtttcaagtggaactccacttgattagcagtggctgcctagagaaccttgtggagaaagcaagtctgtattccatgggaaatactgccgtgattgattagaaatgtctgttacagacatgggattggagaatgctgagttgtatgctaggtatttactaaccgtgctctaatatttgcctctgcttagggtggctttatttgctttttgtggagagtgaagattctctttggaaataactatttggaagtagggggagtgagtttccaatctgaacgttttcaaggcttagagaatcgttatttaagagcagggtcaggggttgtaagattggcaattggaaaagtaagatgcctattatggagccaaccaagagcatctttctgaaattattatatgcctgcccaatcctcagcttaaatattcacatcactactgttgtattacatcttgaaaaaaaattaaaatacgaatgtaaggtatgattttatagcatgttaaaaatgtgatgaaacagatcaagtctatacaatcaagttattaaaacccaaatataccaaaataatagtttaaattgccaattatcagtttttaatcatggataaaatttgtagaatggatcttgatctgtaactctccttttccttttaggttttcttgtaaagcatttctcacctgtctttctaatgagtagaacccatattttgtgacaatgaaagtatgagtgatgacgtggaaaataggttccaaaggagaagtggactcatttggcttagagaaaaggagaggaaagggcagttggggatttcaattttctcagtgatttgggaaggcaggtaaaagtcagtgagattaatgccagggagattttagttgtgtctaggaagagtgcttggccaacatggtgataaaggactgaggagacacaggaaataatgttgagtggcaggctaacaaatctactcctggtatatcgtggagcagacttctctgaggacctaggccaagtgtggacagagacttgagcacgcagcagtagcaagaaggaattggttggcacaaaaagaaaataaagcaaaagtaaaaccaaagtccatatgtatgcagttagcacatgatactctgttccattaccaagccaggtaggtcttcccctgctcacttccaaggtagtttattcttttttcttttaagactgcccttgataatccttttttttttgagatggtgtctcactctgtcgcacaggctggagtgcagtggcgcgatctcggctcactgcaagctccgtctcctgggttcatgccattctcctgcctcagcatcccgactagctggggctacaggcgcctgccaccaggcctggctaattttttgtgttttttagtagagacagggtttcaccgtgttagccaggatggtcttgatctcctgacctcgcaatccgcccgcctcggcctcccaaagtgctgggattacaggcgtaagccaccgcgcccggccgatcatccttcttaaacagaattctggctggatgccatggctcatgcctgtaatcacagcactttaggaggctgaggcagatggattgctagagttcagaagtttgagaccagcctgagcaaacatggtgaaaccccatctctaccaaaagtacaaaaattagctgggtgtggtggtgcacacctgtcattccagctactctggaggctgaggtgggaggatcgctggagcccaggaagtcgaggctgcagtgagctgtgatcgcacactccaggctggtgacagagggagacctagtctcaaaaaaaaaaaaaaaaatccmcccatggagaaattttgatggggtagaggagcacatgagggactgttttgcgtaacgaagaaaaaccatcaaaggggaaagtcagttactactgcctctttatttctgcttttagttgcttttgtcttcctctttgtctccactccctctcctgcccttaactctccagaggcttctggcctcctgggatagttcattgtaagtcctctcaactctctgctgttgttagctgataaccagcaacttaatggttgatctgcctctcaaatactgtctcccaggagctcaacaggtagaggtgtaatccacgtgggaaagcagtcaacagagaggctttggagccactgtctgctggctgtgtgaccttcggcaagttctctgtgggcttgggtggttgaggctggggaggggtagggtcagactgttgtgaaggcacaagtcgyggctttttatttagtagagaacgacaagccagcagaagtctggaagcagggratgccaggatggggtgaactgcagcatacaggcagagaacgcaaggtgtcacttttcttttgtgtacctcctgccataccagcttccaagttgggcctccaggaactccaggaacctgctgatcggcatttgctctcctctcctcagggcttcagacaagctgtttctcctagaccagtgtgagaagtatcggcgctgcaagcaatgccagaggcgcacctccaacgtgggcgagagcaacctgtggcccctgaacaagttcctgcctggctcccggttgcttgtgtaaaactcaaagtttggctcttcgtttccyggggaaagtttttatcttttacrtgtttgggggtgattgtgaaactgcgtatttttacctcagagaaaaaaatcattgtttaggtttggtgctttcattagattgcttgttaagcccttattgaattcactcctgctttcctcccacccccarttatttcctatactagtttctgatggcagtgaaggtgtctgaatggtcctgagggctagaacctgctgcacaggggctgggaatgggatccagcttcattatggctgctggggtgctgctgacccagccctgctgctgctccatgactttgtgtacaaaacttttttcatctgtaatgaatagtggcaataataaatattttttaagcgcctgactgtgcatgacaattcataatggtacattttacccctccctcttcccccagtcctagacttttccagaggggtatatgtgtgaatatcacagagatgggttagactatttacccccaggaggccagaacaatgctccctgagttttctcattgatgacatacctgggactttagtgggccttcccaagatatcattcccttgtccagctatttctacacccttggagtaactgtgcactgtgaggtgagtctcccactacttcacttgcattcattcttaagctgtaggtgctgttcaagaggacttaactccctgtcagaggactgactttcagttaaggtatggctgttctcaactaaaaactttcttcgtttatcttcatacttttgtaatgcccaaccttgtttttactaaccctgtttttagactctcccttttcctttaatcacctagccttgtttccacgtgaattgactctcccttagctaagagagccagacagactctatcttggctctttcactggcagccccttcctgaaggacttaacttgtgcaagctgcacatccaagaatgcaattaactgataagatactgtggcgagcaatatccacaattcccaggaattcgtctgactgataacgcccaaagccctgagtctatcaccttgtaatagtcttaaagcccctgcacctggaactgtttactttcctgtaaccatttatccttttagctttttgcctactttatttctgtaaaattgttttaactagacccccttcccctttctaaaccaaagtataaaagaaaatctagccccttcttcggggctgagagaactttgagcgttagccgtctcttggccactggctaaataaaccgactcttaatttgtctcaaagtgtggcgttttctctaacttgctcaggtacaacactttcttctcctctccctgccctgtctgaccaattgaagtaaaacagagtgaagtctagatttctgaaatacaaaagctaagaaggatgtcttttagactatttgctttctgcccgccacatctctcccttgggaaataagggaaagtttttgtgggaagatgtttgtgaacatttaaactttcattttgccctacaaatacaaaataggaatgtgttgagccctgaataattgtggagaaaatattcactcaagctgatattgggcaaattttgttgctaatgttatctttttctatgaaaacaagcatacctgctgatgatcacaattttttggaacgtcttccctaatctttctccgtttctgcctttcatttcctcaaaaaatcattctatggagggccaatcatcattaaccaatatttaaaacaataggctttccccaagactgcctgacctgcctgaatctatatctgctgcacccttgaagtaatttgtttctaatatataataaattactataatagtgttgtactaatatattttaaaaatatagaatgctggccgggtgcagtggcacatgcctgtaatcccagcactttgggaggccgaggcgggtggatcaaatcttttgacgaggtcaaaagattgagaccatcctggccaacatggtgaaaccctgtctctactaaaaatacaaaaattagctgggtgtggtggcacgcgcctgtagtcccagctactcaggaggctgaggcaggagaattgcttgaacctgagaggtggacattgcagtgaaccgagatcgtgccactgtactgcagcctggtgacagagcgagactctgtctcaaaaaaaaaaaagaattccttgttaaagaaaaaaaagttaattttggtatgttcaggtgagcagatttaacttcatagaccttttcactggaggaattgaacttacaatttactgtcataggtagcagtcagtactacagtcagaccctttaaaaactatttttaaaaattatatattgacaaattatttgtaatatttatgttgtatatatttatggggtataaagtgatattgtgatttttgaatacaatgtggaataattaaatcaagtgaattaaaatgtccatcaccttatttaactttttgtgataagaatatttaaaatttattcttttagtgatattgacatgtacagtgctcattatattcaccacactgtgcaacagatctcaaaaatatatcaaagttggcttggcgtggtggctcatgcctgtaatcccagcactttcggaggccgaggcaggcagatcacctgaggtgaggagttcgagacgagcctagccaacatggtgaaactctgtctctactaaaaatacaaaaaattagctgggcgttgtggcatgcacctgtagtcccagctactcaagaagctgaggcaggaaaatcacttgaatccaggaggcagaggttgcagtgagctgagatcatgtcaccacactccaacctgagtgacagagccagactctgtctcaaaaaaaaaaaaatcaaacttttttttcctgaggctttgtacaattcaactatcatctcgtcattcctcccatcccccaccctctgggaactatcattctactctccacttatatgagttgtagattccacatatgagaacatgtggtatttgtttgtgtttggtgtatttcacttagcataatattctccaatgctatccacatatcctttttatgtctttaagatcaactattttttagcttccacatatgagtgagaacattcagtgtttaactttctgttcttggcttatttctctcagttccagttccatccatgttgccataaatgacagcatttcattctttttcatggctgaatattattccattgtgtatatataccacattttctttatttattcatctattgttggacacttggttgattccatatcttggctgttgtgaatagtgctgcaatgaacatctcttttgatatattcatatttgacttcaaatctttgggacaaataaccagaagtgagattgctgggtcatatggtaactgtatttttagttttttgaggaatcttcatacagtgtttcataatggctgtactaatttatatctcccaccaacggtgtacaagggttccctttttcccatatcttagccagcacttgttatcttttatctttttgataatagcctttctaatacatgtgaagtggtagctatttgtagttttaattttcatctctctaatgactagtgatgttgggcatttttttgtgtatttgttagccattcacatgtcttcttttgagaaatgtttattcaggttccttgcccatgtctcttttttttttttaatagagttgagttccttacatattttggatattaatcccttatcatatgtatgggttgcaaatatttttctcccaatctgtaggttttctcttcactctactaattgctctctttgttgtgtagcaattttttattttgatgtaatcccatttgtccacttttgcaaatgttgcctgcatttttgggtcaaatctaaaaaatcattgcccagaccaatgtcatgtagttttccctgtgttttcttctagtagttttacagtttcaggttttatgtttatgtctttaattcattttgagttgatttttgtatatggtgtgagataagggtccaatttcattctcttgtctatggatatccagttttcccagcaccatttatagaataacttgtccttttcccattgtatattcttggcacttttggtgaatattaattggctgtagatacatggtttcatttctgggttctttattctgtccattggttcaaatgtctattttaatgccagtatcatgctgttttaattactatcagtttgtagtatagtttgaaattaggtagtgtgatacctcaagctttgttctttttgctcatgattgccttggctgttttgtagttccatattaattttaggattgttttttctatatctatgaaaaataacattggaattttgatattgaactgaatctgcacatcattcatgtagtatggacattttaacaatattaattcttccagtccatgaacatgggatatatttcaatttatttgtcttcttcagtttcttttattaatgttttacagttttctttgtataaatctttcgcctcattggttaaacatattcctcagtattttatttctagtagctactgtaaatgatatgttctcttgatttcttttttggaaagttcattgttaatgtaaagaaatgttactgacttttgtgtgttgattttgtatcctgcaactttcctgaatttgttgatcaattctaatggctttttgttaaaacctttagggtttttttctttttgtagagatggggtctcactatgttgaccaggctggtttcaaactcctggccttaagtgatcctcctgccttggtttcccaaagggttggaattacaggcttgagccaccacacttggccttaggttttctgtatgcaaaattatgttgtcagcaaataacagtagttttatttcttcatttcctacttggatgtcttttctttctttcttctgcttcattgctctaaggactttcaatattacattgaacagaagtggcaagagtgcacatccttgacatccttggtccagatcttagaagaaagagttccaagtttttactgttgagtataatgttagctgtaggcttattatatatggcctttattgtgctgaagtatattcattctgtaattaatttgttgagtgtttttatcatgaaaggatgttttgtcaaatgctttttctgcatttaatgagatggtcatatgatttttgtccttcattctgttcatgtgatatatcacatttattgatttgagaataatcaaccattcttgcaacccagggataaatcccacttgatgatggtgaataatcctattaatgtgttgttggatttggtttgctagtattttgttgaggatttttgcatctatgctcatcaaggatattggcttgtagttttcatttcttgtgatgtgcttgtgtggctttggtattagggtaatactggtcctgaaaagaatttgaaagtattctctcccattcgtttttttgtttgtttgtttttttctgagacagtttgtagagaactgatattagttcttctttaaatgtttggtagaattcagcagtgaagccatctgttcctgggcttttctttggtgagatactttgtattaatgattcaatttcctcactcattattggtttgctcagattttctatttcttcatgattcagtcttggcaggttgtatgtgtgtaggaatatatccatttcttctaggtaattcaagtttttggcatataattgttcataatagtctctcatgatccattgtacttctgtgttgtcaactgtaatgatttctttatttctgattttacttgggtcttttctctttttcttttcttggttagtctagctaaaggctgtttgattttatcttttcaaaatatgaacttttagtttcttttgtatttttttttaatctccagagcagaaataaaatagagattagattatttctggtctgatctttattatctctttccttcaactaacttgggcttagggttttaaagaaatttcctagaggtgtaacttttagttatttgtaattttctttcttggtgcaggcatttattgctataaactttcctcttagaactgcttttgctgcattccataaagtttggtatgttgtgtgttcctttttttttgtctcaagatacttctagatttcccttttaatttcttcactggcacgctgattgttcatgagcatatttaatttccatgtatttgtgaatcttccaaaattcctcctgttaatgatttccagtttcataccattgtgaaacctctggtttaacaaggtaaaagctagaaaacccctgtataacaaggtaaaaacctaata

SEQ ID NO: 96414 - DNA, 29643 bp, Homo sapiens
ctgcaaagagtccaggtagaataacaatagtgtgttaactcctacttgaaatggtctattttcaaatagtctgaattgatgagttttctatattttttctttgggagatcattccacagcttaatgtcaaggtaatctcatttatcaccttagctaatttactttttttcatttgtattgtaagaaaatgaatgcatctttgcagtttcatctgtcaaaagcttctaaatggctgtcactcaaccacattaatcattctgtagccagccttcctgtggttatccttttagttatttggtagctttcccctatctctctgagaaatttctctgattagttgttatctgacatatggattacttataacatgtaatgaaattcaaacttctttttaatgtaatacagaagaatatagtggtgattaggtcattctcttattcaaggccttcaggaactatccacaccttccaaatacaattcaagcttctttgtttagcattcaggccaatcatcccagttagaagcagacatagtttgaatatctgtccctgccaaatctcacattgaattgtaatccccgtgttgaaggtggggcctggcagagagcgtttggatcatgggggtggatccgtcatagcttggtgccatcctcacggtagtgaatgagttcttgcgaaatctggttgtttaagtgtgtggcaccttcccccacccactctctctcttgctcctgctttcgccatgtgataagcctactcttgctttgccttccactatgagtaaaagctccctgaggcgtccccagaagctgggcagatgccagcaccatgcttgtacagcctgcagaaacatgagccaattaaacctctttttaaaataaattacccagtctcaggtatttctttatagccatgcaagaatggcctaacagagatataatcttcctccccttgaattcccattacactgtcttcatgcctcaaacatgacatttaacatatgctacggtttgatgtcccctccaaacctcatgctgaaatttgatcctggcccaatattggagatgaggcttaatgggaggtgttttggtcatgggggcgaaacccatgaatagagatatatgacctccctcggtagggagtgagtgctcactctattaattcctcagagctggctgttaaaaagagcctggcatctcccttacccgtcttttgtttcctctgtcaccaagtgatctctgcacagctggctcccctttgccttggccttttgccatgaatggaagcagcctgaggcctccaccagatgcagatacccaatcttgaaccttccagccattcttaactgtgaaccaaataaatatgttttctttataaattactcagtctctccggtagtcctttacaacaacacaaaacagactaagataaatctttacaatacagttgcagtgcacaaatacataatttatgtgaattcaagtctaagtaaaacttaaagagaatactttaaattgaaatactttagttttatctaccagttctgtatcattcaggttcaatcagagaagcagaacctgtaagagtgatagaaaatataaaatttattatgagcactagcccttacatagttgtaagagctggttaagtcatctctgtctggtgttggcctctgtgtctggtgtagggcctaaagacagcaaggctaataggaagaaaagatggtcatgaaatggggaagaataaggaaagattggaactggtgagaacaatctggaacctacaagtgaaaccgcctttgcaaaaattatgacactgagaaaaatctgacataggaaaattatggcagtaaaagaaatctgtcctaacgaactccatcttgcttctaacctccaagctgcccttgttcgttcccgggcataggctgaactaactttgggaggaatttatagtttaactttgaaacaaagatgataacagcccctccctgaaacaaactcccttcttgcatggggacaagattgttctttgtaaaaccaacaaattagccacaagctcagaaaccatggcctaggagtcatgcagccagaggccacaagattgctaacttccccaattgcctctatagataacattactattgtaaaacctaagattggtgtttgagccgatttttctgacccagcattctgatgggttagctggcacattccagacagaaaaactggctcatctggtcttgtggcctccaccaggaactgactcagcacaaaacgacagcttcaacttcctatgatttcatcacttgacccaaccaatcggcattccccattccctagctccttttccaccaaactaaaaaaccctagcctctgaattttcaaggaggctgatctgagtaataataagactccagtcttccatttagccagctctgcctgtattaaactctttctctattgcaattcccccatcttgataaatcagcttcatttgggcagtaggcaagaagaacccattgggcggttacacacaggcaaactagatcctgtgaggacaaattgcaacctgcatctgtatttccttgcgtccaacctcagtgatgtgagggacttataggattaggtagtacctttggcaacactgctgcacatgtacctggtctaagattgagagaagcagaatgaggagatctggcaggagctgcaaagctgcaggccaggctgctggcccatgcctacacggtgagccagcaggtcagtgcctggccctacaatgacctttagggcttcagatcacatggctgctgctttacttctgccttccaaatctcacacacattctcttttgactaaccctaacctagaatcatataggaaagggaattctggaaaatgtagttctatcttggctaagttcacactctatgaagctaccgcaagtctgtttctgcataaatccttgagtaagcaagggacagaagatatacatctgctatattttcaatctgtctcagttcatgagtgtgtatcatagtgtaagcatggcacagtgttgagtacatacaattctatttggttgaatttttagaataagactgctttcctaaactctagccaactgtttcattacatctctcctgaagaaagtgatctgctccagtgtgaggagagaaagactgcattgggtctataaactgagagatggcatatgtgggtctctgatatggtcccttcctaagaagggattcctggagtagttttcccacatccaattttcaatttacactttaactttgaaacccaatcctgattttagaacctcctgcaataaatatttgttaaaatggtgaaaaatgaattgtgaacttcttatctgtaggggttttctggttaagtgtctgtattccttttagcaactagcaaagtgcttggcacaaattaggtactcaatagatgtggttaaattatttattgcaaatttctattctggtgttgtataatgagtattatgttttctttttcaatagtttttttttccaagttgcctttaatataagccacttaatattgtgtgtgccttggggcttgggtaaaaatgactgcccattcaatgtgggttttgcaaggcaagttggagcttgcagaaaagtaaatgtacattgaaatacttgggaacattttggccctgtttgtttccttcagtgtttgcataaatccctacactctacctgtacctctctctcttcctctctttggtaaattatcttaaatattataaagtaattcatgcccttgttaaacagtaaataaaggagaaaagtgaatataaaagttcttggaatgcctcctccaccatacaaaattttgcctgatccaaaattccactgttaatatttttgtgtatgtatctttcctcaaatatcccatatgtttacaaaaatatatatgaatacgtatgcatacttatatacttatatttgaaggaaacaggattacattatataaaaatactatgctgctactggttttcacttactatattttgaaactttttcaacatcagcacgtaaatgtgcagtttccttttaagtaaactcttgaaatgtattccaatgtatgtattcacaatttaaccagttccctatgatggtcatcttaggctaattctaagaattaacattataaacaatgttgcatatacatatatctttgtatgtatcatgctaatacatccaattttatatccaaatatatccaaatttgtagcagtggaagtacatagtttgcctgagttttaatagcaactgaaaagtatgtattttcaggatatataatatttatagctcattaaaagtttctagtcaacacagggttacatgtatctacacagcctcttttgtcaagagacctttgacaaaaggaaagtaaaaccttggaagaaaagtctttgtccttattctttttacagcttcctttagccatctacaattcactaataattagcatccaccaccatcttctggaactgaagacagcttttctagagattaaaagtaccactatatttaattcaaaatctaatgtattgtaaaacaattatttttataattccattatcttaatgtggaacaataatgctgatattgccactaaaaattagctggcattatctattaaaattgatcatatgcatttctcatgacccatgaatctactcctagttatatacacatcagaaatgagtacatctatctgtcaaaagtgttctgtgagactgtttgcagcagccttattcccagtagcctcaaagggaaacaacgcaaatgcccttcaacagtggaatgcataaattgtgccatactcataaaaaggaataatatgcaacagtgtaaatgaagaaattattaccatagaaactatggatgaacctcataaacataatgtgaatttgaatagagccagacagaaaaggatacatactatatgattccaaagattcaacaggcaaaatgaatctgcagtatgtgttggctaatgactggaggggtaatgaagtgctgatctgtgcaatgtgctagcattctattttttgacctggatgggttttgcataggtatgttcagcttgtgataattaccagcagaggggagagcatgcacgcaattcttcaggatgagattggtgacatgtagagaaaagggggaaatgactgtagtttaaaaaaagtcaattccctcctccccacttctccagctctccatttcctaggaagagagcccagggaaaagcaaaccaagaaacaaattccagctcaaactcaaactctcaaacagatctggagactcaaatatcgatctctctgggcaaaaggcattcctagatttgtccaaggtacaaaaactaccactctaaccacgtttcttcgctgcccggggtcagagaagtaaaaacccattatttatttatttttaagttacttccaacctcgctgcctcgagcttctgaatcgcctgggcaacctggaagccgcccatctaagggggtgaggtcgaatcccagccttgacgccttagcaaccgagcgagcctttctcgcgtcccagcaacgcgcccttccctctgccgggcctattctccctggtgcccctcccttcctcgaggctgcagctcacccctcattgggtctctcgttggtcaggagggcgcgggtctgcacactctcactcggtgccggacatcagttcctgcggctcttgctgtgggagctgcccgagagccagagcagtggggagggacggcgagaaccaatgtttaagtttatttaagaaagaagaaaaagagtcaagaagttcaagattttcgtcactcttatttttaaggcacatccaaagctccgtggagaaggggctggagggtgggaaaattatttttgtgcacattccatataagaaagaagagacccatcgaacattcagtacggagtcacctggaaattggagatgttggatacgatcgcccgtgccctgcaggacctgggcaggcaggtgctgcccactctgccctcgctgagccaggagggtaagcgtgttgggtagcagggggtggccctggggattgaatcttcatctgcttgcaggggaggcggggggacccacttcccaattccctggctcaggcctggcctgcmgtggctaagttgccttgacaaccagctggtaatcacatcctgcccacgttggacgcccagagacccttttctggttttgattaaaccaggggatgcgtagacagcacaaagtaagtgctcaataaacggactagcacaaagtaagtgctcaataaaggttaggtaaaaacagccactcccacaccacycgctgggatggatcacaacccttttgcctacctagagaaaagagatgcagggaccctaaatggctccttttgagagttcatgcaaagacggttgattttgttgcctttgacatcatgccgttgtattaagaaaatgagatgatcataaaaagctacagggtaagtactttggaaggggacctggcaccttctcagagaaaactcattaggcttggttagtagcaagacaagatctgtttttagcatcgtttgtagaagagtcaccccaaagtgaggctgagatctgtctgcaaaccacaggagaagagaggtgctgcaggaatgcaaactcattattatcaaaccattgtaacttagagatgttgcttaggctttaaccaaatgaccgcagaaaacaaataggaatggctgcttctttctcttcccctgcatcactcctatcttttcctctcaaatcatcctgaaagatgcattgaagataatggcttaatgaatttaaaaacatttgctatatttgtaaatttatgtatagtcattcaaggaattctgaaaccctgctatatgctgagcactagttaacttacggtgaacaaacatcttggaatttactgtttagtggggaagatgcacattaatcaaatartcacacaaatcaatgcaaatttacaatttaggtaaatgataccagggaggaggtaaatggtacagtaagaactttttttaaagatgattttttagggtagttgtagattcacagtaaattaagaaggagggacaatatattagtttatttgtacactgctatgaagatactatcccagactgggtcattataaaggaaagaggtttaattgactcacagttcttcatggctgggggagccctcaggaaacttaaaatcatggcagaaggggaagcaggcatgtcttacatgacggcaggagagagagagagagagaagcccgggggaccaggggaaactgccatttataaaactctcagatcttgtgagaaatccctcaccatcatgagaacagcatgggggaaactgctcccaggatccaatcccctcccaccaggcctctccctcaacacctagggattacaattcaagatgagatttgggtggggaaacaaagcctaaccatatcagacagagatgtcccacatactgtctaatcctacacttggatagactctcccattgtcaacatccctcaccggagtggtacatgtgttacaattgaacctacattgacacatcaaaatcacccaagtttcatagtttacattagagttctttcttggtgttgtacattttatgagtttggacaaatgtaaaatgacatgtatctatcattatagtcatatagagtatttcactcccctttgttctgcctattcacccctacccctaatcccaaaatctggaaaccactgatctttccacggtcttcatagttttgccagttccagaatgtaatatagttggaatcatatagtttaagccttttcagattggcttctttcacttagcaatatgcatttaatattcctccatgtctttttgtggcttgatagctcatttctttttagttctgaataatattccattatctagatgtaccacaggttttttttttttaatctgtccacccactgaaaaatgtcttggttgcttccaagttttggcaattatgaataaagctgttttaaatatctgtgtgcaggttttaaaaaactggatataagttttcaattcacttgggtaaatacccagggacataatcgctagattgtatggtaagaggatgtttagttttgtgagaaactgccagactgtcttccaaaggggctgtactatgttgcattcccaagagcgatgaatgagaattcttgtcactccatgttattgtcagcatttgttgttgtcagtattttagattttggtcattctaatagatggtgtattggtatctcattgttttattttgcattttcctgatgataaataatggggagcaccttttaatatgcttgtcattttttgatgagatatatataaagggctttggctcatttttaaattgagtttttcttttcttwgtgtttttaagagttatttgtatattttgcatgacagtgtcttttgcaaatattttttcccagtctgtggcttgtcttctcattctcttgacattgtttttcacagagcagaagttttaaattttaatgaagtccatcttattatttcttgcttggattatgcctttggtgttttatctaaaaagtcattgctatacccaagatcatctaagttttgtcctatgttatcttctaggagttctgtggttttgcacttcatatttaggtctatgatccattttaagttaatttttgtgaaaggtgtaaggtctgtgcctaggttcttttttttttttttttttttttttttgcatgtggatgtccagttgttctagcaatgtttgtttaaaagactatctgctccattgtattgcctttgcctctttgtcaaagataagttgactgtatttatatgggtctattcctgggctctcttttgtgtccttttaatctatttgtctgttcttttgtcaatacacactgtcttgatgactcagctttattgtaaatcttgaagttgggtagtgacagtcctctgacttgtcccatgtgttatctagatgcatattatttagtccccatgtattttgggattttccacttatctttctcttattcatttctactttaatcccattgtaatctgacagcaggcattgtatgatttctawccttttctatttgttaaggtgtgttttatggcccagaacatggtctgtcttggtgaatgttccatgtgagcttgagaagaatgtgcattctactgctgttggatgaactagtctgtagatatcaactatatccatttgattgatggtgctgttgagttcaactatgcctttactaattttctgccagctggatctgttcatttctgataggtgagtactgaagtcttcaagtatgataatggattcatttatctcttcttgcagttctactagtttttgcttaatgtaatttgacatactatttttaggtgcatacatattaaaaattcttaggwcttcttgaaagattgacccctctattattatgtaatgctctttatttctgacaactctccttgatttgaagtctgttctaaaattaatatagctacccctactttcttttgataagtattatcatgctgtattttcctccatccatctacttttaatctatatgtttttagatttagattgggtttcttttagacaagatatagtggggttttgttttttggtccactccagcaatctttgtcttttaattggtacacttagcctatgttcaaagtgattactgatatagctagattaatacctaccatatttgttattgttttctactttttgcccttgttttttgtacccatctttattttccactgagcattttacgattccattttctcctttttcagcatatcagttatacttttttttttttgagacayagtcttgctgtgtcacccaggctggagtgcagtggtgtgatcttggctcactgcaagctccgcctcctgggttcatgccattctcctgcctcagcctccccagtagctaggaccacaggcacccgccaccatgcctggctaattttttgtatttttagtagaggtggggtttcaccrtgttagccaggatggtcttgatctcctgaccttgtgatccgcctaccccagcctcccaaagtgctgggattacaggtgtgagccaccgtgccaggcccagttatacttttaaaaaaaattttagtagttgccttagattacaatatatatttacagtcaattcaagtccacttccaaataacactgtaccacttcacaggtagtgtgattgttttataataacaaaatcttaattccttcctcccatcccttgtatcattgctgtcattcatttcatttcacttatatataaatgtaaatatatatgatatatgcataagcatacataattgaatacattattgctattactagacaaactgctatctgttaggtcagctaagaataataaaaataggccaggtgcagtggctcatgcttgtaatcccagcactttaggatgccaaggtgggagaatcgctggagtccaggagtccaggatcagcatgggcaatatagtgagaccttgtctgtacaaaaaattaaaaccaaaaaaattagatggacatggtggcacacgactgtagtcccagctactcaggaggctgaagtgggagggctgcttgagagcctagcaggtggaggttgcagtgagccaagactgcaccgttgcactccaggctgggcaacaaaatgagaccctgtctcaaagaaaaaaaaagtttttattttaccttcacttattccttcttcgatggtcttcccttttttttttttttaaatgcagatccaagtttctgacctacatcattttccttttttctgaggaacatcttttaacatttcttgaaaagcaggtttactggcaattaattcccttaatttttgtttgtctgaaaaataatttctcctttgcttttgraaaataattttacaggatgcagaattttaggttggtgttttctttttctcaacacttgaaatgtcttatggtactctctttttgcttggtttctgagaagtagttcaatataattctcatctttgtttctctatagatgaggtgttcctttccctctctctgcctggcttctttcaggatttgtttttagctctgattttctgtactttgaaaatgatattcctaggtatctttttttgggtatttatccagcttggtgttatttgagcttcctggatctgtggtttcaygtctgacattagagggaaattctgagtaattgtttcaagcatttcctctaatatttctccctcttctcctggtattcccattatgggtacacaccttctgtagttgcctcacaatccttggatattctgggttttttttttccagtctttgttcgctttccttttgaagtttccttgtcacatcttcaagctcagagattttttactaagtcatgtccagtccactagtaagcctatcaaaggcattcttcatttctgttacagtgtttttagttgctagcatttatttttggttctttcttaggatttcaatctctctgcttatgtagcccatctgttcttgcatgctgtctactatatccgttagagcccttagcatattagccatagttgttttaaattgccagtgtgatagttccaacatccctgccatgtctggctctgatggttgctctgtctcttcatattgtatgttttgccttttagtatgccttgtaattttttcttgatagctggaagtgatgtactgggtaaaagtaactgctataaataggcctttagtaatgtaggggtagagtgtggggggtgggaaagcattctatagtcctatgatcaggtctcagtcttttagtgagcctgtgcctctggactgtgaactttacaaatgtttctcagatttttcctttctccttaggtgggacagaatggctaaagtggactggagttggtcattttccttctctcaggtcagttaggctctgataatatcccagcaggttaggctctggtgaactagtttcttctgagggcaggtcattaaggacaacagagtactctggcatatttaaaaatggtatttttttcttcctcccacctgaagcacaaggagatttttctcttatatttacctggatatttggctgtgggaatctggttgagctctgggaagtaaaccttaaaatatgtggggaccctccctccatgactgggttcccctggaggttttaactcttggtgttgtccacactgagcctccagaaatttgtcaattacactttgagttttcttacccagcattggttcttgatgctgtttctgcatgtgagtccgtttcaggaagccattcctcctggtatttgcctttctgtctctccaattttaggggcagcagtttgtcctgtgtcctccctcatcttatggacccaagaagagttgttgatttttctgtctggtcaactttttagttgttaggatggagtggtgacttccttacatacagcaccaagaaatggaagtcaaatgagaacatttaatagagagtaaggatgggggtgtgtgccaagaatggctaaagaagggataatttgagctgagttgtgaagaatgagttggaattaagtagatgaaatggatcagagaggtagagagtggaagtgagttgaaaatgattttggcaaagggaatgacaggggcaaaaacttatggtgagagtatgatgtgatggagcaactgaaagacagttgactggctgctctgtagatgtggggaggcagtgtattctaaagtaggctagagagaaaggaaggggtcaagtaatacagggccttgtaagtcatattaaggatgttgacctttatgttaagcctgatgggaagccattaagtgttttgagctggaggtcaaggagaagttgaattatatgatcagtttatatttggaaaagattactctggttgccatgtggggaatgaataggagggtcaagaatacctatagcaatagtcttggtgagaacaaatggtagcttggtctraaactggtaatagtagaaatgcagaggaatgcaatgaatgaggggcaacttggagrtaaaatctacagattatggtgatggactggatgttaggggtgagggataagagaagtctcaaggatgacttctgagttcctggctcatataactgaatagatagtggtgccattcactgagaccgaaatcctggataaaagacaagatttaagagaagaaagattgyggttttgggcaagttgaagggcctttttgtgatatataagcaggcagttggataaacgggtccagaatctcaaagagggggtggcaaggagtctgggtctgtaaataaacatttgggaatcatcctgagtgtgggtgtgactgctgaagtggagagtatagagtgaaaagagaagcaacctaggactgtaccttgaaaaaccctaccatttaatggttgggtggaggaggataagcctgcaagggagactgaagaaatggccagacagttaggagaaaacccaaatgagagtagtagtataaaagccaaaaggagaggtgcttaaacggggagggagtgatcaatagtgtcagacatggctgagggctcagaattaaatacgtttattgaatgtattgacaaagagaccattggtgacttcagcaagagctgaagtsaaagtcaaactactatttattacctttcacaaattatctattgcaacaaggatgaagataaacttcaaactgagcaaaacacataaattaactttcatcagtgtatatattcatcattgtatattcctgctgcttctgtatgttttagcaaagtttaatattatgtaattatagttcttagaaggccctgtcatcattttacagatgtgaactgggtaaaasttgagtccatggaagcaggaaggctgtgggtcttccacgtagcacactgctctttccattgcattatgctctgggaatatgtttctttgttcaaatcatcctttactattctgctatactattccatatatcagtattttaattttagaagataagttttataacatcaggaaacatatctgttttttgacattaatgactttttcaagcatatagtattgtataatttacagaacaggcatgtaggatttttaaataatgatcatatgtaagatacagtatcctgttacttggcacggtgtttaaacatatggttttgagcgcatggaatgttaagaatttgaagccaaatgaaggttgaactgaatatagagtatatgtctagggattagttctttataagagtgattcttggcatttcagtgtttgattgaaataagtaagaaccctggcttcccttaaaatatgaaagtagtatatccttcaatttgctttttagacttgatatttttcattttgagatttaatgatatcctctctgactctttgggatgtcagaaaacgtcaaatttagaaattacagtctgtaagctttccaaatctattccgattggattgcaggggcctaaagcctcctaaggcaaatgatatgcatagttttctttctcttcaatgagaaatagcaaattttagtttagaataattagttctgctcttatgtaatgttatctgttaggctttatggaataaaacagtacagtgggcttgaatatatcatccaaatgaagaaagacagaatcctcaaattttcaattaaactcagctgagtcttttcactggggtttggttgcaaactatacactttctcctggctctaatgaaatcatttcatcttcagtgtagttgttttcctaaaatacgagcttttagaggtgaaagactgttagagtcataaatttaacaattttgacttaataactttgaaagttctccatgtacatctggatactgagattttgcatttgtgaattaatgaaatttttggtcatgatgaaarttttaattcagtatacagttaggactggttcttagttcttagcagcctgtagtagaatctatgggctgtgggggtggggaggagtggggaacaaggtagggtgggcagagtaagggaaatgcctgattatagaaagtgattaatgaggggcagaatcttggccctcgtgctcactgtagcttgcagccctaattttattaatgggtgagtgagtttccatcaccaaacttgttcccagatagtcataaaagtcattgctacttctcatccaccaaacctgcccctttcctggcctattaataaaaatatttataactctgatataccagaattaaaagattgcactctccgtgttttagctagtggtttaaattgttagaaaaaagataaaccaataaaccaataaaacaagcagtttccaaagtggaaaaaggattgggcttttgtcaccagctgcatctatgtccctaaatggcaagtttgttaatgtcactgttcttgattttttattttgagaattaaaacgtaacaktcttgatttgcagagagttcttaactggaaagtatctttgataaacacatggttaggtctggaagggcgatgttaacacagatataattttctagactttgaaatattagtcatactacagtataggttcatatcatacattaacactttcattattggcaactacctatttttctaccacacttgtttggaacacagctcagaacaagaagataaacttggaaggctttcctccagtcagtcaaaattgatagtgccaagtgtatgcattaattcaaagtaaagctccttgtcctactcaaatgtgtgtttttaaaaaattattatttgaggctgggcatggtggctcatgcctgtaatcccagcactttgggaggccgaggcgggtggatcacctgaggtcaggagttggagaccagcctggccaacatggcgaaaccctgtctctactaaaagtacaattagccaggcatggtggctggcgcctgtaatctcagctactcgggaggctgaggcaggagactcgtttgaacccgggaggcggaggttgcagtgagccgagatcacgccactgcactccagcctgggtgacagagtgataccctgtctcaaaaaaaaaaaagttattttagacatactattagtatttgttatttccagaacacagtagataagaagcaatgaattatgactggtccaggagcccacagagtactagtagagcaagtgacagctggtagcttagcagtgaaaaatgagaataaaatgcagatttgaggatttagcaaaaatagaagtgtaggaaaagttaatgtacacacaacagcctttcacgccttagtggccttttgccttattcctgtgttgtggaatggtgtgagaatgaacgttcttattaatcagatggcacagaatagacacccgataaacggttgctgggtcattaagaaaaggttgggttatacttgattaactctctttacagaataaagaaaagggtgtgacagagttccctttgctgtagaaatattttctttaaaaatgtattattattattattttaaatcacatcttctgaacttaagggagtaagccttagttaccaagaaaattaacttttgggaatggccttgttttttgttaattctaaattaatcaggaattaatgtcatttgcttccacatttcatatttacatttttatttattagcactaagatactgtcacatgggtgcgcatataaattgaataatttctggttacttttgaatttcagaagtctctattatctgggggaatgtatcagaatttgtgagacggcagttaaccctgcacaaggtaagatttattaatttattaatttattaataaattaatttattaattttaatgtaggcatctaaaggatccttccttcatagtcttatataatgttgctgggagcagggcagtagactttagagccatcctgtttaactttcagtcctatgttttttgatgctcatgttcggacttgtgggtaatagatttaacaaacatgaattttatttttaggtaatgaatttgtaagttctgctcttctagtgttacagagtgtagtgctgatcagcctgggtgtgtgtaaggaaactagatgagttctgtttgtctgtgatctgatagttcctggcatagctatagaaggatataacgcttcttgtcttgcctccttgcagggaatggattttaactgaaatagaagacttgccaaaatgagaaactttgcctagggctggactgttccctcctgttaagtcttgggtttagatgccatagaactggacagagatttggggatgagcttgggggaagctgggaagttgtggaacttttataccccattcagaggtcctactatgagagctcttgggcagaattcatacttcaaatttattttgttttgtttgagaatttgaatttgttatcagcacttaaacttgggaaaaatcatataatgttttggattttttccctccctttcattgaaaaatcagcagatctaacagtactagtcttccattgctacgtggtgacacatttggagctcaagatgtgctctcccctttagacggggtgtgcagtccatagccatcacattccctggctggctactttcactctcttgctttcttttttggctcctgtaggcatttgagtttgtagtycttgatgaatgatatctccagggagacagaaacccagtatgagaggcaaaaacatttgcttctactcatcagccaggatcactacattgcagcatatgatttggatgctggttgtctgctgtggcagacataaaatctaaaagtaggaatgagaaagcagagattctcatgccctcttaaattcctctaatggcagatgattaaaatttaaaatgtcacacaatttaggacaggagtaatctgggttaaagattaaaagatgctatggcattcacaccaatttcttagccttttgatgatacagagatgagcgatctgatgtctgcaaatcatcatggaccaatgtattacattttatactaagcttatttgaaaacttagaattataaaatgctatagctctgaagagtcctagagatcactgaatttttaaggcctaagcttacttctcttcgtgttttttagataataatattaaggattattttttcttcactccttcaatgaattctgttttgttttgttttttcctttcagggggttcagattccagcatttggaactttcactttcataagacaaaagcttgaggtgggaaacaacaaatttatcttaatccagaggcctgtgtttatcatggtggagaagctagtgcagatycatggactcaaacaaaacaaagtatatactcctggtaaataattctgatatgtaggattttcccagaaggttactgtcctggggataaaaaatgaaagggcaaagcgtagccagtgctgctgtcttaccttcttatttgaggaactcacttttcacaaggtgcttttggcagagggaggggccaaagtggaaaaataatagagtcttcctgaaggccattttaaaccccagtaacctaagaggaaggagtgaaaaaacctgatgtaacgtaaaggaaaatttatgtaaaagccacaccacagagctgtaagccctttatttcagatcctaagaaattaaaagtggttacaaagaagagaaagttaattaggatctctggttgggagaactacagtcagtatcagctgtcaaaaagataactgtctttctatcatatgtataatccaaatcattaaaatttaaaagttagaagttgaataattctataaagacttaatgcataccttatatacctttcgcataccctaaagccaacctccctccctccctcctttcctccttccctccttccctccttccttccttccttccttccttcttcaaatatttattgagagccaactatgtgtcagaccttgttccaggtgcttgagatatagtggtaaacaaaataggcataatccctgcmacagactgcttccatccagctttagtgtgtgggcttcgtaacacctcccttggttacttagcagcctttgggtgcatacttcctgattcctggctgtgttcctttcgaccttcctgattgtccccgcccccagcatcagactcactcctggataaatggagacaatctatctccgatggcaacaggtgaaaaggctgaaactgtcctctaagataatgttcctgaaagttaattttcagagtcacttgagtaactttctactttcaaaagaatgatatattagaaaaacaaatgtcaacaaaccatacttagaatttcttaggtatatattcagtatggtgggcttgatgaacttttcagctatttttacctagaatttttttttcttttctttgtttctccctttcatgggaacaaaaagaaatacctagagttttatgtcagaagaaatatatcctatttcatcaaaaacctattaaagaaaatgaaaataaagctaacatttttgcaaaaacatctgtgcattaaaattaaagctcattttctatcttggatcttgtactgtagtccaaaaaagtagtttagatctaaaattatattttttactgggtgaggcaatttcagaattagacatatatgactgaattagttcaaaagaataattctaggccgggcatggtggcacatgcaatggtggcacatgcttgcaatcccagaattttggaggctaaggagggaggatcacttgaggccagaagttcaagaccagccttggcaacatagcaagctcctgcctctacaaaaaattatttaaaaaacttagacgggcatgatggttcacaccaccagtcccaactacttgggaggctgaggcaagaggatcacttcagcccaggagttgaaggctgcaaaataataataataataataagataaataaggaaataaataaaaatttaaaacccccaaagaaaaatttctgtctacagtttagctttggggttatgattcttcatcattaattaactaggtaactgtattagtctgttctcacactgttataaataactagctaagactgggtaatttatgaagaaaagaggcttaattgactcatagttctgcaggcttaacaggaagcatggctaagaggcctcaggaaacttacaatcatggcagaaggcaaaggggaagcaagcacatcttaccatggcggagcaggagagagcaagcatgaaatggggaggcaccacacacttttaaaccatgagatctcatgagaactcactcactattatgagaacagcaagggggaaattcactcccatgacccaatcacctcccaccaggcccctcctccaattagacatgagatttgggcagggacacaaatccagaccatatcagtaactaatcaaacattttatagtggtttttaaatattagtaagacatagttcttttaaatctagcatagataattaatatataagaaatgggttgggtacgatggctcatgcctgtaatcccagcactttcggaggctgaggcaggcggatcacaaggtcaagagattgagaccatcctggccaacatggtgaaaccccatctctactaaaaatacaaaaaactagctgggcgtggtggtgcatgcctgtagttccagctactcaggaggctaaggcaggagacttgcttgaaccccagaggcggaggttgcaatgggctgagattgcgccactgcactccagcctggcgacagagtgagactccatctcaagaaaaaaagaaaaaaaatatgatgaaacatgattaagtgctatgaaagccaaattgatcagaactggatcaaatgctatgacgcccggaggacagcatgcctaactctgctttacgaagatgacatgtgaagaggtcttaaaggatgataggactctgtgagcagagaatctgttggaagatatttcaggaacaatatgaacaagtcaagaacatggaatgaagcctgttaaggaagtaacgggtacttccgtatggctgaggcatatgattgtggaggcaggcagaggaagataagatgaaaatggtaggtagggaccaattgtgaggggccttatatggtgtgatcggactttagaattcatcctgtaggcactgaggagccattgaaagtttttgagcagggaattatctgtacagataggattaatttagaaagatactctttcagttacagtagtttggtaaaatgcagtaaaagcctgaacgaagacagtgatcaggaggggaaatgagggtatctactcatgagatattactcatgagacatttcagatgtagaattgttagggcttaagttgagagtggtgggtaggaagaggaaggaaggcgtttagtatgactcagatttcttggttggagaacagatggatgctcatgctatcaattacctttatagagaatgaaggggaaaggtggatttcggtggtggataaaatagtgaatttgcttttgcacatgctgaatttgagatacatgtggggatatttaggtagaggtgataccagagcttaggagaagagtggagactagagatcaagatttggatgtttacctaggagagaatatatactcagcagaagagataaacaaggacaaaatcctataaaacaaataaacaaacctcagtatcttataagaagtagaagaggagggaagccagcaaagggggccaaggagtcaaactatccattgacttgacaatctatgagatgatagtgtcctaactcagataagtgatctgaaagacagattgcagagaggcagtgggcaaatgggaggagaaaatccagaggcaggcaagacagccttctttttaagaaatgtgtattttttttaaaaatggagggtggtggttagaattattgttaaattgtgcaggagacagcaggctgatgcagtgaagctcaggtcttgttaattttcatcatttagcagtggtggacatttgaaaggatataactcatgcttactgagtgaatgtttagaatattctcatcttctctatgtcctctttatcagtggaccttgttgttgtctctctttggctttgtcatcttgatcctctttgctatttaccctttttctgactcgtgaaccttgtattgctcctacatctgttctagttggatagaccctgtgcttctttcaagctagatataatcgtattcctttgtagtgtcatatatgggctcattagagaggaaaagctttctgtgagtcatttagtctgatacccttgtataagaccctatttcatttaaatgataacttctagtgaagatgggtatcttttcaaaatatttaacacttgtaggtatttgtaatcatgtaaaaatggcatgataactggaggagataggcaaatgtatcagttcattcttgcattgctataaagaaatacctgagactgggtaatttataaagaaaagaggtttaactgacccacgtttccacaggctgtacagaagtatggctggggaggcctcaggaaacttacaatcatggcagaaggtgcaggggaagcagtcatgtcttacaaggctggagcaggagtaagagggaggatggagggaggtgctacacacttttaaacaaccagatttcatgatagctcactcattatcatgaggacagcacccagggggatggtgttaaaccatacatgaaggatccacccccatgatccaatcacctcccaataggccccacctccaacactggggaatacaattcaacatgagatttgggtggggacacagatccaaaccatatcagcaaatattgctgcagtatgtcctaaaagataagggggatgaaaactttargaaaccctctgaggaagagaatcagttgattattatatgtttcctagagaaaatcaaaagcttgtctacagtgttatttagaaagctaactgttcttattttgagcattgaaccttatacttttagagaaaattgtactgattaatatgttagtaactacttaattgtctgcagtaataatattacattgggtacaactaaaagcttcatccagaagattcyattttagggcattgagaatcagataattatttgtgagtgtgtatgatatgtccttatggtaatcaccactttctttctcccaccccaactgtcttttctcctttaggtgaaatcccaattgttccacttaattttgtcatgatatccctggagggtccatttaacagagatgtagtggaaggatgtgtgaaggagacgttgctttttttatcgcgttccatttccatgaaacaaaatgtggagtttacattcaaaggaattggggtcctcatgatcagagacagcaaagtgaagatgaggttttataaagacttcctttgtaccatggatggaagtggggctttggcaaaggccctagcaaatgtaaattaatattttccttctcctaagtcttctcctaattgtggttctgactcatctataggtgtgttgtaattaagaaaaacgaaggttgacatattttgagtgacagttacctgaagtacatggaagtgcttgtttatacttgattaactctttgacaaaaaagatcaggaaggcaaaggaacattaagaatcaaagtcaattgagggatataaatagtaacggaaactcttagaattctgaacattttatagtaccttataggttttttgtttgttttttgagacagagtctcactccgtcacccaggctggagtgcagtggcacgatgttggctcactgcaacctccacatgccgggtttgagtgattctcctgcctcagcctctcaagtacctggaattacaggtgcgcgccaccatgcccagctaatttttgtatttttagtagagacaaagtttcaccatgttggccaggctggtctcgaactcctggtctcaagtgatctgcctgccttgacctcccaaagtgctgagattacaggcatgagcctccatgcctggcgtatggtttaaaaacttcttccacatgtattatttcatttgagcctcaaaatagcatacaagcagcattattatcatcctaattttacaattgagaaaagtaggggctcagagaggctatgtgggaatcccaaggtgaactagaactggaattcaagcccagacttcctaaccacttggtttttgctggttctactattttattttttaatgttggttctactattttattttaatgaaagttctataacaaaatctaatttgagtcatggagtttttgaatctttagcttttaatttgccatgttgtagaagaaatttcctaattggcatcattattgtcaaccattaagtagctggtgtgaccttcatgctaagttggatacagcagagtttaaacaaatgaaatagtcaatctaccagacttactgaatacttagtgtgcctcaggtactcctctggaaactaacaaagtagacatgaatgaattgaattattatggaatgttatataatcctatatcccataaagccaaactctgatttttttaatgaaaaggctattaatatcatctcagtctacccatttctccttttatgaagctttgggatggggatttaggaaatgaagttgtgcataatgaaactcctggtgttttctacacaatctggtttcatacaggattgctaagaggattgccaaccctgtgtgtggaaagtgggaaacacatgcaggaaaaacccttgcttttccatgaaaacacaaggcaagatttgcaagtccataagcaaggccaaagtggctagctcatctctaaccctcagggattctgctgaactttgtagcttcaatacgtgtttaaaagagaagacagcattttccttgacctgctgaactgtaaagcacatcttttacagaacgttttccaaaagaactagtcctgaaaaatactctatgaaaaaagggtttggaggtcaaagctgactgaaaactgctgatcgaatcagtcaccctcatggacagagggacagagcacatcagcatgttaaaggagctgagaagtctggctggaaagcagtcagtttaactgcctgaatgtatttaatcatggaattgtaggttaatccaatatctcattagctctgtaagacacattttggaaaactgctgtgaagtggtgtgagtgagagtttattcccaaatgacccgtaacttaaaactgtcttgtagggtagtccccttggaaagctgtgtgcttatttcagtaatgctgcttttattagaaatattttctatacttctttttgggaattcacttcaaaggcttttgtaagtgatagcattcatgcaaaaataataattttatatattattctacagttaaaatgtgacaatgtgactattatgtttacagttacatgagaattaaaatagtcatttgttcagtatttactatgtgctagctacttacatagaggacctcatggaagtgctattagatccttttattatccccagaaacctagtgcctaaggccacatgcctgttagcagtgtggggatttgaacatgagcccacctgactcgaaagcttttctcttaattgcctaattttagttatttgggtcaagagtggaattagacagcttgctcactttccagatatttttacaaagtctgctatcttcttaaagacatctaaaagaatctgtcaactctgaaggcaattccctaaaaggaaatggtttgagaaaaggcaacaccgaaagaattgctgtgcagctacccagggtgattgctctgatgaatgagatcattcctcattggatttttaagctctggacttataagcgcttaacataaacaacaacaagaaaagtatcgtggtagccttgcctatgagcctgcagtttttaatttgtctgagtcctggacctcagcctagatgtaaccttgctctgttgctgtcctctagaggcctggcactgtggactcggtgttgtctagcagagaggccttgaggaagtggcccagcagtgtgcttgcgtttccaaggtgagtgctttgcttcacgggttcctctaggcactagcactccttgctgatctgctgatctcattgggcagtgtttctcaatgttttgtagctcatgttccttttaatgtattctgtctgtctctccctctctaaatccaccaacaaagaagagtttattgcatacactttctgtagttaagttaaataacaatggacatttattcttttttatcccccctcaccgcgacggagtcttgctctgtcacccaggctggagtgcagtggcacgatctctgctcactgcaacctcggtctcctgggttcaagcaattctctcctgcctcagcctttggagtagctgagattacaggcgcacgccaccatgcctggctaatttttgtacttttagtagagatgaggtttcaccatataggccaggctggtctcgaactcctggtctcaagtgatccatccgcctcggcctcccaaagtgctgaaattacaggcgtgagccaccaggcctggcccatttactcttttttaaaactacccttggctcctggaaattctgatactaccttccattaaccttagtccctgcagtattagtaaaactcttctcacctgctgaactttccactactttgtaccacttcttctgccctagctgctgcttcttccttcagttcagcccatttcctgtccttgctcggatttttaccactaaacgggttaaacagataagttagaataaggaaacagctttactccatgagcacagtggttgttactggtggttgcatattactgtatttaatcttcacgacaaccatgtgacttatgtattataattctccattttatcatgatacaaaattaattttaatttttttcttttacatgaatgaagcaacatggtgcactattgagaacactggagtaggagtcaggagactttagttttatttccagtttggccatcacttattcattgtgtgcccttaattatgttaataatcttaattgctgtgccattaaccactgtgcatttcaggtggaggaagtttggggaataacaactagcttcctaaagcattattactttaggaagtatgagtaaagtataaaagtatgagaatttctgagatgttttgagtgtgacattctcttgtttgttgctttggaacaaccccctcctggaagagctgtatgacacatacctcagaagattcagtgtgaagtccagagtaagccttagaggttgttttccaaccgcctcatcttgcacacgaaatggccatgcaactaataagcagccaagcttatagaaataaaaccatggctcctggtccagtgttctttccattgcaccatattgccttactcactaaaaataaatcagtggattgaaaagaattttattttgatggtttcggaaggcaaacatggctgttccctttgacatattttggcttaggcactccaggagggaaataattatagtgggtcaaagaacagagatggagtcgccatcaagtcaagggcctagaaatggacatggggacttaaatactcaaaacaattgttggtgttttatttatgtgacatttggcccctgaattgactgaaggtacccccacccccactccctactccaacctagtactccatacctgaggccaaagaaatcctacaactacacacaccaactgaacatcccccttcctccctgctgcaaattgtagctttgcaagtccttcacttttgcctggggagagaatgatgaagtgaagtggcaaaggagggaggagacaaatggttattttggggcatactctaccaggctatgaatctttgccttcaagctatccaacaaccttttttccactgtatcaccccatagcatctagttaaagaagtaggatataaaaattcaaattgaaacaaaaaccaataacctaaataaaggactttaaggcaatttctctatatgcaagctgctttgagactatggtatagagggaaaggccttggtcagcttccagaaagccttggagaaaattaatctatgatatgtacttagcacatcagagcactcaccccttgaagaaagtgggcttatttcagaatcagccagctggctgggttgcttccaaaacttgagagttcacacagttacctgttcaggttcagtgcagcagaaaaacatattggctcattcctaggattgagctcaaggagatggaaaacaaactgcctatggagacccttgtagaagaatgtggagagaatagagaaaggaagtgcaagttaaaagaccagtcagacaaagaagaaggcaccagaggtaggccaatgatttctgggtccaatctgtcactctttactgctatgagcccagccatattgcttagcccaaggtaaataaagttaaatttacaaataatcactatattattattacttttttttttgagatggagtctcgctgttgcccaggctgtagtgcagtggcataatctcagctcactgcaacttccacctcccaggttcaagcgactctcctgcctcagcctcccgagcagctgagattaccatcatgtgccaccatgcctggttaatttctttatcttttgtatagatgggccaggctggtctcaaactcctggcctgaagtgatccgcccacctaggccatccaaagtgctgggattacaggcatgaaccaccgcacccagccacaaataatcactatattatttctaacaaatacgttctattcctagaatcctgcatttgaccttaattatgagcttacttactttatgagccttagatcctatgactctcaggctcttagatcatcatctctttgctggctccccattgctcaaaggggccaaaactcagatgactgcaggcaggtaacgcaaatgcaggaagtggtctggatgtaagtgggttggagacatgttagcttagttaacatttctaatgaaaaacaaagagtggcagttttatcactttgatgtctgtagaagaaagctggattctcatacctatgtctgcatctaatctgttgtgataggttgttttggtggaagcaaatgaagaaaatcctaggactccaaagattttttttttttttaaccaaagactttttattttctttttgagatggagtctcgctctgtcactcaggctggagttcagtggcacaatctgggctcactgcaacctccgcctcctgggttcaggtgattctcctgcgtccaagctattctcctgcatcagcctccctggaagtagctgggactacaggcgcgcaccaccacgcccagctaatttttgtatttttagtagagatggggtttcaccgtattggccaggctggtctcaaactcctgact

SEQ ID NO: 96415 - DNA, 61068 bp, Homo sapiens
caatgttggccaggctggtctcgaattcctgaccttaggtaatcctcccgactcagcctcccaaagtgctgggatcacaggcgtgggccaccacgcccggctgatgtatatcttatatatatatgtgtgtgtgtgtgtgtgtgtactcatttaatcctcaaataaccctgggtagtaaatacttttttttttttttttgagatggagcctcactctatcacccaggctggaatgcagtggtacgatctcagctcactgcaacctccgcctcctaggttcaagcaattctcctgtgtcagcctcccgagtagctgggactataggcgctcaccgcaacgcccggctactttttgtatttttagtagagacgggatttcaccatattggtcaggctggtgtaaatgctattattaaactctcttttaaaagagaaactgaagccttaagaagttaaataatttacccgagatcatatagctgaagtgtcagccttgggattttgaacccattttagctccagaatccagtctcttaaccattacaccataccgtctctgagtggagccctgtctttctctaacagggtcatctgaaccacacagaacacaaagtgattagagtgactattttcttaattctctccaagatgccatatagctagtgctatgcataggagagttgctatttcattaggaacagttgaggccctagagtattagggcttaattcttgaggaaatccagttgaagaagactaaaggggccagagtttataaatttcagatttgtatagaactatcctggaaataatttcctattggtttgttttggaaccaattttggattttgaacaaaggaccaaacctcatccatcctttgttctgtaatagagcctatgtcagcagtaatttcttaccagtaacaattgagaagagcaacaggctgggatgtaatagtggtcactaaattttgccaagctgggttgaccttctttcaacaaatcatcatgtcgtcaggccactatgcaatttgtaaaagcagtcactgctttttcccccttccttttcctttgtttctccttatttctccaaaggttcaaaatcccataggtcactggacacatatccaattatttaactgtggacctagatcattccttttggtctagtttaagaggttactgatagacattcttccccttccagtaacaaattatggaaggcctgccctgcctttccttgaccttatagtggacttgtgtataaatttctaggttaagccaaaataatgtggagtaattataacagatttccctcacagcttattaaataatactaaatatgtattgctggcactgcctctcccacatcatatggagacatttgtaggaacataatagcaggttacacagtaatctgttcttgagctgctgcagtagatattcagtgtgtatgaggaggaaaggtgctagtgagagggcagaatgggaaaaacaatttattttttttgagacagagtcttgctctgtcgcccaggctggagtgcagtatgcaatctcggctcactgcaagctctgccttctgggttcacgccattctcctgcctcagcctccgcagtagctgggactatgggcacctgccaccatgcctggataatttttgtatttttagtagagacggggtttcaccttgttagccaggatggtctcgatctcctgacctcgtgatccgcccacctcggcctcccaaagtgctgggattgcaggcgtgagccaccacgcctggccggaaaaacaattttgacctgaaattagcagaactaaatttagtcttattttgtcctaaccagtaatattaccttaagaaagtttttctgctttttaaggtgattccttacttatttaaaaaaaaacagattttaataatatctcccccttagatctacctgcatcacataatgattaattgattcatttaaaaatagttatcggttacactttgtatgccagtactgtcctagttgctgggaatatacacagaataaaaggataaagatttatgtcttatattctcaatattggaatcagacaagtaaaatatatagtatgacagatagtaataattgctatagagaaaaaatatgtaagagtggggagtttggggaagggagggtggagcttacaattttaaagagggtgatcaggaagtactctattatagagaaggtagtatttggataaaaaatccacaggaaatgagtgattgagccatacatatctagaggaagaatgatccaggcatagaactcaagtgcagagatatacatggtaggtttggggcatagtgaggggccagctggtgtagggtgaaccagaagtagaatagtatggctgggcgtggtggcccacgcctgttatcccagcactttgggaggctgaggcaggtggatcatctgagatcagggattcaagaccaacctggccaacatagcaaaacccggcctctactaaaaatgcaaaacttagccgggtgtagtggcacatacctgtaatcccagctacttgggaggctgaggcagcagaatcgcttgaacctgggaggtggaggttacagtgagccgagatcacaccattgcactccagcatgggtgacagagtgagactccatctcaaaaacaaaacaaaacaaagagaagtggaatcgtaggccagattacgtaaggacttagcagtttggcttttactgtgtatgccatgggaagcctttagagagttttgagcagaagaatgatatgatctgatttatatttttaaaaaatcatatgattgctgtatttgtctgctgtgtgtttctgcagggagacaaggggatcagtcaggaaacttgcaattatccagtgaagaggtgagatgacttggactaggctgatagcagatgaggtggtgaacagtgtagggtctagatatatttgagagtggaatagggtctagatatatttgagagtggaaataggggatttgcctgtagattggatgggagttgtgaaagcaagggaagggtcacaggtggtttccaaggttttcgacctaaacaactgcaaggatggtggcggtgtttactgagatgggacaagaaggcaaaatgtggatgttgggaggaaacataaaacatttagtttggggaatgttaaatttgaaatgcccattgatattcaaatgtagacgtccaatatatagttagatacattaggttggtacaaaagcagttgtagtttttgccaactacaaatttggaattcaggagggagatttgggctgttagtgtaattttgggaattgtcaatgtatgtgtatgtaaaaccatgttagatgagaccactaagaatgtgagtgactttagggaagtcaagaggtccaaggcctgagttttggaattgaaaaggaaccagcaaaggagactgataaggagtgaccattgaccactgaggtaggaagaaaacctgaaggggtgccctggaaccaggggaaggaagtattttaaagattagctgagttaaatgctgctgataggtcaagtaagaggaaaaccaagaattgaccactcaaggttggtggggcctcctattcttagatcacataggtaggtttataaaatggtcttatttctggtcttgttagtaatatgtctgaaaaataaaacttggatattttaatatgaataaattacttttttaataaaattatactttaagttctagggtacatgtgcacaacgtgcaggtttgttacataggtatacatgtgttggtttgctgcacccatcagttcgtcatttatattagatatttctcctaatgctatccctccctcagccccccacctcccgacaggccccggtgtatgatgttccctgccctgtgtccaagtgttctcattcttcaattcccacctatgagtgagaacatacggtgtttggttttctgtccttgtgatagtttgctgagaatgatggcttccagcttcatccatgtccctgcaaaggacatgaactcattttttttaaggctgcatagtattccatggtgtatatgtgccacattttcttaatccagtctgtcattgatggacatttggtttggttccaagtctttgctattgtgaatagtgctgcaataaacatacgtgtgcatgtgtctttatagtagcatgatttataatcctttgggtatatacccagtaaagggattgctgggtcaaatggtatttctagttctagatccttgaggaattgccacgctgtcttccacagtgttgaactaatttacactcccaccaacagtgtaaaagtgttcctatttctccacatcctctccagcatctgttgtttcctgactttttaatgatcaccattctaactggcatgagatggtatctcattgtggttttgatttgcatttctctgatgaccagtgacgatgagcattttttcatgtgtctgttggctgcataaatgtcttcttttgagaagtgtctgttcatatcttttgcccgccttttgatggggttattttttttttcttgtaaatttgtttaagttctttgtagattctggatattaaccctttgtcacatggatagattgcaaaaatgttctaccgttctgtaggttgcctgttcactctgatggtagtttcttttgctgtgcagaagctctttagtttaattagatcccatttgtgtattttggcttttattgccattgcttttggtgttttagtcatgaagtccttgcccatgcctatgtcctgaatggtattgcctaggttttcttctagggtttttatggttttagtctgatatttaagtctttaatccatcttgaattaattgttgtataagttgtaaggaagggatccagtttcagctttctacatatggctagccagttttcccagcaccatttattaaataggaaatcctttcccatttcttgattttgtcaggtttgtcaaagatcagattgttgtagatgtgtggcattatttctgaggcctctgttctgttccattggtctatatctctgttttggtaccagtaccatgctgttttggttactgtagtcttgtagtatagtttgaagtcagatagcgtgatgcctccagctttgttctttttgcttaggattgtcttggcaatgcaggctcttttttggttccatatgaactttaaagtagttcgggctggagtgcagtggcatgatctcagctcactgcagcctcagcctcccgggttcaagtgattctcttgcctcagcctcccgagtagcaggactacaggcatgcaccaccatgctgggctaagttttgtatttttagtagagacggggtttcaccatgttgcccaggctggtcttgttctcctgagctcaagtgattacaagtattggcattataggcgtgtgccactgcacctggctgattctactctttggacatgatattcatcagggttcagatgtaggtaaagatggaaaagatacatttaattacaccaaaattaaaaagtgatgtgcattcaaatacaccaaggtcagtagattgggagaatatatttgccacaagtaatacaaaggacccagaaagacgaaattaaagactaaattaaaactaaatggtctcacagtattaatttttgacaagaatatggggaaatttttactatatattggtagaagtataagttggcattgtgtctttgtaatagcaaaaaattggagacagccaaaatgtctgtcagtaaagaaatggataaatagatgtgggttagtgacccgataaaaatgctatacagcagagaaaaggtgtaccaggtctatatctatatcatcatggatagatctcaaaaacgatgctaaataaaaaacaaaaaacaacaagtaaaattcagtgtgatactttttacatgaaaaatactaataaggctgggcgcagtgattcacgtctgtaatcccagcaattttagaggccaaggtgagaggactgcatgagcccaggagtttgagaccagcctggacaacatggtgagaccccatctcttacaaaacaattaaaaagttagcggtgtgtggtggtgcatgcctgtagtcccatttactcaggatgctgaggcaggaggttgaggctacagtgagccacgttcatgccactgcactccagcctgggtgacaaagcaagaccctgttcaaaaaaacaacaacaagaacacacacaaaaaaacaaaaaacccacaaatatacacaaaagtatcctatgtattatttagggatatatatgtaaaactattaaaaacagattatacaacaaatttatgatatgagtggctggtagagagtggggcagtcttaaacaagactttagcattatctgtagatgaaagtaaacatgatagaatgtttatttctgggtattagactcacagatttttgttatattagtctttgtactttttggtaattttatattagctggaaattttaaaagaaagggggtcaagattcataggatgaacccccagaaaataatttgttgataacgtttacgtgtaatttttctttttttacctaacccatttacttctgtctgtattagaggaagaggaaatgaggtaactgcattacattaattcatgacagtggtttctcctaatgtgtccttggcatcacactcagatgaaggagtgaggatctttattagcacagatcatgcccttcattctgactcttgattttatttttaattactaactgcaagcatgtcaacccatgggaagcacatttggtttcatagctatcatcatggagatgcyagcatgacagactaggatgtatagaagtttaataacagcattgtactttttctcttgtctaacctcttccctatagggaatctttaaccagtttcagtgtagtagtgaaaaagtgcttccatctgacactctccgcagtgctctggcaaagactttccaggatgaacaacgtttccagctgggaattatggatgatgctgcagagtgctttgtaagtgctggcctctggccctctttgatatggggtgggactgctgatggtctccatcagggactggctactttatggtggaatttgctgtgcccttatctctacagttagaactaggagttttctctgatttttcagggatctaaaatgtctctgttatagcagtgtgttattatttttcctttaggctggtggttttgtgcttgtcattgcataaaacatcagctctcaccttcagaggatccaaggctcattaaaatacagattgtacccccagagcttctgatacagtaggcccggcagaggagtcccggaatatctgtatctaacaggttcctaagtgatgctaatactgatgctgctcctccatttctaaagataattaatcagggaataactgagtccctagcataagtgtgatgtgctatatggctacattgcctccagtgcccctcgctcttctgaactctgtgttctatacatcaaccttcgaaagactctctgtaaatccatttagaaaatttgaggccgggcatggtggctcatgcctgtaatctcagcactttgggaggccaaggcaggcagatcacaaggtcaggagttcaagactagcctggccaacgtagcgaaaccccatctctactaaaaatacaaaaattagccaggcatggtggcgggcgcctatagtcccagctacttgggaggctgaggcaagagaatcacttgaacttgggaggaggaggttgtagtgagcctagatagcaccactgtactccagcctgggtgacacagtgagactctgtctcaaaagaaaaaaagaaaaaaaaaagaaaatttgagagtgatacatatctcatcacagggtaaaatgtggccccaaatcagaggtgctcctgaggaactggatcactgatatattgctggtgggaatgtaaaatggtatagctactctggaaaacagtttggcagtttcttaaaaagctagacatgtaaactaccgtatgatctagcaattacattcctggacatgtatcccacagaaatgaaaacttatattaaaacaaaacctgtttatgaatgttcatagaagtgttattcataatagtaaaaaactggaaacaacccaaatgtccttcagtgagtagacggttaaacaaatgatgatacttctgtaccgtgaagaactatgcagcaatacaaagcattaagtatttttataaaaataaaaagaaactattgatttacacaacttggacagacctcaagggaaagtgaaaaatgcaatatcaaaaggttatatgctggccgggctcactcctgtaatcccagcactttgggaagccaaggtgggcggatcacttgaggtcaggagttcgagagcagcctggtcaacgtggtgaaacgccgtctctattaaaaacacaaaacttagccaggcgtggtggcacatacctgtaatcccagctacttgggaggctgaggcaggagaatctcttgaacccgggaggtagaggttgcagtgagccgagatcgctctactgtactcctgcctgggcgacagagacagagtgtgtctcaaaaaaaaaaaaaaggttatgtggtatgtgatcccatttatataacattcttgaaataaaatgatggagatgagagaagacattagtgattaccacaggttagggttaggtttggacgggtaagkctctaaatggttagcatgagggagccttgtgatggaactggtctatatcttgataaaatggcatagagctatacatacacacacacaaatgaatgcatgtaaaactggtgaaatctgaataaagtctggatcctatcaatgtccatttcctgatacagttatcaaagttgtgccgggtgcggtggctcacgcctgtaatcccagcactttgggagcctggggcgggcggatcacgaggtcaggagatcgagaccatcctggctaacacggtgaaacctcgtctctactaaaaatacaaaaaattagccgggcgtggtggcgggcgcctgtagtcccagctactcgggaggctgaggcaggagaatggcgtgaacccgggaggtggagcttgcagtgagccaagattgagccactgcactccagcctgggtgacagagcgagactccatctcaaaaaacaaaaaaacaaacaaaaaaaacacagatgttactgttggaggaagctgggtgaagggtacaggggatctcctatacatttttgaaacttgctatgaatttataatttttttaaactaaaaatttttaaaaatcaaaatattcctaccttccagaagggttgctgtttctatgggtaagctgcttaccaatttatgtatttgtctattaaatattgttggtatactgcttttgttctttccctgtcaggaaaacctcytgatgagaattcacttccacattgctgatgaaaccaaagaggatatatgtactgcccaacactgcatttcccatcagaaatttgcaatgacattgtttgagcaggtgaactctagctccatctttttttagacatttcttccagaacactttatcctgggatgtggggtgttaaatgggtgccaaaacagttcctgattatggttgcttggttttgcctttttctcttttgcccagtgtgtatgtactagctgtggtgccacttctgatccgctgcctttcatccagatggtacattatatctccaccacttccctttggtgagtcttacaagattttctgttgtgcgtttaggcattcctccagttgattggacttttttttttttttttgagacagagtctcgctctgttgcccaggctgcagtgcagtggcacaatctcggcttactgcaacctccgcctcctgggttcaagcgattctcctgcctccatctcccaagtagctgagacttccagctacttacaaatagtacacactgcgctaatttttttgtgtttttagcaggacggtgtttcatcatgttggtcaggctggtcttgaactcgtgacctcaaatgatctacctgccttggcctcccaaagtgctgggattacaggcgtgagccacagtgcctggcctattggactttaattggagacattcaaatagttttatatcttggccgggcatggtggctcatgcctataatcctagcactttgggaggcccaggtgggcggatcacttgaggctaagagttcgagaccagcctggccaacatgacaaaaccctgtctctactaaaaatgtcaagaattagccaggcatggttgcgcgtgcctgtaatcccagctattctgaaggctgaggcatgagaattgcttgaacccaggaggcggaggtttctgtgagctgagattgagcccctgcactccagccaggtaacagagcgagaccctgtctcaaaaaaaccaccaccaacaacaataaaaacacaaatagttttatatccttattgctgaatctgtgctatattgtaggaatgcagaacagtaatttaaaaataatttttgttctccttctttcctctcccatccctccccttttcttaggctcagtactggccagcaaagtgggaggaggagtggggattctatgagctttggatctggggacaggtagaggtacttactgtgtttatgggacactgagcctggtcaggggctttggtatagggggcagaggaagaaagtcaaatgtgtgagttaggaatgtacattaatgtttgatttagcagtaactaaatacaaaccatcatcccccttctattccccatcttgaagcaatcaggctatttgtatgctggaaagacgagagaaaccttcaccaagcatgtttggtgagctgctgcagaatgccagcaccatgggggatctgcggaactgtccagtgagttaaatcaggggtggggtttggagtgggaaagggaaccatcgatcagtggaattgatgcaaagccagtgggaaacatgttgaactagccttatatatgtatttcagagcaactgtggagagaggatcaggattcgccgtgtgttgatgaatgctccacagattatcacgattgggctggtatgggactcagaccactcagacttagcagaagatgttatccacagcctgggaacctgccttaagctgggtgatgtgcgtgttagttacctttatctctcactttgagttcttgcgtcttagtattgcttaggagcagtgagcactagacaaacaggtatgtcctagatgacaagtattataatgttttggacagataaacttatttgtgtayagatacccgtgcttgcaggtatgtgctcatatacctccttttataggtggcaaagagtttttaagaagaaatgggatgacttgaccttgaaagacaggataggcagagcttagctactgataaaaataaatcagtaattcaaagagttattatatgttctattcattgttagtttatacgagtataaagtagggaagggtgttcaaccatgggaggtagtaaggtccaaagaggggcattcctgactagaactgctatagtaggtgaagaagttaaaagttggtgacctgagcccaaaaatatgaaattcacagtgtggaactaatgtctgggataatactgggactaaagaaaacctttgttattgttttttaatgtcattaagccatgactgagaataaatgaactttctgggatcttattttaggttttcttcctaaggaatcttacctgagtaggctgtgagcaataaaatctccatttttcaccagtgcctacctgtagtcccagctactcaggaggctgaggtgggaggattgcttaaggagttcaaggctgtagtgtgcaatgattctgcctgtgaatagccactacattctagcctaggcagcatagcaagaccctgtctcttaaaaacaaaagcaattgtttcttttttgtttttttgagatggagtcttgctctgtcgcccaggctggagtgcagtagtgtgatctgccttcactgcaagctccgcttcctgggttcatgccattctcctgcctcagcctccccagtagatgggactacaggtgcctgccaccatgcccggctaattttttgtatttttagtagacacggagtttcaccatgttagccaggatggtctcgatctcctgacctcgtgatctgcctgcctccccctccaaaagtgctgggattacaggcgtgagccaccgcgcccagctggtttttttttttttttaatccaactttcctggctcctcttatgataggccctggtaagaaaattattgaaaggtatgaagaaagatcatcaccataccagtttactggccactatctgtcttgcttttccttactttttgtctttttgggttaatttctttctttctttctttctttttttgagatggggtcttgctctgtcgcccaggctggagtgcagtgtcatgatctcggttcactgcaatctctgcctcctgcctcaacgtctcaagtagctgggattacagacatgcaccaccacacccagctgatttttgtatttttagtagagatggggtttcactatgttggccaggctggtctcgaatacctgacctcaagagatctgttcacctcaccctcccaaagtgtagggattacaggcgtgagccaccacactgggcctaaagatagggtcttgctatctagtctaggttgttctcgaactcttgtcctcaagtaattctcttaccttggcctcacaaagtgctgaagttaaattctgatgattaatctaaactaacaaaaatcttaaactgaagggaagagaagcaagtcagtaccttacttaagaaatgytggtggagtctgctgagagatgatgtggaatggttgaatatgtgactgtgctttcttttctcttctttcccctcagctgtttttcagagtgacggatgaccgggccaagcaatctgaactgtacttagttggaatgatctgttactatggcaaacattattctacattcttttttcaaacaargattcgcaaatggatgtattttgatgatgctcatgtcaaggaggtaggagtagtcaagtcctttttgaagtgtttggtgactacaaaaaaaaagaataatcatttgtctttagtgtttcattttcataattttgaatgggacctccccacatttctataaaacatatatatatatatwttttttttttttttaattttttttttttttgagatggagtctcactctgtcacccaggttggagtgcagtggcttggtcttggctcactgcaatctctgcctcctgggttcaagtgattctcccacctcagcctcctgagtagctgggagtacatgcgcatgctaccacacctggctaatttttgtatttttagtagagacagagtttcactatgtttgccaggctggtctcgaactcctgaccttgtgatccgcctacctcagcctcccaaagtgctggaattataggcatgagccactgtgcccggcgtattttatatttttatgtctgtctgcctactgaattcatgaaggtatcattttgtcttcccctgaagatggctagttcttcgaggataggaacaatgtatcttctattatatcctctgaatcccctcaccaggcattcagcagttttgtatttataggtgacaaagcattttactttattttttgagatagggtttcctcactctattgcccaggctggagtgcaggggcgtgataatggctcactgcagcctttattttccaggtttaagcaattctctcaccttagtcttttgagtagctgtgactataggtgtgtggccaccacacccagctagttaaaattttttgtttttttgttttagagatgttacccaggctggtctggaactcctgggctcaagtgatcctccctcctcagcctgccaaagtgttgggattacaggcgtgagccacagtgcctggcccaaagtgtttttttaaactataatctccttttttttttyctagaaaatagtttttcttcagtcctgagaagtcagctccttacgtgggctttggtggagctcatgggtcagcactcgaaggtctaaatctgggtggggatgttatcaccttttgggctcggggagattgattactgactaccttgctatgaatggcacaattcatgtagtaacgtagctttacctacagcttaggaagcacataggcatcaaagaaatttacttcagaaatgtccttgacagctgcagcctttactatgttttgaatgagaaacttttttttttttttgacatagggtcttgctctgtcacccaggttggggtgtaggggcgcgatctcagctcactgcaacctctgcctcccgggcccaagtgattctcgtgcctcagcctcccgagtagctgggattacgggcgcgtaccatcatgcctggctgatttttgtatttttaggagagatggagtttctccatgttggccaggctggtctcaaactcctgacattaagtgatccacccgccttggcctcccaaagtgctgggattacagatgtgagccaccacgcccggccttgaatgagaaacttcttaatagccttgtccttgggcatgcctcaggcacagttcatgcagtgagtgagctgcacatagccacagccctttttggcatgccatgttctttcctttctttgtcttcttggaagctaggaccccagagaggaattttttttttttttttttaatgtgtgtgttgattgatttgagtaggaacactctaatgcctcaaatgaggttataaggttaatacaaagttcagaatttcagatcttggagttatcagtgggtactactttgtctcggggctgctgtaaattattctttgttgtctccctgaagtgccccatcacagagtaacatgtgttttgggatagttataaggcatgtagggttataatgacaaagcaggaaagttggtactgtctaaaccacagagtttgtggttgaagtggcttatgtgatctgcatgagttaggaagctgcttgtgataaggttagcagataaggagataaggtgtgactataatctacaccaatccacagactttaagcagtgtcttccacaaatagtaaagtatttgtcaaattcccttattcttttctttgtctcttttgcgttgttgtaatttggggcaatttatttaagttcttttagatttagggtttttatttgaaaatacccttacaaagtagtaaatatgattatattaatatgtgaagagcatataaatgttttaattaataactcagttttaagtttactggacatctgttgtgaacatatcactatgctagttgtctaaccccaagagcagcacattatctaagaaatgtgactggttcaagcttaagatggtgtgagtttgaggattgggttgaattgattctgtggctgttctctcttttccactatggtaacagagctgaatccagcacagggctaaggccgagaggttcaattgtctattctaagcagtttgacattttatatcctaccatttgcgaactctgaaactgaatgtcatttgttctaaggcagtctgtgaaagagtttctgtctgctcttcagcttcatgaaagtgattttaatatttgggagaaaactaaggaaatgcagatttctagtgagggcttaatttgatgtctgtgaaaagaaattggtcaccaaggcagctgaagttccctcacgtagcatatccacctttgaggacttttattcctattttacaactgagttgatggttcacagaaataaaattaattttattcattcttttattctcctataggattttagtgctttctaaaaggacttagcaaagaaaaaaaagatttaattaaaaaagtgttaggtctgagatcttttttgctgcctttttacccaattcttatcttttcatctcttttattttctttagaaatacagaacagaaagatatgttgtgaattgtgggtataaagtataattgtcatgttcttctggttgtttctggttcagattgggcccaaatggaaggatgtggtgaccaaatgcatcaaggggcattatcagcccctgctgctgctttatgcagatccccagggtaccccagtttccacccaggacctgcctccccaagctgagttccagtcatacagcaggacatgctacgacagtgaagattcaggtgagcagccaggctctttacctctcctctctcctcaccccatgcratcaaacagttgggactcatagttaattatgtgcttagctcrtaacctagcttggagaaagaggatccattagaggtaagaaagaagtgccaatttgtgctgaagcctaacttgggccagcctttatttccttcagttgtcaaaacagtgttgcctaaatcacttggcctcaactcagaagtgaaaaggaaattatgtttatttagactgagatattaagtttgcaaggctcaatatttaaccttctaatattggtgaggatggctgatttttattagcaatttaccagtgacttaattgagttgttttatttgagccactacaaggctagttattttgtttggcatgagatatttttgttttaaaattgcaaatgtgtagctgggcagggtgatgcatgcctgttatcctagctatttgggaggctgaggtgggaggatcacttgagccctggagttcgagcctagcctgggcaaaatagcaagactctgtcttggaggggggaaaaattccttgtccagtagtaatattcctctgcttatgaatcagttgttcacttctaagttaatttttcagaacttaagtaacgactttctgtaaaaacaattttcagcttgatggctaaagttctagggtagctcacagaatcttataatatatttgaggtataacctaatagttttggcttgattactgaaaaggaggaagaaatattattttacccttctggatctggtactggcccttgatataattttgaaagagaagatacttgactttgacgtctttctttctcccctttgtacctccctcctgcttggtacctggtgctttcttccacctttcataccccacccagacctgttctacctcttctcccttcagtcaaatacccatttgtcctattatgcttatctcagctaggtattcagagggaagcagtctgattgaactaatttatactaatgtatgtcatataacagccccaataatttctcagagtcattaaaaatgcatctggtatcaattcaaaaatttaagtgacattcttggcagtataggagaaagattatgggataggagaacaactgactatgtatgacaggttgtcctgggactttccatctaaatagatcttacttttcacaactttttcatcacttctgcttttcccccgataggttttataaaaccctcacagtttttcacagtggcaggcaaagtgagggcttcagcagggtagggaaagggatgggaggaattttacatgtgtctgggtgatctggaagttgggtgttgggaagaatggcttgatggtatagcatatccttctcacacttgtgtctaggaagttcttgccttatggagctttgttgtgtccatctcttttccttctctttgctactgttctgtttcctcactttttgcatatgtgtttcctcctcctctcagggagggagccctccatctcaagtgacactcgaacagattcctcaacggagagctatccctacaaacattcccaccatgagtctgtggtcagtcacttctcttctgattctcaggggacagtcatctataatgtggaaaatgattccatgtctcagagcagtcgggacacaggtagggacttatacagagggtcctgcttgcctgaatcaattcctgcatagatctcctaagaaaaagaaactgtgaggccaggcgcagtggctcacacctgtaatcccagcactttgggaggcygaggcgggcggccraggtgggtggatcatgaggtaaggagatggagaccatcctggctaacacacggtgaaactccrtctctactaaaaatacaaaaaaaaaattagttgggcatggtggcaggcacctgtagtcctacctactcgggaggctgaggcaggagaatggcatgaacccaggaggcgaagctttcagtgagctgggatcgtgccactgcactccagcctgggcaacagagcgagactccgtctcaaaaaaaaaaaaaaggagaaagaaactgggggaagtcagaaatgttcgttacgcaaaggcacaatggcacagaatttgggcaattcaatgggatacaaagaagcaacacagttttgaatgaaccgtgatgctccattgcacatactcctgtcaatagcagcatgtcaataaagacgattgtaatgtgattattgatgtgattattctgaagtgtgcttttcttctcctatactcttgattcccgtagtatcccattaagcccctgtgatcttgcacatcatcatgttctcatgccaggctttgtcctaagtgaagagctttgatagaaggggcctatttatgggattggtgagggacaactgcatgtcagcttgctaagcttcctgaaggatagagaagcaaaagaatgaaagatacctatttgttattgtgagttccatgcagagaatattcttgcattgttttgtttatctgtaggagagtatgcccatgtcagaggaagaaatcaatacagggaagaacagtgaatgactgctgagatggaaagtttattctgggagatagaatgcctaaggcatagaacagtgtccatattcttagggactgtgagaatttgtgagctcattgtttgagattggtggtttataagctgtgggggctttttttttttttaaatatcaagaatttcaaagatattcaaaactgtatagaatagtgtactgcccattcatgtacccatcacctagtttcagtaattataactcatggccagtctagttttacctgtacctttacccactcctggattattttgaagcacatcccaggcattatatcacattttccataaatatatcttatgtttgctcaaacataagaaatcactttttaaacatagcattataacacctttttttttttgagttggagtcgctctgtcgcccaggctggagtgcagtggcacgatcttggctcactgcaatctccacctcccaggttcatgccattctcctgcctcagcctcccgagtagctgggaccacaggcgcccgccaccacgcctggctaattttttgtatttttagtagagacggggtttcaccgtgttagccaggatggtctcgatctcctgacctcgtgatccacccacctcggcctcccaaagtgctgggattacaggcgtgagccaccgtgcccagcccagcattgtaacacttaaaaataataatgatgattccttaaaactgataggtaaccaatgagtgttcacatatccacttataagtatcataatattttcatggtttatgtgtttgactcagcatctaaatgaggtctatgcattctgatgagttgataagtcctttgcatttcttttaatctactgttttttcctctattttttttccttgcaatttattgctagaactaggtattttgtcctgtagatttcccacattctgaattttgctgattttattcctatggtatactttaacacgtttctgtgtcctatatttcttgtaaattggtagttggacctagaggttttgtcagacttgtgctggctttcttttgatgactactgcattgattgtgtcaggtgtgagttttttagacccactttttgaagctgtgaaccagagagaagccaagccacaggataaactaagcatattttccagtagaggcagatttgtgttaatggtttgaacatgcccattggtttaacatttgtaagacttagttgcggccgggcacagtggctcacgcctgtaatcccagcactttgggaggccgaggtgggtggatcacgaggtcaggagatcgagaccatcctggctaacatggtgaaaccccgtctctactaaaaaaaatacaaaaagttagctgggtgtggtggcaggcgtctgtagtcccagctactcaggaggctgaggcaggagaatggcgtgaacccggaaggcggagcttgcagtgagttgagatcgcaccactgcactccagcctgggtgacagagcgagactccgtctcaaaaaaaaaaaaagacttagttgttccaagttatttcctcctctcttaaatctttcttgtgggcacagaggtagcaaacgaccaaataaaagcaatacaagattccaaggggcaactgattgaaaatatgtatccatatcactacactggtgatacttgaatatgcataaggattctcatatgctatcatgtgaaaacaaatttttgttagctctccatgcatttgacctaggttttttttttctaagcatatcttcaaacttaatttacctgcttaattcatctctggcttctagcaatttagttgcttatatcctttagaatctgacttttgctgtcatcaaatcatgctcatgtatttgcatactatgggcatgaagcagggcaagttacataaaagagcccagctctcctggttttcccagtgattagtattaaggaactatgaagtgtaatctctggatggagccaagtttcgtgaagatgggttggggataggaatgagaatcaaagttgaaatgccctttaaatgatccacaattaaggaaagcttggaactgggtcttaaagccatataaaatcagacctcttgtgggcaaagtctggagtatccaggataataccagatgtactgaaaatcagactttatttgatatgtgttgctaaataaataaaaggaaaactctgtcttcaatttatgagagtgaaagtatatggctacctgacatttttatataatctttaaaacttttgcctttaaaaagttacctagaaacatgtcattagtccttctgggtcactggggaagattaggagtgggattgagattggtcattgctcaggagacattgtaaatttggatgctcccagcttctctgcatttatcttttttttttttttttgagacagtcttgctctgtcgtccaggctggagtgcagtggcgtgatctcggctcactgcaacctcctgggttcaagtgattctaatgccttagcctctcagtagctgggactacaggcacatgccaccatgccggactaatttttgtatttttagtagagacagggttttgccatgttggtcagtctggtctcgaactcctggcctcaagtgatctgcccgccttagcctcccaaagtgctgcaattataggtgtgagtcactgcacctggcccttctctgcatttatctactgggaggttcctacactgaaatcagatagcctatgccctacagcttctgttccatgggtactctaaatttgtggcactcccaaagggagattaggtaggttctcaggagggtggaggttagtctcagataccagcttaccccaatttccttgttttttcaggacacctgactgatagtgaatgtaatcagaaacacacatccaagaaagggtcactgatagagcgcaagaggagctctggtcgggttaggaggaaaggcgatgagccccaggcctcgggataccacagtgaaggcaagcccttctgcactgcttctctttctccttcattcactctatcaaacttctgtcatgctccagactgttggcttctcctttctgttcagagggcttttctttgctttttcgacattggggtctagtatccatgatcactttaaacatctatatttctttcattctttgtgtttttaggagaaacactgaaagagaagcaggctcctagaaatgcctccaaaccatccagcagcaccaacaggctgagagattttaaagagacagtcagcaatatgatccataacagaccatccctggcttctcagaccaatgtaggctctcactgcaggggcagaggaggagaccagcctgacaaaaaacctcctaggaccctgcctttacactctcgtgactgggaaatagagagtaccagcagtgagtcaaaatccagttcttccagcaagtatcgtcccacatggagacccaaacgagaatctctgaatattgacagtatctttagtaaggacaaaaggaagcactgtggctatacccagcttagccccttttctgaggattcaggtgaggagataattagggaagaattgggcttttgaataaagttgatttatgtctttttaaaacctgggttttttggtacatctggcaaggggcacttttactctgatgtcgggtgttttagggatatgagttcagtgaataagtagctagagggaggagctagttaggtcttgattttaggcaaatgctaaatctacctcattttccatacctgtcttttgattgggatagctaaagaatttataccagatgaaccaagcaagccaccttcttacgacattaaatttggtggaccaagcccccagtacaagcgctggggcccagcacggccaggctctcaccttttagagcagcacccccgactaatccagcgaatggaatctggctatgaaagcagtgagaggaacagcagcagccctgtcagcctggatgcagccctgcctgagagctcaaatgtctacaggtattgtttggcctttgaacagcaacattgtctcttgcagcaatgtgagccacctacttggggctttcaggcatggctkagacaagtggagggatggcctttgctattatctctatgtgctctttcaacttcctataacaacagcaccctctgctggaagaacagaggcacttgagaaaggagagagaactttctatttgaaatacagttatcatgtataaaataattttaaaaaattaggttcagggggcatatgtgcaggtttgttaggataaacttgtgtcataggagttcattgtacagattattttgttacccacatattaagctagtactcactaattatttttcctgatcctttctttcctcccaccctccaccctccgataggcctgtgtctgttgttcccctctgtgtgttcatgtgtcctcaccatgtagctcccacttataagtgacaatatgctgtatttggttttctgttcctgtcttagtttgctaaggataatgaaataattgtttagtgcttgctttggtagcacatatactaaaattggaacaatacagagaagattagcatggctcctgctcaaaggtggcacaaaaatttgtgaagatttctgtatttttcagatatgtaggataaacaagtctagggatctaatgtaaaacatgactacaattaataaaattgtactgcatatgagattcatggtaaatgagtagattttaactcctcttgccacaaaaacaaaaaaaatgggtaactatatgagatgatgggtatattaatttccttcaattatagtaaccattttactgtctctatgtatctcataacatcatgttgtataccttaaatatacacagtaaaaaaatgtattaaagaacagattaggtcaggcatgttggctcacgcctgtaatcccaggctagcacaaaaattagtgaggcatggtggtgggcgtctgtaatcccaattacttgggaggctaaggcaggagaatcgctggaatccaggaggtggaggtggtaatgagccgagctcgtgccatggcaactccagcctaggcgacagagcaaggctccatctcaaaaaaaaaaaaaagaaacaaaaacggactaggcctgccgcagtagctcacgcttgtaatcccagcactttgggaggccgaggcgggtggatcacgacgtcagaagttcgtgaccagcctggccaacatggtgaaaccccgtctctactaaagatacaaaaacaaaaattagccgggcgtggtggtgggagcctgtaatcccagctacttgggaggctgaggcaggagaattacttgaacccaggaggtggacgttgcagtgagccaagatcgtgccattgcactccagtctgggcaacagagtgaaactccatctcaaaaaaacaaacaaacaaaaaaagaatgtattagtgggccaggcgcggtggctcatgcctgtaatcctagcactttgggaggccgagctgggtggatcacaaggtcaggagatcgagaacatcttggccaacatggtgaaaccccgtctctactaaaaacacaaaaattagctgggcatggtggcgcgcacctctagtcccagctactctggaggctgaggcaggagaatcacttgaacccgggaggcggagtttgcagtgagccaagatcacgtcactgcactccagcctgggtgacaagagcgaaactccatctcaaaaagaatggattagtgaattaaaacttatgtaatactaaaatcagagaagaagcccaaatgttattttgggacagtgttttgttgtcgttgctttttttttttttttttttttggtatcgatggggtttcatcattttgcccaggcttgtcttgaactcctgggctcaagtgatttacccacctcagcctcccagagtactgagattataggtgtgagtcaccacacccagtatggtgggatagtttttattttgatttgttttagggtcactgggactttgtgttttataatgctaataatattcataataatgatgacagtttattagcactcattgtaccctgcccatagggctcagtttgctttataactttcaaatctccatacattatttttactgagttgccacagaggcaatttttctgttttcttttttttttttttttttttgagatggagtgtctcgctctgtcaccaggctggagtgcaatggcacgatctcggctcactgcaacctctgcctcctgggttcaagcgattctcctgcctcagcctccctagtagctggcactacaggcgcccaccaccacacccagctaatttttgtaattttagtagagatggggtttcaccatgttggccaggatggtcttgatctcttgatctcatgatccgcctgcctcagcctcccaaagtgctgggattacaggcatgagccactgtacctggccaaggcaatttttctaatagtagagctgctttgaaaagcatgattatatcttctacaaaggtgataaccacatgttcatactctgtcaatgttcttccctgtccacaggatcctgttgagttttacttatgagaagatgctacaaaggtttagtaagaaagaaggaaataaatatgaaaccaatatgttcattagtacattcaacagattttgaatatgtattatgtaccagatactgtgctagatgcacaagttgtgaatgaggtgagatgaggttagataggagaatgagtggatatttcaattcttcagaagtagtttagcagaagctctaattgtgtagtttgattttttttttttgagagagagatttagtcctaggaatgttgctataacctgctttcatgctttcactagactctgagttctcttttgaagggatccaagtgctaagagatcagctgggttggttccttcctggcgtcatatcccaaagtcgcacagcagtagcatcctggaggtagactccacagcatccatgggtggctggacaaagagtcagcctttctctggtaagcagaatgacactgaatttgaggactggatttgaccggcagttttgtctggggaccagacttacctgagcacatttgaaattagaggacagttacaggccgggcgcggtggctcacacctgtaatcccagcactttgggaggccgaggcaggcagattgcctgagctcaggagttcgtgaccagcctgggcaacatggtgaaaccccgtctctactaaaatacaaaaaattaaccagcgtagcggcgtgcacctgtagtcccagctgctcgggaggctgaggcaggagaattgcttgaacctgggaggcggaggttgcagtgagccaagatcgtgccactgcactccagcctgggcgacagagtgagactccatttcaaaaaaaaagaggacagttacagtttgagtattccatcagaatgtaaatgtagagtcatttcagttgctccatctttggatttatctattttttgttctccatcacagcctgcatgaatatttctttctacctggagggagcccttgtgggagcaagaagggacagaaatatggtgaacagtgttactaacatccccattcttcagaagaataaatcctagggctttccttggattagggacagcctcttgggaaatggatttcttattgtttagtattatgaattgacataccaaaggggtacatgtggctatttgcaaaacttggaaataagcaattcaaatttatccttacccctggctaaatatcttagtcttactaccaattctcttgatagttactgacaattcttagaggtagcaggaagaaaggcctgcagcagcagtagtaaaaaggcatgaacccttttaggtatgtatactaaaggttgtggacatctggcagagcagaacaatgcctatagaggcagatatctctggaatcctgggctctagtaagttatagttagagacacgtggaagacatttgggcttcccattgtaattatacatttgatttattccccacattttaatttatttcatgttgaataacattgtttcaagaaacttgtgaatcgtgcatgagactattctcccttctcttcagatagccagcatttttttaattacactaatgactgagtctcatgatctcctgaatagtcctcaattctggaccagttggatagaattcaccaacagcgttcttcaactggtaaaagataattagcaaggagttatgacaagattcttcacacaccatatcaccccaccatcctgtttgtataataagccctatttatgcgccacaatttgatctaaccattttattaagacacagaacaaacattcttatatggtaactttgcatactcctttaaaaaactacaggggtaaatcaagtccagtaattcaataatctgccctttgcctcctgaaattgaaggagccagtgttaccattgcggtatatatctttctgtctttttctatgcttacacaagtacatagataagtttatgtacatatatatataggtaagcaccatttttaaaaagatgaagtcatactatgcatgttattctctcaatttttcacttaatttattatggacatccttctggatctatttagatccatctagaaaggtttataaaattggacttatactgctgtggacattttacaaattcaaagaggtggtggaaattaagggtgagaaaatgacattcttgaagctccccagtcagtcagtgacagcacctggtagaaagtgttctctaatgattagagcatgattatgaatttaacctacttgactttaatttagctccattatttcccatttggtttaccttgggcaaattatttatcctcctgtgactcagtttcctcattcctaaaatgggggtaatagtatctacctcataagttgttgttatgattaaatgaaataatacatgtaaacatgcttaaaactgtttctggcacatagtaagtgctgaacaaatgttcagcgtaatactattgttgtgaagcactccataaatgttgttgttgttgttgttattattattattattttgagacgaagtcttgctcttgtctcccaggctggagtgcaatggcgcgatcttggctcactgcaacctccacctcccgggttaaagtgattctcctgcctcagcctcccgagtagctgggataacaggcgcctgccaccaaacctggctaatttttgtatttttagtagagacggggtttcaccatgttggccaggctggtctcaaactcctgacctcaggtgatcctcccgccttggcctcccagagtgctgggattacaggcgtgagtcaccatgcccggcctgttgttattattattattattcctggcccaagtgccatccggaatctaattatggaaagcattatccaaaatataagctccaaattgggccaggcgcagtggctcacacctgtatgtaatcccagcactttgggaggccaaggtgggtggatcacgaggtcaggagttcgagaccagcctgaccaacatggtgaaaccccgtctctactaaaaacacaaaaattagctgggcttggtggcatgtgcctgtagtcccagctactcaggaagctgaggcagaagaatcgcttgaacccgggaggcggaggttgcagtgagccaagattgcgccattgcactccagcctgggaacacagtgagactccgtctcaaaataataataataataataataataataataataataataataataataaataaataaactccaaattgaaagcaagaattccaaaaggaaagtattgcagtggtcataaattcatcaagtacttagtcttggtaatggaaatgtggtgacttctcccttgcttatattacaggtgaggagatatcttctaaaagtgaactggatgaattgcaggaagaggtrgccaggagggcgcaggaacaggaacttcgaagaaaacgggagaaggagttagaggcagcgaaagggtttaaccctcatcctagccgcttcatggacttggatgaactgcagaatcagggtaattgttgtgagcattaggttgtgggtgatggggacagacagaaagggtagaaaaaaacatctaagcttgtaagttccctgtcttctctttagcaaaataattttttaartcttaattcacccattccagtgagaacaagttagagtaggatgtgacaagactattgactggagataggcactgatttggggcacatctattaaaagcctatagattagagatagtatatcgttcatgaataatgtttcccatgaacatctgttgaaggtgtaaataaaactagccttgagtcagaaatagctgaaaatggcagtgagccacactgacagtgaggggaattctacttgctgggaagaaacatacccatgaaatattccacctggagcatcagggaagtggatctgccaaacaggagcaagaacaaagccagtttacttttgataccatgacaattgattctgtaacctcaaacaatttgcatggacttyacttccacaactgccccatgttagactttttttcttcctagaatttttttaggatgtcactttgtaccaaaagagactagccttcaaaatagttcagccaagctgaagtatctaccttaaataggccatatatcttagtttttttcctataaaatgactttattgtttttataattcggaaaccccacttacaacaaattgtgctaaagcagtatgaaggtcccagtttgtaagtgcaagcttttaactttgctggctgttttctgttgaccacttttctctttttatatacacttagagaatcttcttgggccaagtaatcctgtttgggggcagcttttttcctttaatactactctcttttgattcaaggtaattgttgccttatatttcccaagacattgtattagtttccaaattagttttaaattcctaatacttagctgtctctatatttggatagtcttttttccctttttgacctcaagctgtatcacattggtgtcccaggtttattttgcttctgaaaaaaggggtcttgtcatttctctcctttttttctctctctgccagttgggcaatagattaaagttaggaggagatcccactggcaatatttcattgtcagttctctatacactgtggttcagcatttcctgcatgagcaaggaatggaatgctaagattctgaaggataagaattaaaatttagtacagtgattgatcaactatagcttgtctagatctccatagagtagagaacttaaaaaaaatggctctacgccctacctctgattataaaggttgtatacatttagttgattacaaatattatgagagaacttcaggtctggggagtaagggaaaccacacctctagagatagagtggatcctgagtgccaagttcttcagaaccaacctgctgtttccattgtcttcccattgctctcaaaaagtcatgatgaattaggaagtgaatgttagggatgtggaagagcctttcttaccatgtcctgctggaggtaagtggaggatgagggacattatgggagaagtgactcagacatttttttttccctgcaaccttgtgaaggctcactggcaatcccatttgtaggtgaaattacattacagcttgctgccaatgtatgattatgagtaagtagagggcaagggatacataaacatgagagttcttttacaaaaatttttctgcctgtacttcctagccttttcatccggtattgtttttagactcttctgcacctgctttggcacacattcactttgagaggaggatggaatattccctgcttgctgtatgggaaggtgacttctttgggggtagttttggtgaggaatagcatgatgaaagtaaatacttagcaacgcttatgacaagtatgtatatgcaaaccaggaatgaaggcagttcaactgccctggcagatacattggattaggaagtgtagaccatctgtgaccaagaagtgcactgattttccagtttagggtggtgcatagaggactgtgaattggtgaagtaaataagtggtatgaatggctgtccacagaataatgaagctacctttgccataacatagcagtgaacgtcttagttgacatctagggtgttctgacactagttggcaagaattgcactgggaaagagcagttcaattccgggcataagaacctaaccttctgctattactttgttctttccttgagggacttcctccgctcgcactgtcatataagtaccgcgcgctaaccgattgcaccactggagctccttccttgagggacttcctaagggtcttggtgttagaatatgtggccattaatggcatgcctctctttcatggccttggtaacatcttggttaaggcaaaatggatgtcctgcttgttttcagataattcttaataggaatagacagttggaataagggtagaccagtggctcagcagcaaggatctctgtgtactgaagggaaacaacagtacacaggaaaatttggaatgaattgtaatgaaaatgaaaagtgctggccctttcagggaggagtgacggctttgagaggtccctgcaagaggcagagtcagtgtttgaagagtcactacatctggaacagaaaggagactgtgctgcagctttggctctctgtaatgaagctatctgtaagtaactctaactgctatggctgtggcacttttgactaacttcacaataggtattattagtgttgtcactcagacaggataaaaacagtttttgtgtctcctcactcttgctctcccaaactgagtcgcgttagctgtttttgccctttgatttctaagtgtacctggcactggcactgtggcctatggatatttaccagaataacctcagcaaggaatccrtagatgatttctccagtcatgcctaccttcttatttcaggataaagttagacctcagatgtgaaattagtctgctcttttgctagtcactggctagtgggttggagcttatagaaggaaaactgaataaattggctatgacttcccaggcctgtgactttttaattcagtatttgattctttctgattctcccctaccttcatagtatgcagcaccataaacttacagcaagagactaaggcttagaattggtatcagcttcttgtatgtgacccacaagaagctgtggtctataaagacagatgcaggtttggatcttatttctgctgttggccattgggaaragaggggtgagagtagagtgtggagaccagagtcagacaggtcagatgcaaaggacaagagtggcaatctctaagatggaggcactggtttatcttcttgatttattttagttttgtttttttaatttggattaacctgtttggcctccatggcttccatcaatgttccttatagccagaggcagctgtgtgccctggacagcatatgcatggtccatgccttgcgttcctgctacatattttgagttttactgcatatctttgctcattttttttcaattttattctttttatttttatttgtgttttgtgttctgtttctgctatattttcttttgcattttagctaaactaagacttgccctgcatggtgccagctgtagcacgcacagcagagccctagtcgataagaagttgcaaatcagtattcgaaaagcacggagcctgcaggatcgcatgcagcagcagcaatcaccacagcagccgtcgcagccctcagcctgcctcccaacacaggcggggactctctctcagccaacaaggtagtgcttgggaaccatgttagtttatgaatgccaggggaagaaatgaccatgagtattctgtagcaagagctctcattgtcttggcgactgaaggggagagaggagtcctctgaaaagattttcttctttcaggtcagacatacagtgaaaagctcattgtactgctggtccttatcttaataattcctaggatgcaaaaagtacagcataataagaccatttgtccacatttcccatgggtaactttagccctggacttgtgtaataacgcgattattatatttgtatatattatgttcttagacatggcaatccaggctacatttcatgttgtagtagctaccatgtgatttattttgggatttcagtgcttcctatccttatggaagcagagaaagcagtctttcttgctctgattgcaccatagagaagagacacaaagattccctttgctttgcttctttatggtcaggactaggaaagaagttccagtagtcattgttgtagttctcacatcttagccctggaatttggcttttacttagaatagatgaatttaaataaacattaatttggaccgttaataattctgagtagttttcaaaatataaattagtaaaagcagttaacattttttttttttttttttttttggagacaggatcttgctttttcacccaggctggagtgcagtggcacgatcacagcttactgcagcctcaacctcctgggttcaatgttcaaaaggcaaatgttcaaaaatagttaactgctaggcatggtagctcacgcctgtaatcccagaattttgggaggccgaggagggcagattatttgagtcaaggagtttgagaccagcctgggcaacacggtaaaaccctgtctctacaaaaaacacaaaaaatttagctgggcatggtggtgcatacctgtggtcccagctacttaggaggcttgggtggaagaatcggttagcccggcaggtcaaggctgcagtgagccgtgatggcactgccacactccagcctgggtgacagagcaagaccttgtctcaaaaaaaaaaaaaaaaaaaaaattgcaggtctatttgatgctaaagcacatgtccttaaccattatgtaatattgccttgtatgattgggcttcccatattagtaaatcatattctccataatgttataagggtgactgggtgactatatcctcaaaagttgatagtatattttcattcaaatttaggggcttgttttgaatataagcaatttagataggtaaaccgtttccagaaaacgtatacatcctgatgtatgtgagtgatcgaggctttatttaagtccttgtaacattaagtttttaaagtcagaaatacaaaacaattagtgagaaaccaactaaatacagttaatccctactcctactcctaaatctcaagagagtcatattgctttggggaaacatctcagtgactaatagaacaaaatccagattataaaaacatatttgaaatggttaatttctgtgtattcccatgagcccaaatcaccctgtattttgtaaatgtggcctcatagttcctttggccgggctgcctctcaggaccccaggtaggacttgcctccctgtatagcatcctggatttttgctgtttggtatgagtgattttcaggctttgcttaccttccatgtcatctgcatgtgagactagctgattttgtttcctaatttgcaagtagaatgtgattggaatgcgacttcacaggtagtgaagaatattggcaagggctccacttaatgttactgtgcaactttggtgagggtgtttaataaagaggattaacgttacctatttacctgagtgtgagctgaccatgtgccttttcttttgtgatcctctgaactactgactctacttgtgcttgtctttctgtttatttttaccattccctgtgtgaatagctagaaatgggaatggaatgttgagttctttctgtaagtgttcctgtcagtcaaggcagcttatgactagctctctccatttgtttcagtgaacagcctatcccgctccaagtattgttaagccaagaggcccaactggaatccggcatggatacagagtttggggccagttctttcttccattcacctgcttcctgccatgagtcacactcatcactatctccagagtcatctgccccacagcacagctcccccagtagatctgccttgaagcttctgacttcggttgaagtagacaacattgaaccctctgcattccacaggcaaggtttacctraagcaccagggtggactgagaagaattctcatcatagttgggagccattggatgccccagagggtaagctgcaaggctctaggtgtgacaacagcagttgcagcaagctccctccacaagaaggaagaggcattgctcaagaacagctgttccaagaaaagaaggatcctgctaacccctccccggtgatgcctggaatagccacctctgagaggggtgatgaacacagcctaggctgtagtccttcaaattcatcagctcagcccagccttcccctgtatagaacctgccaccccataatgcctgttgcttcttcatttgtgcttcactgtcctgatcctgtgcagaaaactaaccaatgcctccaaggccaaagcctcaaaacttcattgactttaaaagtggacagaggcagtgaggagacctataggccagagtttcccagcacaaaggggcttgtccgttctctggctgagcagttccagaggatgcagggtgtctccatgagggatagtacaggtttcaaggatagaagtttgtcaggtagtctaaggaagaactcttccccttctgattctaagcctcctttctcacagggtcaagagaaaggccactggccatgggcaaagcaacaatcctctctggagggtggggatagaccactttcctgggaagagtccactgaacattcttctcttgccttaaactctgggctgcctaatggtgaaacttctagcggaggacagcccaggttggcagagccaracatataccaagagaagctgtcccaagtgagagatgttaggtctaaggatctgggcagcagtactgacttggggacttccttgcctttggattcctgggtgaatatcacaaggttctgtgattctcagcttaagcatggggcacctaggccaggaatgaagtcctcccctcatgattcccatacgtgtgtaacctatccagagagaaatcacatccttttgcatccacattggaaccaagacacagagcaggagacctcagaattggagtctctgtatcaggccagtcttcaggcttctcaagctggctgttctggatgggggcagcaggataccgcctggcacccacttagccaaacaggtaagaatgcaaccaggggttggggggaggggggaggatcatataaaagctgaaagcagggaaagatcagaagggagtgttctatacagatactatccccagcttagtaggaggtaatagaacttttgactttactcagaaagccttcaggacaagacctagacatttttctggctagagtggaggaaggggcagaattaccactcataggcaacttccctccttctaaagtaagagattactaagtatttgcccatggcttctccagtatgctgtgctaaagaatggttcagggccgggcacggtggctcactcctgtaatcccagcactttgggaggtcgaggcgggcagatcacaaggtcaggagatcgagaccatcctggccaacatagtgaaaccccttctctactaaaaatacagaaaattagccgggcgtggtggtacttgcctgtagtcccagctactcgggaggctgaggcagggaaatcacttgaattcgggaggcagaggttacagtgagctgagatcgcaccactgcactccaacctgggtaacagaatgagactccgtttcaaaaaaaaaaaaaaaaaaagaatggttcataggtgtttgagagtgattcagcatgacagcatgaaatggagggaggctgagaggaaaatatattcttctatggcttagaatcccaagattcagcctccaggtctgctttgcagtaggatgtccatatgctcagtgtggacatttccagatcatactgaaccagcaatatcaagaccttcctgatccctttaggaaaagtcaagtttggtgttcaaggaatttttaatgtactatatgcctacagggtagccactgactgagataatacagagtgaagagtagagcctgcacctgaagtgcacatcatagtcagttctggaaattgaagacatgaagaatgtttgtaacttacattgatgcacttaactccaaagcctgaactattttcctgattccaacattaactctcagtataaatttggacaagtcacttaatatcccagggccaaggttttacctgtaaaatgagagaactggctttttttttaaaaaaagatatgttctaactctaaaatggcatgtatgattctgtgaaattgaacttggagaacttttccttagcttggctgtgacagtttctgtaatggtgcaggttccttgcatgctgacaaccaacatataattacagttgagtaagtgtttattgagtacttactgtgttctccagagcctttgaggggaataccacataaatataagatttgattttttattcatttttttttttttctgagaagagttgcactcctgttgcccaggctggagtgcaatggcgtgatctcagctcactgcaacctccgcctcccgggttcaagtgattctcctgcctcagcctcccaagtagctgagattacaggcgtccaccaccacacctggctaactcttgtatttttagtagagacagggtttcaccacgttggccaggctggtcttgaactcctgacctcaggtgatccccccgcctcagcctcccaaagtgctgggattaaaggtgtgagccaccgtgcctgtcctaagacttgatattaagatacatttctgaggatccgtatcctaatgtagattttacaataacatttactaaggtggtctttgataggactggttgatatgggaagaatctaaagaataagggaaagctggagtctgcctcagtgagctttctatctaaggaagcaagaatacacaaataatttttttttttttttgagacagagtctcgctctgttgcccaggctggagtgcagtgacgtgatctcagctcactgcaacctctgcctcctgggttcaggccacttctcctgcctcagcctcccgagtagctgggattacaggtgtgtgccaccacgcccagctaatttttatatttttagtagagatggggttcaccatgttggccaggctcatctcgaagccctaacctcaagtgatccactcgccttggcctcccaaagtgcagggattatacacgtgagccaccgtgccaggccacaagtaattattttaagaataataaggccaggcatggtggctcatgcctgtaatcccagcacttgggaggcggaggtgggcggatcatgaggtcaggagattgagaccatcctggctaacatgatgaaaccccgtctctactaaaaatacacacaaaaaaattagctgggcacggtggcccacacctgtgatcccagcattttgggaggccgaggcaggtggatcacccaaggtcaggagttcaagaccagcctggccaacatggtgagaccctgtctctattataaatacaaaaaattagctgggcatggtggcgggcacctgtaatcccagctatttggggggctgatggcaggagaattgcttgaacccaggaggtggaggttgcagtgaactgagattgtgccactgcattctaacctgggcgacagaccaagactctatctcaaaaccaaaaacaaaaaaaaatttgtattacccaaaatagcaacatttttcattgcaggtagtttgaaaatacataaagtatcaaaaatcactgataatctcactcttaatgttttcataagcttacctttggttttcatttttatacacatgtactatatagttttgtttttgcaaaaagcagtatcctttacactatatgtatacagtttagtatcatgactttctcatgttatatctgtgagcatttgctgtaaaaactacctttaatggttataaagtgtttcatatgaatgtactgtaatttatttcttcaaccatcctactattgttgaatatttaggttacttacaattttttttttttttttgaggcagtctcgctctgtcatccaggctggagtacagttgcacaaccttggctcactgcaacctccgcctcccgggttcaagcaattcttctgcctcagcctcccgagtagctggaaccataggcgtgtgccaccaagcctggctaattttttgtatttttagtagagaaggggtttcaccatgttggccaggctggtctcgaactcctggcctcaagtaatccgcctgcgtcagcctcccaaagtgctgggactataaagtgagaagtgactataaggtgagccaccgctcctggcttacttgtaatttttaataacatagtactgtgttgaatatctttgcacttaagtggtcacgtttctcatgagctccttagaataaccttttagaagactaataactagttgaatgttataaactttttttttttcatttttgagacagggtctcatgttgttgtcttggctggagtgcagtgacatgatcacagctcactgtagccttgaccttcttggctcaagagatcctcccacctcagccccttgagtagttgggactacaggcatgcactaccatacctgactaatttgaatgttataaacttaaaaaaaatattgatacatactggccagttagctttgaagaagactatacttctgaaaacagtatgaaagagtacttactgaccattaatttttttgtctagtagtgtaaagaaacaaatttttaaaaatctatctagtagtcaatctattctcaatatatttatcaaatcaagcggagcatgatgactcatgcctgtaaccccagctacttgggagactgaggcaggaaaatcacttgaggccaggagcttcaggctgtagtgtgctatgagcacatgcctgtgaacagccactctcctccagcctgggcaacacagtgagaccctatctcttaaaaaaaaaaagtaaaatcaaactagtctttatttttgttagagtccttggtttaaaaactgagtccttaagaagtgacatgacaggctgggtgcagtggctcacacctgtaataccagcactttgagaagccaaggtgtgaggatcacttgagcccaggagttcaagaccagctgggcaacacagtaagatccccatctctacaaagactgagaaaattagctgggtgtggtggtgcgggtcagtagtccagctacttgggaggctgaagcaggaggatcaactgagactgggaggttgaggctgcggcgagctgtggtcatgctactgcgctccagcctgagcaacagaacaagaccctgtctcaaaaaaaagaggagtgatatgacatagaataaagaagtgatcagatagaattaattgggaagtagatgaaggaaaatgccaattaggattcacatatgaaaaaatataatttggccaggtgcggtggctcacgcctgtaatcccagcactttgggaggctgagtcgggtggatcacctgaggtcaggagttcgagaccagcctgaccaacgtggtgaaaccccatctctactaaaaatacaaaaaaaattagccgggtattgtggcacgtgcctgtaatcccagctactcgggaggctgaggcaggagaattgcttgaacccaggagatggaggttgcagtgagccgagatcacgccactgcactccagcctgggtgacaagagtgaaactgtctcaaaaaaaaaaaagaaaaaatataatttgagagttctttatcttattgtaaaacatttattaagcaccaaattacattactttttaaaatttatttattttttgagacagagtctcgctctgttgcccaggctggagtgcagtggcacaacctcagctcactgcaacctccgtctcccaggttcaagcgattctcgtgcttcagcctcccaagtagctgggattacaggcatgtgccaccacacctgactaatttttgtatattttgtagagacggggtttcaccatgttgcccaggctggtctcaaactctgagctcaagcaatccacctgcctcagcttcccaaagtgctgggattacaggtgtgagccaccacgcccggccaccaaattagtttttcaaaaaatgctaaaaaaaaaaaaatgctttattgatatgtaatttacatgccatacatttcacctatttaaagtgtacaatacaatgggttttattatatcagagttctccatccatcaccacaatcagttttaaagtgttttcatttgaggtgggagaatcgtttgaacccaggaggcagaggttgcagtgagctgagattgtgccgctgcacttcagcctgggcaacagagggagaccctgtctcaaaaaaaaaaaaaaaaaaaaggtgttttcatcagaaactttgtacccgttggcaaatcactctttatctcctccttttcttcccccaaccccaggcaaccactaatctattttctttctctagagatttgcctgttctggacatttcatataaatggaatcatgcagtatgtggtcttttgtaaccagattaattttgacataatcgtagttcctaaagtgttatataaacactgctcttgacctatattctgaatttcattgtactttgaacttgggcagacatcatcttatagatatctaaaaaataaaaaattaacttttgttatgggaaatttcaaatatattcaaaagtaaagaataagagtaggccgggcacagtgactcacacctgtaatcccagcactttgggaggccaaagtggatggatcacttgaggtcaggagtttgagaccagcctggccaacatggtgaaacccagtctctaccgaaaatacaaaaaattagctgggcatggtggtggtggatgcctgtaaacctagctactcaggaggctgaggcaggagaatcacctgaacccaggagatggaggttgcagtgagctgcccattgcactacagcctgggcaacaagagcaaaactgccatctcaaaaaaaaaaaaaaaagaataaatgttataataaccctccaggtacttataaccagcttccatagtgattatcttgcacagttatcaacatatggccagtttttgttttattttattttatttatttattttttagacgaggtctcgttctatctcccaggctggagtgcagtggtgcagtctcggctcactgcaacctccgcctcccgggttcaagtgattctcctgcctcagcctcccaagtagctgggactacaggcacgtgccaccatgccaggctaatttttgtatttttagtagagacggggtttcaccatattatccaggatggtctccatctcctgaccacgtgatccgcccgccttggcctcccaaagtgctgggattacaggcgtgagccaccacacatatggccagttttgatttagctatacctcccccactttcctttcccctctacattattttattttattttttgagacaaggtcttgctttgttgcccagactggaatgcagtggtgtcatcagggccactgctgaggtcctcccactgcagcttcctgagtagctgggaccacaggcacacaccaccacatccgaccaatttttgtgtgtggtttggagcgacagggttttgccatgttgcccaggttggtctctacctcctgagctcaagtagtttacccgcctcaaccacccaaagtgctaggattacaggcatgagctacgatgcccagcctcctctagattattttaaaacaaatctctgaatctctgatattatattatttcattcataaataatttggcatgtatctctcagaaataaagatttttttttttttttaatgagacggagtctcgctctgtcacccaggctggaatacaatggcgtgatctcaactcactgcagcctctgcctcccaggttaatgcgattctcctgcctcagcctcctgagtagctgggattacaggcacgcgccaccacgcctggctaatttttgttgtttttttttttttttttggtagagacagggtttcactatgttggccaggctggtcttgaactcctgacctcaggtgatccacctgccttggcctcccaaagtgctgggattacaggcatgagccactgcacctggccagattcttttttaaaagacaaaccaataatattattatacctaaaaaattaacaataatctcttaatataatacctagccaatattccagttttctcagtggtcccataaatgtctttatacagttgttttatttcaagtcaggattcaaacaagacacacatattgcattttgatgataaggctcttaagtctttttttttttttttttttttgccagtatgataccctatgttttttccccctccatttatttgttgaggaaatttggtcattgtcttttaacatttcacacattgtagattttgctgattatagtctaagtccttaagaaaaaaaaaaaaaaaacatgttctggccgggtgcactggctcacacctgtaatcccacactttgggaggccaaggtgggcagatcacgaggtcaggaattcaagaccagcctggccaacatggtgaaaccccgtctccactaaaaatataaaaattagtcgggcatggtggcatgcacctgtagtcccagctactcgggaggctgaggcaggagaatcccttgaacctgggaggtggaggttgtggtgagctgagatcacaccactacactccagcctgggcaacagagggagactctgtctcaaaaaaaaaaaaaaacatgttcttctagcccacatttttcctgtaacttagtacttagagctagaggctcaattaaaatcagatacaaattttaaaaataggaatatttaataggaagttctttgtatttcttacatcatatcagcgaatacataatgtctggtagtctttctattgatgagagggtagacatcatcttaaccctttcttctattgaatctagaaattcccttacaaatggccacctctacctctgcttaaattctttttttttttttttttctggattctcactctatcgcccagtctggagtgcagtggtacaatatcagctcattgcaacctctgcctcccatgtttaagtgattctcctgcctcagcctcccgagtagctgggactacaggcgcacaccaccgcacccagctgatttctgtatttttaatagagacagggtttcgccatgttggccagggtggtcttgaactcctgacctcaggttatccacccgcctcgcctcccaaagtgttgggattacaggcatgagccatcgcaccctgccttcttttaaaggaatcagattctactcccttcaggaggttccagtggctaccttcttgtccaggagtcacatttggcttgattagaggaacacccaattctaaacattactctgtaaatcttttttcttttttttgagacaaagtcttactctgtcacccaggctggagtacggtggcacaatcacggctcactgcagcttccaccttccaggttcacgtgaccctcctgcctcagccttccgagtgcaggtgtgcaccaccatacctggctaatttttttaatgctttttttctctttttttagagatggggtctcactatgttgcctaggctggtcttgaattcctaggctcaagtgatcctactgcctcagtctcccaaagtgctaggattacaggcatgagctaccacggccagccatagctgtaawtttttttttttttttttttttttttgcgacggagtctctgttgcccaggttggagttcagtggcgtgatgttgactcactgcagcctctgcctcccgggttcaagcgattctcctgcctcagcctcctgagtagctgggattacaggcggccgccaccacgcctggctaatttttgtatttttagtagagatggggttttcaccatgttggacaggctggtctcgaactcctgacctcgtgatccaccggccttggcctcccaaagtgctgggactacaggcgtaagccaccgcacccagccttagctgtaatccttaaacctggctacctatagtcatctgaggagtggctcagaaaaccccaaaaaacacataaatacagaaataattttatagaaataagaacataacacacatgctgtttttattatagacaattttcctgtctcttctctcacagccagtccctacttccccaggtaattatctagtgtgcatacactgtattttctgtttatacaatcctatgtagacctacatatacataaacaaatgcttgtctatcattttacagatttttttccttttaatgcaacaatgtttcattaaaatttcttcaaatcatctagtttaactcagttcaatctttttaagtggctggacaatatctggtattaaaccataatgtatttattcttctataggtgggcattactttatttctagttcttggctactataaattatgtcagtagaaaatattctcatatatatgttgttatgaactggtatttttttcttcttcttctcaggattagaatcgttgggcaacaggataaatatattttttattttattggagattaccaggttgttttttaggaagactgtaacatttcccatttcccccaataatgttcaaggatattttcttagactttttgggaacctttcaaaaatgaaaattcccaggcaccaaccacaaaccttctgattcagctctgtggtaacatccaggaagctatatttttaaaagttcccagatgaatctgaggtggtattgaaagcactgcatttaagtacccaggaatactgaaaataactggtcttacaatacttacatgaataatatcagcttcagccagatatatatatatatattagaatcaaatcatcaaatcaagacatgaattggccatggacatatgtatcaaatgtaggtcaggggcatatacagttttggaatggaaaacttaattagttggattggggatagccccttgggagtcaccaatccagtttagagcaactgaacaatctagaaagattttgaaaagaggtaagcatttagtggttgtttagaaatttaaatgatttgagagaagctaaggggaaaagagcattacatatgtaaaacattcctgaggagctcctgctctcagagtaaaagaggtcaccaggtgagatggtaagagtactgtactgaaaatcaagaggatttaattttaatcctggttaaactactaaactctcagaccctggaactcattttcctgttatataaaatgaggaggtttgatagatgattattatgatcatttctattctgaactagactggagataatttcctttgtcaccacagatactttagaaaatcactgtgttagaaaacaaaactcactgtgttagatactttcctctgtctataagtcttgagcctaagtctgacagaagctgattatgtttacaaaaatgaaatgaagcaagatggggacactcagtaaactatctatattctaaaattcttgtttctttttttttttgagacggagtctcgctctgtcacccgggctggagtgcagtggcgtgatctccgctcactgcaagctacgcctcccgggttcacgccattctcctgcctcagcctcccgagtagctgggattacaggtgcctgccaccacgcccggctaattttttgtatttttagtagagacagggttttaccatgttagccagggtggtctcgatctcctgacctcgtgatctgcccgtgttggcctcccaaagtgctgggattacaggtgtgagccaccgcgcccagcccctcttgcttctaaattccaggagcatgttcctccgttgaattcaaggatgcatatttattattaaatgaaacaacagctcctgagtttgtgctgctaggcttagaggttaggccctaggggaagagatggcctcaacttgtatttgtgttttcctcttcaggctctgcagatggcatggggaggaggttgcactcagcccatgatcctgrtctctcaaagacttcaacagcagaaatggagcatggtctccatgaagccagaacagtgcgtacttctcargtagcagcctcaggtgctaargtgctgggcctggggtggtgtgttggggaargaattatggagagatgtgacagggatgatgataaggcagaggcatggtgatatggggctaycagaagaaaataaggtctatgattgggcttcttttgaattagaggagattgttacatggccactatcttaccaatacatctaattcargtgtctattactactgagtcttcccctactctttcccataccctgaggatactgtctgtgggaaaaccataagtctggtattatgtgtctgcctgtatgtgtctgtgtgtttgaaggctacaccttgccgaggcctcagcagggagtgtggggaggatgagcagtacagtgcagagaatttacgtcgcatctcacgcagtctcagtggcaccgttgtctcagagagggaggaagctccggtttcttcccmcagttttgtaagtagaatcagggtccatctattcagagcaccctcctccttgctaagcaaaaatacagtgcaggtgaagaagcagggagaaagtgaaggttgtaatgtgaggaaaggccctgtgtactcagcaaaaataaggacacgcagtcattattttatttacaaacattcagctggagcccagaggaatgtccattccatgtagcagttctgaaaggccgtgcgtgttgtagggtttcctggggtgagaagagtcataaagccttgagaggaatctgagaagcaaaggctgctgattgggtcagaacccactgcactaatcaaagaaagaaggaaagaaatgggatggagtattggtttgctttttcctctcacccccagtatgtgattgaatagaattcagtgtgttttcaatctaaagtgatgcatgtgtatcagcaagaagaggaaaaaagccttcttgagaattttcatatggtactagtgcagtaatgtgtaagtagaagaggcaggaaagcccaagccattagagatcaacaaacttaaataatatcagtggctaggtttgtaggtaatcatacctttggagaatttcacttccttgcccaagttgagtgttcatcacagtagaggtcagggtacaaagtaccagtgcattgaaggwtgtccactaggtcagttcaggaaaaatgtaaaaacagattttaaatacatggtacaaaaataaaaaggtataaaagcatatatggtgaaaaccaagtctgtcttctaccagcccttcagattcagtttccctcctaagaggtactcatttttccaatttttaaaaatcagccgaggccaggcgtggtggctcatgcctgtaatcccagcactttgggaggccaaggatggtggatcacctgaggtcaggagttcgagaccagcctggccaacatggcaaaaatataaaaattagccaggcatggtggggggtgcttgtagtcctagctactcgggaggctgaggcaggagaatcgcttgaatccgggtggcagaggttgcagtgagctgagattgagccactgcactccagcctgggtaacagagcaagactctgtctcaaaaacaaaacaaaacaaacaaaaaaacccagccgaatttatagtaagtttcattcaatttatcgttcataaattcctaagcaattctgatcagsctgccattcttttttggaaaaggtggactctcctgcctagcatttgttctcatgtactttcaattcatttaatggcaaattgttcttttcctaggagagttggcttcctttcttctgacttctgtatcattcattgattcattcttttaaataaatgcttattgattctgtacaagattcctagcacaaaaataaacaaataaataagtgcttattgagtgtgttctaggtattgtgctaggtgctggagctacaatggtgagttagatatagtccctgcttttatggagcttacagtctacagtgagggacggataaataaacaaacagttataatgtgttaaggatttgatcctatgggaacataatagaagggatatttaaatcaggcttgaggtatcatggaaggcttcctggaggaagcaaaaagaatatagcaagtaaaagggacctgagcaaatattaactgaattaaaagaagcttatttagtatggcaggattagaaagtctggcaaggggagatgatggagagtgttgacaagagaggatacaaagaatattatggaccacagacagccctgtatgtcacagtaagtagtttggaaggatagagataagtcgatgtatttgagacccagttaggaagtaaacatcagtgggagttggtgcctgcctggatgttgggagtggggataaaggatgatactcaagttttatgggtagataatgatatatttgagggaagatatgcattcagttttacatatattaagcttgagtggaggtatctggcaggcttttggaatgagatatataagctgcaaattgaaatctgggaatcatagccattgaaaaagaggaaaagacttgcagaaagagaagaggagccaggacatatccctaaagagcatcagatttaaggtggttcttctgaagaaccctaaaaggagactgagaaaaaaagattagagagactgaagggaaaccaaggatgtgtggtaccatagtcaccaaggggagagtgtttcaagaagaaaggaatagccgggcgcggtggctcacgcctgtaatcccagcactttgggaggctgaggcgggcagatcataaggtcaggagattgagaccatcctggctaacacagtgaaatgccgtctctactaaaaatacaaaaaaattagctgggcgcggtggcgggtgcctgtagtcccagctacttgggaagctgaggcaggagaatggtgtgaacccaggaggcagagcttgcagtgagtgagccgagattgcgccactgcactccagcctgggtgacagagcgagactccgtctcaaaaaaaaaaagaagaaaggaataattagctgtgtcacatgctgagaggactggcacctggtccttaggcagtatgataaatgcttactttgtgccattttgtagtaggtgctgtgagcatacactgatgaaacaacacaaattctgcccttgagtagcttgcagtctcgtaaaggaaattagacatactggcatatagattattttatttaatgtattattactaagtgcccacattgttctaggcactgttcaaggtgctgcggatacagaagtaaaaagaaataggggagaagacaataaacaaataaatgacataatgccagacaatgataagtatgataaagaataataaggcaagagaataaagagtaaagaggtaatagtggtttttttgagggctattcctgatagtagggtagtgagggaaatcagctctaaggaagtaacttttgattagagatctcagtgatatgaaagtatgagccatcagaagaatattcttggtaacagaaacaggaagtataaagactctgaggtagcaatgagcttggtgtgtttgaggaatattaaagttagagtgtaaaagctccaggaatgataggaaataaagtgaggagcagcagggccatatcacacaggaccttgtaggccacagtaaggaggagtggatgggagataggaaaagcagattgaaggctgttgcagtagtccaggtgaatttaaatataaaacccataggtagaaatgatagtccttggcaagtaatggaattgtggatgggaagtgggaaatcaaggtcattgccaatgtttgaatatgggtgatttaggaaaatgaggtgccaggaggaggagtttggaaggattttggttcaattttggatatgttagtgtttcagatgttaaaggggaatatttctgggtatttatcataaaagtagataactaatagggagtagagcaggacattagcatcagtaaatacaaacttgacaggcaaaagaggaagctgtggaatgtgtagcagtgacaggagagaagatggggtagagttcttgattctacatttaaacatatatagtttcattcccagtacttagaataagtgaaggatttttttttctcattctctcaggctttctgaatttctcatatttcgtttttatttttaaatttctatctcaatctctctaattctactgttagcattaaggagtttgctaaagacctgaatgatagggttgggaaggtgagggatatgaggaagactggttaagggataaggatctgaagtttgcagtttcttagagggctagcagggagagcaactgagtaaattgggtcctgttccagaacaaggcatgtaggcatgtttgtgctytggttccctccatttccctttgcttgcctcactgtgtttacccaactacatcctgctttgtgttaatcctcatctctatgtttttttgtcttgtctcattataaggattcatcaaacgtgaggaagcctttggaaaccgggcaccgttgttccagctcctcttccctccctgtcatccatgacccttctgtgtttctcctcggtccccaactctaccttccccaaccacagttcctgtccccagatgtcctgatgcccaccatggcaggggagcccaatagactcccaggtaactcccccaaatctaatattatatgccagaatttggtmccttttcaggggcctccaagggtcaaatcagtatacctatggggaggggggtatcccaaggtggagtggtgtgaagatatgaattactgcttcaaagtcgtgcatttatctagataaatattaaatcatttgttgggcaccatgattcttagaccaagggtttagaccagcacccctagagtctgtctrcttacgaaaatgacctgcttcagtcatgacagaataagcttttaactgacaaaggggagttaatacccagtctttgggacatccccagaacagaaatggtcatctctccttctatcctctgagctagttttctccccttctatcctctgagtctcagctgagggatggtctaggaagataaggaatgagtgggagaattggaaagaccctttacatggagtacccacaccatgtgtacagacccagacaattgtggggaaggtgggcaatatcattttggctttctttgaccttccgagtgagatgttctcttttttcccctcatgcactggatgtacaagcttgaggcagtggttctcaatggataaaggggatgtaccaccggtatctagtgggtagaggccagggatgtcctcaacagcacagccattattgtcacttgctcagttgttgttgtaaaccctcagagtcagctgaactattttaggccaaacatactgtttttgcaaagtatttttcattaataaatcacacaatgcacagggcagtctctccccaaccccaacaaagaattatcagcccaagataccaagagtgccaaagttgaataaatgtataagaaaaggcattccacattagatctcagagatcaaacaaaggcagcttaactgaagtgaaggtaacattttaagaaaagttggagaaacaaaaaaaaagcaaggcacagcgtctcacacctgtaattccagcactttgggaggccaagatgggaggatgacttgagtccagcagttcgagaccagcctgggcaacacagtgagatcccgtctctattttttttaaaaagaaaagctgcgtgaggttttggtatggtggctctaggagtatagtcatcacaaagggagtatacgtttgccatatattgctatatattagggagcccttcttttgtaggtgtgtgtatagtggatgagagattatagtggagggaggtagaggtatggcaacatccatgagactgtttcatttgcccaggttggaggtatgagatttgattttgatgtatattaagaattttaagaaatggaatcaaaagcacagcttgrttcattctttcccttgtatgtatgctcttggaggagtagggaattgggctacacagctaggcatggctctctgggaaggagaatggttttctgaagatgctcagtctttgggtttcttttctttccccaggaacttcaaggagtgtccagcagtttctggctatgtgtgacaggggtgaaacttcccaaggggccaagtacacaggaaggactttgaactaccagagcctcccccatcgctccagaacagacaactcctgggcaccctggtcagagaccaaccagcatattgggaccagattcctgactactccagggtgcaatcctcaactaacctacactgccacactaccagaaagaagcaagggccttcaggttcctcacactcagtcctggagtgatcttttccattcaccctcccaccctcccattgttcatcctgtgtacccaccatctagcagtcttcatgtacccctgaggtcagcttggaattcagatcctgttccagggtcccgaacccctggtcctcgaagagtagatatgcccccagatgatgactggaggcaaagcagttatgcctcccactctggacacaggagaacagtgggagaggggtttctgtttgttctatcagatgctcccagaagagagcagatcagggctagagtcctgcagcacagtcaatggtaaaggttattcctttcctttcctggagctacacctttctttgtaaaactgtactgtgggccgggcgcggtggctcacacctgtaatcccagcactttgggaggctgaggcgggtggatcacgaggtcaggagattgagaccatcctggccaacatggtgaaaccccgtctctaccaaaatacaaaaaattagccaggcgtgacggtgcgtgcctgtagtcccaactactcggaaggctgaggcaggagaattgcttgaacccgggaggcagaggttgcagtgagccgagatcgcaccactgcactccagcttggcaatagagtgagactccatctcaaaaaacaaaacaaaacaacaacaaaataaactactgtggcagcgttggtaccctgcatcactgccatggttgtgctattctcatctcaacatagaattggtgggttctcctaagggtgtcaggaacctctaaaaagatgtgattctttgggaggggatatttgaaattccaacttccattccccctagcaaaaggaagcagctgctgtttaagggttttatctgagccactttaaagatgaatccatggtattactctggatactagccattccttaggattttaaggtcacattttattcctggatgctttatgtccccacctccacctgagccctcatcctctgttccctactatactcccaayttctactctttgttttatccacctatccctattacctgaccctttgtcttccctgtctcccatccttggggggacatgtagccctgtggtcatggttctgatgacatcatcagggcagcccccctgcccaggtattatggcctgtcagcattccctgtgccctccaaaccttaggcctagaaygcggagctgccaacataacattcacccttttgaacagatggagtcaggcacactaacacagccttctgtcctcaataacacagccattattgccacttgctcagtcgtcartgtaaaccctcagagtcagctgaactattttaggccaaacatactgtttttgtaaagtatttttcattaataaatctataagacagttctatttaattccttgtcattcttccctttgtatgctcttgctttctttgtattggggctggaagtctggataaatatatgaagtggcttttgactgagtggaagtgaggagccagagacgagttgaaggatatacaatcaaggtgggaatcaatgggtcctaaaatagggtgcctttcctttctagtattgctgctaggatgtttcccatccctttcctgacagagcattcagtactcagtacattatacacttccttcctcccctccttaggaagattttctggggattcaagctcttcttacagactcactcctgatcaatgtactccaggtgccttccctctatcttataagtttgtgacgtgcctcctgtcccttccttcctctccttccgtgggggcctctccctttcccttcccctgtggtgttatggcccttccatgccagaaagatccattttcacctgtgcctcactcccgagactcttccctctaaaaaatagcttgtgggttccctttttggaaaaaatccattgttgggtctttcccttcctcttttcctggggtctcaggatagaaattgacacaaagaagaggtagaaaggtactccttggaccttcggactactacttacttaccaccatgcattatgaacagattctgagcacatgtattattgagcaggaggatgggcaggaattggttgttccatcccacttggatcctgcaccatcaagatatatagagcttagtggatatgctggtccctgtccatgattcaacatatctcctggtgtcgtggacacactcatctaataatttttgatgaacagtcagttcttgcccctctaccccctttcccatgagtgtcagtcaccgtggtctctataaaggttccataagtcacctgggcccagattctgtgcatgtgcagaaataaggaattaatttccaattccctatttactcctctgccttccaggaggaggttgtatccttttcaggtgaattcttcagattctttgcacatctcttggtgtcatcccctttattccccttacctgttttgacaaactatggcgcctaaattgctctagctgcagtcttattctgtgctttcagactcttgacaattccagactctaaacacaaaggccagaattctctttcaaactccattttggatggtcccttctccactctagaacctacaatgcttcctctattctctggtcccctaccaacccttcagtattcagatctggtagctaaatcgttatacatttctctattagtaggagatcctgaggtttaatcacgtcttctcagtttactgggaatgccatgagagcgggtgtgtttcctcgcagtcgttcgatcgcagcacctcctcattcttcattctgcatgcaaagaattttaacctgatcccttggcctcgtcctgtttctctcctagcttcagtaattttgcccaagtccctagagcctaccccgcccccacccccgcacgcgcagtgcatgccggtcttagcccctctgtagggaaagagggtccgccatgttccccggcggcgccgccgcttggctctggtagccgccgcccccgcccccaaccccgcccggcccagagcctagccgagccccgggcccagcatggccgccccggagccggcccgggctgcaccgcccccacccccgcccccgccgccccctcccggggctgaccgcgtcgtcaaaggtgagaggtggacgaaaccctgggggcctggcctgaagagctagctgtgtgtgagggcgggcgggagaccgtcccctcgggagtgggcccggaagggcgggcgagtgactggctgcctcccttggggagtggcccctgggcgggcccctgctgggcagggctgagtcggtggcagtggttccgcggtctcccggttgctttcaggccggggcggaggttttgcttccgtggcttcctagcccaaggggtgaggctgttagctgcagtgagcccgttttctcttcactcggcctgtcaaagcggcgcaggggccgcgattagcttcctgccccgcgacagctgcacttctggcttgccggggcgaaccgaggggctcggagaccttcagccacgcgaggcccgccagtgagcagtcagaaatcacctcggctttggcccacgcctgctccccggtgacagtcgtccgccctatccgcgtctagctggcgacaaccgcaggggttcacttttggccgtcaggtgccacccggagcagaaattaggggaaccttgtgggattggatcacggtgaagggtcggggcaggaattggaaggccagcctttatagtgcagaaagggagaaaaagcagcataaacgaaaaaaaaaattcttgtggatagcaagtatttacttagaaaaccatcaacactttggtcaaaaggagttacccctcccttacaaacacacacccacacattcatcctagacgaaaaagttaaatgtttctcagccagggcagaatttatggatgtttacccacaacaggtcagcagattaatttaaaatagagaaattgagggctaattgagagttgcttaagattccaagcttcctgggagagcctaccaacctcaaacactgctgtggaggtgaaaaacaattgaaatgattctctttaccatgtagcttgattgataaattgaaatcgtagaatgaacttttccttatttgtattgtatttatttttaaaatataggtacttttgttttcattcagcttctcaaatacactggcacagtatttaaacaccgttagcctactttttgaaatctgactcatatgtttccattaaaatatttaaaaacaaggaaaccttttttcttttttttttttaattaaaaattttcaacctgagccttcttcggttcttaaaagaataatactaatttggcctggcgtggtggctcacatctgtaatcccagcactttcggatgctgaggcaggcggatcgcttgaactcaggagttggagaccagcctgggcaacatggcgaaaccttttctctaccaaaaatacaaaaaataaaaattagccgggcatggtggcgcgcccctgtagtcccagcggatcgggaggctgaggcacgagaatcactggagcccgagaggcagaagttgcagtgagccgagatttgcgccagtgtgctccaacctggacgacagagccagaccctgtctccaaaaacaaaaacaaaaacaaaaacaaaacactgatttgcacctaggcttaagttagtagtatatccagttgggccaggcattggaatgagctgaataacgagtttatggaatccttaatacagagaaatcttaaaaaaaaaatagtaatgcagacattcattctatcaagaaatcctggagttttgtgggggtgggaacgggacattggctacctcttcattttctgactgtatttctgtgttgtgtgttcatttccctgggcacttttcaccagactgttagatggggtaaccaatcacattcctgaacaatgagtttatgctatccttacgtttgtgaatcttcttattccttgtcatatatatggtaatgttttttctgtactgctttaatgcagtgaaaataagattccaaacataaggcagattccttaggggtgagttgtgagtccaaggcagtcatatttgcaggttattggtgtggaataaaagccatttgatttagataaataggaaaggagcttgttaatatagaaaattatagttaaataaagcttatggttatcatatttctggtgcttcattgtgccctcttcatagagacaactttcatttctttatggaatttgttaaccagttggaattcctgtatggattatatgttttaaaatggtgtgtaacagactaatttgcactgctcatggagtctcctgcatttactgggaaattcacctttcttacagatccagaaattcacttttaaatttcatcttcaggattcttccttgtcttttattcagtaattatactataatgtgatacctgatattagagaatactggttgcctgatgataaatgatgtgagttcagcttaagtttaacttgttaaaatccaaatttcttttaagtccacaatgtggtggtagttttgtatcgatacattttcatagtagtgatattatggagactgtctgttggcattgaatgcaagtagtctttttctccctggaattttttttttttttttgagacggagtttcactcttgttgcccaagtggagtgcagtggcgcgatctctactcactgcaacctctgcctcctgggttcaagcgattctcctgcctcagcctcccgagtagctgggattataggtgcgcgccaccatgcccggttaattttttgtattttttagcagagacggggtttcaccatgttggccaggctggtctcaaactcctgacctcatgatcctcccaccgtggcctcccaaagtgttgggattacaggcgtgagccaccgcgcccggcctgcctccctggaacttcttagtgtcaaaattttatactccatgcttgtagtcataaggcctacattttatggtcatgtaggtttttaagggtgtataggtctttctgtgtttaagatcagatacctgaaattcactttttgtgaagtttgggagcttggaatactgtaggtgattcatgagtaaatgtgatgagcttgtcactaaaattattagtggtaattccatgtcattgattatgggtcattaggtttttggttgattaaattcagttctgagcctactccagctgctggctcaagtcaaattcttcccctgtttgaaagttgatctaacccacctgattaagcaagatggtatatacccttttaattatattctattaagcattctttagctatgtaggaaataagaaagtggaaaaaaattaggaaaaatatctaaccgtatctgcatgtgtgctttcttaccacatcagcaaagctggtataggtaattgaagcacaaaatcctgaatttatatatattgctttccctcctccccacaaagtttacttgacctgaattgcccagatacctccttttttccccagatacttaaaaaatgtacgttttgctttgtataccaggttctagatttgtaaagctggattgtctcttgagattatcaagactgttagtattaataaaaaattcacctttttacttagagagcattgtcagtattgggcatatgttcattttagcacctacaatgtgagtcattttcttaacattattttatttcatgggttatagtaacctcaaattatcagactttcagattgaaccaaaatgctgaatttatgtgttttaattttttttaagctaaagtatttctgattgacaacgttagaattcatttggattctgttgccagttgccctgcttataaatctgaagtcatttggctaaagtgttttctagtagctttcctttaggaggattactttttgtttatttatttatttatttatttatttatttttgagatggagtttcgctcttcttgcctagactggagtgcaatggcgcaatctcggctcactgcaacctccacctcccgggttcaaacgattctcctgcctcaacctcccaagtagctgggattacaggcatgtgccaccacgcccggctaattttgtatttttagtagagacgacatttctccatgttggtcaggctggtctcgatctcctgacctcaggtgatccacccaccctggcctcccaaaatgctgggattataggcatgagccaccgtgcctagccagattacttattttcagataacccatatagccttggtgtgacatagctacttcagtgtttcttgctagttctatttcattatattttaaagcagcttgaattttaatttttgtttacaaagtctattttgtggacttatctgtgt

SEQ ID NO: 96416 - DNA, 290014 bp, Homo sapiens
ctatttttttttataatggatacagtgtattgtattagaaaaaatgtatatgcatgagttgaatatgttattaaaaatgtgtgtgtgtgtatattttatgggggagagtttctgttatacgtaagcatatagtctttgcaggtttctacaccagattggggaaaaatcaggcaaaagtggtagactaaaaaggcttccacagtattctatccaaaatgatctgagggagcgtagaggagaaagattaatttaaccaaagcatcgtggctgtacccaggaattcccactcctgaggtagatcctaagtgggatgaggtcttttgaatggaaaaataaggaataagactactgagtagtggttgaagcacagacttttggaataaaagacataagttaaaatattagcaccaccactgagaggttgttcagaccatgagcaacttactaaacttctctgtgtctccttttccttatctgcaaaatacagatagtaatggtacctacctccctgtgctgttatgacgattaaatgagatagtaaatataaggggcttagtatgatgcctaatacctagaaaaatgctcaatagctggtagccgttttataaataaaagcaggtcacccatggggagcacagaagttcacatcaaatgattcagggctaaagctttgacctgtgggaggatgttgacaactaactggcttttacatgaaatccaccgtaaaacacaagtggtgttggtcagccgacagcttacgctattctgtctaataaattagccactagccacatgtcactaaatttaaattaattgaaattaaacaaaattaaaaatgcagttcctcagtcacagtagccacatttcaattgctcaatggccacatataactaatgaacagtgcaacagaaaatcacctctgcagcaagttctgctggacaacactggcttaaaagtttcatatgggttaaacatcaaggcaacattcatgaatagctggtgaatttaactaatgtccacgtcaaaattaattttccttaaagaatctgaggcttatcaaaatttgtttcctgatggtgcaatttttcaagctgttagagcattcttgatcactgtttatatcagtgcatgtgaatgcattcagagagattctataaaggaggctgtccttgcttttcttgattgagtttttgaattctatcattagcctcaacatctctgcaattattcatatctggttattaacatgttatttctatactcctcctcctccttgtctcctccctcacccccacattctcagacttggaagctggggagactgtgagattcttaaagtgatcattattttgctagcagctggttcttaacagtccctgttttgagacacaggtgacaagatctgtttccgtggctgccttgttctacttctattcctaatggatcacaagtcttgggataaagtgatgttatacattgtagtgtctgcagggcagcactttatggtatgctgggaagaatctaaatgtaacatgtgttgccaatgcatttacagtcattagttaaccaagccgcccatgtgcctgtctcagctccctgacccacatttcatccatgctctgctgtttttctcctgcagggttatttcctgagtaaatcccagagcttatgagtcccccagcagagagctctgttctgacctccctaaacaggcagtttcacctgctgggctagtgtttttctgcttcttagtcaatctgttaaaattttagcaggagatacttggataccttttcagaaaacatatggaagattgtaattattttggcccagtacaattttagaattgagagagcaaggaagaggcgcaaatctcctgctcataaataaccaaatctgtgggcactttaaaaagcattctgtgcagcaagagaatttacgtgccacatttcacccttggcacactttccaaatgaattgttcaaagagaagttatattaggacaaatagaaatgacgaccaggaccagatgtggatctttagttaatatttatgcaacacccaaagggaagatagtattgcacaataaactaaaaatgtcttaggcaaataaggaaatctttaccctgaggaactggcactgcaaaggtatgaattatacaacaaaggactgagaatgcagaacaaatgcagggtaggtcggggctactataaaaaggaattcattgaggaagtggtgaggtagcagatgtgtggagcctacttcaggaaaataagggcttagcgcttttttggccagtattgtgtctaaggtagaaaattcaagccagccatcctaatttccttcacctgtggagagcaactgtcgctttaaatagaacatacacatattcagaactgatgctgcaaccttacatcaaataagtacaccttgataaactaaaaacctatgtcctcagattttaaatgatctccaacaataatgatgacatctttaatctgattttcctcctaaagttgttccaggaaggtagaaaattcaggaattggctgcttctcagcccttggagagcaatctaaaagagaccatggcttaatgctctggaaggatattgaaacctacattaaattataatagaaaaatttgttaaaagcaactggatttctcaaacacagctaggttttcagccttctgtttatcagggaaggcaagatgtgccattttacagcccatctcccagtcacctaggcttccaattcagaggtattgggaggtggggaaaggagaaaacgaggagatggaggagtgtataaaatttatttaaaactattggagccatggctgggcgcagtggctcatgcctataatcccagcactttgggaggccaaggcaagtggataacttgaggtcaggagttcaagaccagcgtgggcaacatggtaaaacccccgtctctattaaaaatacaaaaattagtcgggcttgatggcacacacctacaatcccagctactggggatgctgaggcaggagaatcgcttgagcccgggaggcagaggttgtagtgagccaagatcgggccactgcactccagcttgggcgacagagtgagattctgtttcaaaaaaaaaaaaaaattaaaaattaaattaaactattggagccttaaaaatgaacacagctgtggaaaaggcttacaagcttttagcatgtggaacccaaagctctctaatatttttacatatctgagtcctcttaataactgaagagacctgtccatgtgactccccttcacgggtattcctgcagacttgatgtattctgaaaaactgtgaacctgctcccttcctctctccttggttaatacttcacgatctttaacactaacgacaaacaataaatcagcgatgaaaatttttggattttccagctgttacgtagtttctcctaagcacatttattttgttcatttattaacaatctttttaaagtttcttctccgtgtccagatgttataggctctgggttttatgtggaaaagaagactgacaggatccctgacctcatggagcttccactcagtggtgcttccagatactaatacatactatgaagaaactaatacatggtggttggatagagattgatgggggagagcctactttatttctgaggttatgccatttgagctaagacctgaatggtgagaaggagctagagaaggtttgaggagaagaacctcatgcaggaggaagagaaagtggttagttcctgagaaggatgtctgtgttgtacacatatgaacacaacatgaagcgggaggggtagtctgggctaaatgaaggcttggctggccatggtaagaattagttttattagctgtaaaacaggaagttgttggacatttaaaaatacaacaggaagttgtggaacatttaaaaattgggaatgtataggttttcaaaggaaacttctgcctaaagttaaaattggggaagggaggcattgcaggggtagaagtacggggaccacttagagggctactgcatttgtctatgcaggagatgagggcagctgggctgtggactcaagtagtaaagatgtgataggatgtgttttggaggtaactgtccaggtttttgttaacaagtaaaatgaaacgaggaagctagaaagcatagtaataatgatatactagctaatacttctgtagcactttcctggtcccttttagatattttacataggttaactactttaatactcataataacagtactcataagataagtactattattatcactgtttcatagattagaaaacagagtcacaaagaggttgaacgactggccaaagatcgcccaaatagtaatagcagagtatgcactcaaacttaaacatctgatcccacagtatgtgttcttccttcagtgttctaggacaccatatacatattttatatatactatatatatctcagcatgtaagtgcattggagagacacagagcatcaggatggactaactgatatgattttcaaaattttcaagtgagcaaaggttatggaggaaaagggtaaaagatcagtccctacctgtaaagacataattccttttatttttgtttacatatatttgtccagggcacaaaaaatgtgctactgtggatggcataacaggtataatattaataaatattcatcattttatctgtgtgtatccaatacagatttctcagatttccttgtgaaatcagggaaatatgtagctttgttctacagaagcccagaccacggtattttctttccaggccactgctagacacccagggggctcaatttcttgccacagtttcggagagcttgctggttaggtgctgctcttggttggaaccagtcggcccgcatgcaaaacagacctgtcttccacaccttgtggttactatgcagcagggggcgctgcagtagtgtacatcgcggtgcaccggagctactctcctggccagaaagccaacaagccgggaggaggcgtgtcaggcagccctgggtcctctttggtcttgcaactttagtacccagagcttgttctacacagaccattctacaccatatttcaccatgttggatgctttccatccagtcctgcctccgagcggaaaggaaagggcattagcttactgccttactaggtttaagtataatgctgtaccggcttgcactagaggtttctctcctgtgttctcagggtcaacccgacagtccctctgaaaccacgaaggggtccccgggcagttgctgcggggtgtgtgtgtgtctttctttccctttttggggtcctttctttttaaccttactgaaggaggaaacgtttctctccctacacgtctttccactgacattgtggccaaccgtaggctaagagctgaaatctctccttcctaagttgcctccaagctctccaatactacctcctcccccccatttagtctcacacacagtgtgcgtgagagatcgccagtgagtttgtgacaaccgaagctgcagcagtcgccaaacctgttcttcctctcccggtctcagaagtctctccagctgaccggacttacgcctggcagctcttggcacacacagcgctgtggctgagattcagccgtgccaggcgctgccaggcagcagcggggcgaccgaccacctcctcctcgacctcctttctcccagcttcccctcccagggtgcactgtatctactcctttgggctgtcttccagccgtcgcccttgggtcccgggggctttccagagtgaaatcgaaggtgaaagaaacaagaggacgggaggctggtaggaggagcctccaggccggggagggtgggaggagcctccagcccgaggggcagggtaggaggagccttccgggaggatctgggtggagaaaggggctgggccaagccgggatggagggttggtcacgcaggcgcggggggccgcgtcgagaaccccacgcgggagcttctggagtctccagccaccgcttctcacttcactggagaagggagctggggctggggctggggctggggctgggagggagctaataaacattgaatgtgcagcagctgccttggcggccggagtccgcccgagcgacaccggagcagtgcgcccgggaggcggcgaggggaggcggttcgccttgtccctcccacccgcgcctctttctctctcttcctccagctggtcccagagcccggcttggtccggtccctctgcccccatcccgcacccttccacctcctccgagtcccactcctcacctaggacgccccaaactgccatgggttagggtggggatcgcgacccgcgcgaaagaccagccctgcgcttccgccgggggacgcggagcccaaacgccgctcaccgcttgcgggcgccgggcatggggagtgtggtgtgagcccgcacccggggaggacgcaggagctgcggagmcgggcgcgaggaggaggagaggagtcgtggattggaaggacccgagggagggagggtggggaagcgagggaaaagtgaagctgggaggagaaggcggcggaaggtggagattgatgcttctgttttttgttgccgctgctgccctcgcgctgggagccgagccggagggaaggcggtggagagatgattgcagagttggtgagcagcgctctggggctcgccttgtatctcaacaccctgagtgcggatttctgctatgatgacaggtaaggggccgagaggagggggcgacgggctgcagggggcacactccgcagtggctctgaagcttccctctttaaggctcaaagtgcgtcttggaggaactggttcagcacctgatggtttaggcgacacgtaaacattaacacctaaatcaaacaccggggacgtgaggcgcgctgggcgggccgagggagtttccgctcctagtttgcagcaggttctctcccttgcttctcggctgttggcagacgcttgagtttcttagcggaaatcccggcaatttgggaaactgtttaatgaacgtattaaattaaagtcttaggtattccttgatgcaacaaagcacattaagtgattttacgtctggttgggaggaagcctctcctcgatccctgatagatcctccctgtcccgtttccttttattgatgggacacttttatttcccgaagttaaaacacacgtttgatagttgccaaaattgtgaaaagggagatcgttctctgctttaactttcccttttaacgtgtatagacttttactttgagccaaaataatgctgctgatggtctctcccgccgccctagcctccttcaccaatccattgggcagcactttataaaagcctcggctttctcatttctgtttgggagttgtacattagaygttagtggttcttttgtactaattggagaagaagacgcccctagagactgaagttgtcttctgcacttaggttagtttgggtggctaatgagacctgaactgtgttgtcaaagaaactgcatcgatttctggaaaatgtcaccgttgtgttggtgtctcttcctatcttttaaacgttattagtgttcagaaagtgatgaaaagcccctatatccattagggaaaattccaatttgtgtccttccggtgtcttaatctgattacaattaaaacagatgcataattaaaatatattagggataacagcacgcctggctaaacttattaaccgtcctggggtgtttcatgctccattgaaattaaaccatccaaaaagtgagcacagatttactttgacagcttttcagcagcctctctgagctatgaaaagtgaatggatccccagggttagggcgaggcagtgagagcacttacgcaaagtggttgacagtgaggggaggtgaaggcagaatcttcttctcgtcgtaattagccacattctgtattctctggtgtgcccattctcctgctaaaagcatcttcacatctctgttaaaaaatcacctgataataggtgccagaacatccagcaaacccgtcttaatgcattttatgtagtgcctaccagaggctagttgatagggaaccactgttagacatacattttttcttaacttttacgcagcatactgattttagcaactacacagcatgctctgagaaatggtctgtaggagtgaggtaaatttctgttctctccaattttgtgtaatggtgcacctgctatttctagcatattcgtggaaaaagcccttgtttccaaagatgggtgacttttcactaaaaccagcttgggtcagtgtgggcagttactggctctgttgggggcrgtttgaatagtaagcatttaaaccaagaatatagagtttatttaaaaaaagaaacttactataataatgcaacttgatgggtgacttttcactaaaaccaccttgggtcagtgtgggcagttactggctcttgggggcagtttgaatagtaagcatttaaaccaagaatatagagtttatttaaaaaaagaaacttattataataatgcaacttgttatagaacacggtggtgaatcaagtattcctattgtatgcccttgttcattgctgtctaatccttaagaaaatacacatcagaagaagccattctttaaaaattaaggttaaatttggatatgcatttttctataggtataattgttctgtgctcttgagtcatcagaagtgttaggactggaccttgtaacttggaagaatggtgtgagtgtgatgataaattagttgtgctttgatggttggcagttgtaagtttttcagatgcaatagtctaatggagtgttaaaattcgtgacttctatcttgtagctacataggtgaatatagtatgattatttgcccatatgattttattgatagcatgctcaatatgatgtctagatagtatatattgataaaatattgagggcctgtaactgtgaattatactttgctacaatttgaaaagtgtattttacactgatttcttagcagaactacatatgccatcacatattcttagaatgtgaaatcttaagagcagcaaactttgtttttatgtatcctagaaattatgagacacataaataggagcactgaacttatttgttgtatgcacagcctgttcaagtgattcattgtgaagttacactataaattgtggcttttctgatatattttctatctaactactgtaactcactggtgtgtgaagggggaggaaagctggggagccaagtgtaaactgtaggatgatgataatttgtttatttccgctactacatttcagatgcaaagattcatgtttaaaacattgcttaaactagacctgtggattctgctgccctccaggaacttttgtgaaatccagttctgtaaggagaggccagtgccagaagtgaagggagaagcactcaagggagatggctgttattcctgacttgcttaactaaatcattattgctgtggtacttctcaaggttatcatttcttttaaatatagtgatcgtttactttataaactatatataatttctttccatgtttgatgtagcttggttgaaattaaatggtaacatgaaactttcttatagcacaatcaatttctctatggtaaaatttaatattttacaagtgtttctgtgctaaatttaagaatatgcctctgatgtgatgaaacaaacagtggaggagaagaattcacagtatctgatgaaaaagggtatgtggtttcagcttcatcctccctccccttgctttcaatctagtattgaatcttaagttgtggttagaggaaaattgaaattaacaatatgcagtctttgccaaattttaagttatgttgtatgtgattccttaaaggattttctcttattttctggagaaatttggtgtttaggtcagtggtaaaacttctctgacccaaaactctctgcattcttacgcatttgttgaggatgacatggcatcacttttttcttatcctttttaataatactgttatgagtttcttatggagataacaccatgagaggagtcagtttacttcaaagcagacaaaggtaaacaaaccataactgttctaaactttagaagtctgatttcacttagcacatatcttctaattggtgacatgccctttttatacatcgacaagtaaataagataatgcaacttttacatgctttaaattctcatatgagtaaaataatttattagtttgcaaagacaatttgcaggtttggaagtagaaaatatatttgcgactcctctgaaaatttattttcttattgcccattttgcatttgttaaactcaaccagaatcattaatgttacctgtagatctcttagctattccactgtgcagtaattttttgaaacttggagaaacaactacacagcagaagtttctactatggaattaaaattacatcaagctcttaataattcactcctagttagcttttcatttgggtataaatggaaatctcagtttttataaacacatgagttaattttttctttataatgattttaatattatttaaaatgaaggaatggaatttaagtatattaacaatttttttaaaacctgcattctttctaaagatattgaactattatttctgcttgatcttttaatgttattgttagtttgggttttttgacctggtatgataggaatccctcgtgaaataatcactctgttaacttatctttaaaaagttctctctaatagacttgtctttgaccaatctgagattgttatcttaagattccagcatgtgtaactactgaaggcaggcctggtatttagtaaaaagcatgtttagaaagaattactatataattaagtaagggagaagctctctttgtatcagtggttgtcttatcaagtgattattataagaagccactgtatacagaagtatggtcttactcttcagtttccttcccagttttcactggaatacaagttagagtttataaattattttaggtggcattttattttctaactacattttgattgtttaaacaaacctatttggaaaaagttcattttgctgttttgaataagtatatctcatcaataaattaaaattaggtgaagtcagtatgaaccgctttacctccattgagcctgtcacatgatgtttatcatagtaattgacccacatacatgcattgaatggacatgtgcaaatgccacagggaaaattgccatctgtctcttagttgttttcatacacacatacacacacacatacatgcacgattattacatttacattggtgattctatgggcttttgttttgtcatctgcacttagttcttcagtgctaatgtgcccctgttgttaatactgaattctcttctgctataattttgaaatagcaacaaccttttgcattccagcatgcattaggaacatagtttgtctttctaacagttttgttgctgctcagcacactaaaagcacttttcaaaaaaatgcctctggtggtacaactgtctttcgtaggctaaaggtgcgttgtctctaaagcaggaacctttgtaatattaggaaaggatgacgtttacccttaaggctctttgaaaaatctgtggctgacaaacctactttcttataactttattatactcatctgaagtgcttttaacacagcaactttcatctgttaacctttctggttctctcttaggagcagagtattgtatcagctttggatacttattttaatggcttcacaaaagtgacaagtgtggcagcctccaaggaaaggaacggtgggttattgaatgtaaagacctctcctctataaatagctgtcctcatttaggagctcagttttttaaaaaagtggagggatatttcagcaggactgcataccttctttttttcattgggtgaaaaaggcataatattttgaataattgctggtgtaattacatacagtgctaaatgtttctttgaagatatgatttgtatgtgcttttgaggaataaacttacattcaataattcacaaattatgaatattactacatatgagcttctttgtatatgtagtgcatagtacaactacagcactgcttaccttgttaacaagcatcccacaaaacattgtgcattcttacctgtactttagcaggtactgtaaagggtttgaatctgagagtctaatgatagatctatacaaatgctgataggttgacctctggcaggtggaattccacttgaatttatcacttgattgttaccttttaattattttactcatgtttatttttattgatactcatatttaaaaactttcattgggagtctgttagcttcttttccaaaacactcactcctaagattcatgattggtactttggcctggccttattttgggtctgtacttactggtgcttcattcatacatgcagaagctttggaatgcctcttccaaatgtctctttcctacttgttcaggacagtcgtttttcttggatgtctgaactctttgagttgactagatttgcctcaacttgtcatagggattcaagatttttgcctcaggtttttggccgtattttcaagacagttaggtccaaaaagatgcagctcttctaaatttctgtctcaccctcttcctctctttttctcctctgtgtttacctttccagttatatttgtcagttgttttgatactcaaggtttctagaataaaaggtgtggccgggcgcggtggctcacgcctgtaatcctagcactttgggaggccgaggcgggtggatcacgagttcaggagttggagaccagcctggccaacgtggtgaaacctcgtctctactaaaaatataaaaattagccaggcatggtggcgggtgcctgtaacccccgctactcaggaggctgaagcaggaaaatctcttgaaactggaaggcggaggatgcagtgagccaagatcgcgccaccatactccagcctggtcaacaagagtgaaactccatctcaaaaaaaaaaaaaaaaaaaaaaaggtgtaaatgtttgcttcagtcttttagaagcattttgggattggttttttgggtttataactttgacttttttttaatacaggtaaatgggaaacaattaagtaaacctatctgtgtaaacctgagaattttgaaaaaggcaggaggactgaaatgattgttttcaagattccacattaaaagttgatagcattttttagagtagtttattttatttaaggacatttcataagttccattaatttgaaaagctagagataattattttaaagatgagatagagaggttttgatttattcatgtctaaaaaaattatatggaaaaaaggtgagaattgaaaatatgaaccctggatttagattccattttattgtggaattaaatggaattaaagatatatttacttttcttgaaggttattcctgtaccacattgcttgagggcagtgccactgtatccgttttagaagtaccttagtatttggcagaggatatgctatttgcttatgatgattcgataaagcttttgtttcttaatttctttgccggggcattttgtgatgttgcagtgagacatggtatgaagtgtggcacrgcatgtagttatagtcaagatgactggctaaattacatgatttctgaaatgaaacacacattagtgcccttggaatagcagctgtgtgctaggtattatcaaataaaatgtttctgtgaggtctttgtctttgatgattaatcatcatttttgtgaaatttattataaaagtataattattccacaggagatttaagttaaaaaaaaaaactggttcactatagccatgtgatcataatttgtttaattaggaaacggtataaaaaattgccttgcggtaacggaattgattgagatttgaaaccgaaaaattcacgacttttgataatgaaagtgcctttttcctaattgtgattccagagattattgatttccttagaagtagaaaattttgactgtaccagcctaggaattctcacttgacatcatttagaagtattttaacttcaaaggatgtgttatttgctgaagagtggccactgggacgcaatatggctcttgacattttgaacagtgttaaatgatgggactgaagtatttcaaacagccatgtttcaacattgtttaaaaatccggtgggaagaatggcagtccatataaccctgcatacttggaattctttggttattaatttgaagtgcagttcataagtttatttcttacctaataagtttttaaggtgaataatgctcataaaatttttacagctgtgtcttatgaaattctgtttcctttttttggttgcttatatgtattctataaagacaytgaaaggatgcaaactattctcttgctttttttgtttttatgttaatctgttaggtcatagatctgtgttaagatcattgttataaagcatattgttattgagttctattgtaaacccaaaattacaaaactggtctttgagagaggtagataagtcaaaatactttgtgaaaagtaaacatcttgtttttgttaatttccaatttgttccacaatgaaagcatgtctgctcagttttcttttctgttagttgtgtctcttggattaaatgtgagtmaataaactctggagtaaggcygctccagagggaactcaaggacttactggttgtcagtgcatgtagaagtgacatccctgcaaattgtgtcctctgcggggggtgctttaggtggtggctatagagattacattcataggcttgactgcttttctgtttggggaggacacttgtcattacagaaccattccgaagaaggggttctcaaagtggggctggcagctgaaattagcctatagtggttcctctgggacatttctcatggttttgtaaattggtttttggctacttctgcattcctatcttcagctttaagaaactaggcctgttgccttcagttgtaaaatgtctcaaggtaaaatagttgggttcaaatgttttttcaagtatatttcctttagaacaagttcctcctctcctgccccaaataattaactatacaactgttctcccaaagcaatggaaaagatctcattttgacaaagcaagctgtttatgacaaattttccaactagaaatttgcagaagaaaagttctcaaatgatgmagaagcttaatcaggcaaaaagacatttttatttgcagaaataggccctttagagggaggcaattatttatagctgataggaaaaactggtatacctgaattcgtttggtaaacttcatttaaaataggaaggttattcttgttattctagtgaaagaaaaaaaatatggtactgaattatgttacagatttatattaaagaaacaaagttttatacattaaaccactcttacagggatatatactgatttaactaaagaaaatgaatttgagatttaataaaaatcttttaaagataccagtgtgcagcttgaaatcaactatagtgtaccatgaatatctatttgaaatacccagttgaaatgaccacattaagattgcttcctttcacctctctatttaagtttaaatttactttttttcttttataaacagtggtgttttttggcttttgttccatattgaacagaggatgaaatcagtatttcaaaacctcttgtatgtcatcaggataaatagtgtagtatttctaggagggaattattggttggccacttttcaatacactcctggcatgatgttgaggatgcctgtggctggcaaggagttttagacctggccctctgataacttgcctccctgctttcatatggacaattgactttttaaaagtctttttaagtgcagttcaaattcaaattcccagttttttggagctagaagcatctccctaaagggatgctgagatggcttcttgccagctctctttctacatacatacatacgtatatatatatatatatatgtttctattaatagatcagtgctaccctaacttcaacctctgtgggaaacacatatggacttgttaaaaatgcagattttggccgggcgcagtggctcatgcctgtaatcccagtactttgggaggccgaaggaggtggatcatgaggtcaggagattgagaccatcctggtcaacatggtgaaaccccgtctctactaaaatacaaaaaattaactgggcatggtgatgcatccctgtaatcccagctactcaggaggctgaggcaggggaattgcttgaacctggtgagcagagaatgcagtaggccaagatcacgccactgcactccagcctggtgacagcctgtctcaaaaaaaaaaaaaaaaaaarggaaaaaaaaacaatgcaggttttgcattactgttattcccacgtacagcagatgctgcagattcactgaccacacttagggtaataaggctgtagttcatttaaatgtattacagataagctatctaaattcctggattaaaaatggttgagtataaggtgtgcttgttatggatatgactttagacagtttatttaatctgtgttttatttttcttatttgttcaacaacggcatctttaagttgatcctatgagtttgaggtattcagattttgaaaagatagcttgttgaaatcctaggcgatgatctctatttaaataatctgtcaccatcatataaaacaatgtcatcttctttgtaagatgactgtgggggcagatattggattctcattttgacaaataaactgatacgcagttgcctagggcttatgctcaagtaggtgctgatgcctaaatggagtctctagagtcaagtgtctttattggtttgtgcttttgttgaacaacccattttgaggaaatttggtttgcattgcatgaagactttatagatttcaggcaagcagcaaaaatgagagtttaggtagctgaaagtaggaagataaaaatttgttattgattattattagtgacattcaggcaccaagtgatgctcttcagtgaaggtatctaagtaaggttagaaatgcttcggcctrtatgactttttaacctggtacacttaaaccttagctttaaggcaccttggggggtttctgaataggtgaatgcactatatctgaagttttaaagtcctagttaataaaaacctttttaaggaacttgttgtaaaatgagttatactttttcctttctttttaaaatactgtatgtactgtgtagtagaggcagggttgtgaacgaatgctggaccaagataaaagattacagttttagtcttggaataccactgtactagctaagtacttgagctgctcagctctcatgaactcagtattttaattggtcaggaaacaaaaataataatagtaactgccaaccacagagtgagactcaaatgaaataatatgatgaacgttctctgtggttttaaaaagctgcatggttatatacttagctgtagagtggttggaccagggggctgaatgacttggttgatcactgtacattaagtacagctgtccccgcttatccttggaagatttattccaaaacccccagtgtatgcctgaaactgaggacagtaccaaaccctgtatatagtatagtatgttttcctccatacatacatacctgtgataaagtttaatttataatataaagtaggcacagtaagagattaataataataactaatamcaaaatagaacagttataatatacaagcaccactactcttgtgcttggagtccatattaaataaaataaaagtcacttgaacacaarcactgtgatacctcgtcaattgatctgattaaccgagagctattaagtgatgaatgagcgggtagtgtagactgttggattcgctggaccaaaggatgattcacatccagggtgggatagggcaggatggcatgcagtttcatcatgctactcagaacaatgtgccctttacaacttatgaattgtttattcctggaattttccttttaatatttttggaccatagttgaccatgggtaactgaaaccatggataagggggtctactgtatctcactctcatctcccgtgagaacagagccatgccctactttgatgctgttgctgactttttcacttggagtctgtggttgagcccctgctatctgaactactattgcatggcctgctccatcccccatacaccgtttctgcttttactctctatccactcttgtggccagcagtttccagtctcattacaaaagcagtttttgttctcttctgtttcttttctgttgcttttcctatgtttctagtcattgtacacgaaggcttattttgaataggcattctggccaacctgagtacttctttccttctgcggagtaaaccgaccaattacagtgcatctggtataaatagtctttggtactttggttctgcttggcagagcatattgttactgggtactcatggtctctctcttcattgacgaccctttttctttttggaatacgctcatattcagagtagttctggcagtgtggcgattaggaaagctgtttgtcagatgagctgcagttttcctgcaccgacgtgtttgtgtcaatcagttttgtatatcaagaatttgcagtgagttttgtttaacacaggtgcagggtggcaacgtgtaataaattagcctggtggtacattttgggtaacaattataaaaaatgtctttcagagtttttcaaacaacaaggaggcaaagagtaaagatcacagaattttggaatcagaggtccagtgatctaatcccagaactattatagccagccctccacatacctgggttctgcatccatggattcaaccaaccatggaatgacaatatttgaaaaacaaagattgtgtctgtactgaacatgtacagattttttattgtcataattttctaaatataggatgactatatttatatagtacttgtattaggtattgtaatctagaaatgatttaaagtatatgggaggatgtgcataggttatatgaaaatgtgatgccattttatataaggtccttgagcattgtggattttggtatctgagagaggtcctagaaccaagctccccactgataccaaggggtgactgtacgtgctaatggtgttattttgattgtgttacttaaactcctttatcckctgttctctcttatatagaataagaatagcaatacctacttaatagagttgttgggagaatttaatgagataagttatgtaaagtacttggaaccatactagtgtctaggatacttactaaatatttcttttaaattattcattaatggtattgttgaatagtttaaaaatcactatgtaataacatctgaaactattatagggcatttaaagatttttcataaaagccaatatccaaaatttaaacttacttttgataataacttagtattttaggtagatttagggtaactgaaaagatttcagtgaactataataattaggtaatgattttgtaattgaaattttatcctgaattttaagtttggagaagtgatgttgagattttaccattatacacacacacaggcacccatacaagcatgcatgtacatatatgcaaattttgccaataaagtatttgcagtgtatagttaatgaaatgtacatatgaaaaacattgttagatgacttccaaattctttaccatgattgactttatgcttttaaattagatgatatagtatctaggagtatgtattagtccattttcatggtgctatacagaaatacctgaaactgagtatcttataaagaaaaagaggtttaatggactcacagttcaacatggctggggaggcctcacaatcatggcagaaggtgaaggaggagcaaaggcacggcttacatggaggcaggcaagagagtatgtgcaggggagctaccctttataaaaccatcagatctcgtgagactttttcactatcatgagaacagcatgggaaaaacctgcccccatgattcaattacttcccaccaggtatctcccatgataagtggggattatgggagctacaattcaagatgaaatttgggtggggacacagtcataccatatgagagtatatgcaaagttatgattttttaccgtattgtaagaatgattctattctacagtatatatcttaggtaatgacatatcttaaaaaatgaaaatacagacttagtttacagacttggtttgtattggaaaagattgtgttaaattgatagcccgaatctcaggaatacttttatgtactgtttgttttacagtaagcagcactgaatataaaagctctgtttgaatccttttctgggaagcttgttctcactcattccttcatactctcaccaggacctacaacttgtattactttatttataagtaattgtgcacttatgaatattaatcttggccgggcactgtggctcaagcctgtaatcccagcactttgggaggccgaggcgggcggatcacctgaggttgggagtttgagaccagcctgaccaacatggagaaaccccgtctttactaaaaaaaaaaaaaaaaaaaaaaatttctgggtgtggaggtgcaagcctgtaaccccagctactcggaaggctgaggcaggagaatcccttgaacctgggaggcagaggttgcagtgagccgacatcgtgccattgtgctctaccctgggcaacgagcaaaactccgtctcaaaaaaaaaaaaaagaaaaaaagaatattaatctctctcctaattaaaacatcttttacatatttaacatttttctagggattccctgtataaagaaaatatgtattaacttaaaatgttaacaattttttctttcctcttcacccccatttccttgaaagagaaagatttttaactccccaaaaaaacctaaacatgctgaaggtgatctactaccggaggcaataaggctttctctttaaagtcaatgtgtttctgatttcccctgcccccaccccagtcccttctagattaaaacaggtcacagttttataacgatggggttggttatatttgcttaagaaatatagttgaaattggccattttggagtaattaataacgtttggagtaaaacattagtgatattgccacacttacagtggaaaatgagcaagttaatacaataaaccatatcaaccaaagatattttacctcagccactatcattattcatttcttgtatgttaccttattctcacttggaatgtttactctgttcctactgataactaaagtctaacagcaagtggaaagctcctaaaaagaacacttttggttcttgttggatagcagcctagttttctctaatccacatctgttctttggcatatttttagactgttcaggtgaaaatttaccccgtatcttaataaaacaaattctgttactgatgggttaaaaaaaatcggtcatactatttttaagttgttaatgggaaaacaagtcaattttgcaggatggctctcaagtctatggaattaatttacattggtgcaagaaaccaactgttcaagactttattaaacatgctttcaccagatgacttttagaactaaacagaagaagccaggtgtggtggctcacacatgtaatctcatcacttcaagaggctaagagggcaggattgcttaagcccagcagtttgagactggcctgggcaacatagcgagattccatctctacaaaaaataaaatagctgaggcaggaggatcacttgaacctaggagttcaagactagcctgggcaacacagggagaccctgtctctataaaaaataaaaattagttgggcagggtggtgcacacctgtggtaccagatactcaggaggctgagattggaggatcacttgggcctgggggatcgaggctgcagtgagctgtgattgtgccactgcacttcagcctgggtgacagagtgagattctgtctcaaaataaataaataaataaaataaaataaataataattagctgggcttggtggcaggtgcctgtagtcctggctactttggaggctgagtgggaggatcacttgatcccaggagtttgaggttacagtgatagtgagcaatgatcataccactgcactccagtctgggccaacagagtgaggtcctgtctccagaaaagaaaagaactaacaaaagactagtaattgggtttttccactttggagttggatgggaaggtgtagttatctattatgaggggagaagtttaagtatgacctccctataaattaactttggtgatattgagagaagtggacttggagaggattttgcctcttccttgctgatgatacagtgctttccttttatgatatagaggagggatgattctagggaaaattggataaactttttctttgtggggagaaaaaagatgcactgtaatggaagatagatagtttctttcttttttttttttttttttgagacagagtctcactgtgtcgcccaggctggagtgcagtggcacgatctcggctcactgcaagctccacctcccgggttcacgccattctcctgcctcagcctcccgagtagctgggactacaggcgtccgccaccgtgcctagctaattttttctattttttggtagagacggggtttcaccatggtctcgatctcctgacctcgtgatccgccctcctcggtcccccaaagtgctgggattacaggcgtgagccaccgtgcccggccaaagatagatagtttcaatgagtatctttgtgaattggaaccagagcatcaaataagcttttgaggtgacatcaagacatgttagaatggaagttctccagattcaactgtctatagaagtagctctgtggtatttagcctctaggatatattttgattatgtgctgaatttttggcatgtgttataaaacagtggcttgtttgtattttttaaaatgctataatcatagtaaatacctttatgcttatctttatgtacttagaatttgagttctgataatttatttttytatgggaggtggggaggtttattttttaaattgcagtccaaaggagtaaatttgatgttacattggacagtttattcagataccacaaactttacagatttaattagatagataatggatgatgttaaaaactaagcagcatcttaagtttaaatttttatttttatttctttttctgtcatcattatttatgaaaactggttgaaaatgaagttaaaagattttctgtacatcataagattggacagaaatattatttaccttaaaactttttctgagtaaaaatttaaacataaactagaactcagcctgaatttttttttaaaccatctttggaagcacatataaaagtagagtaaatacatcgaatgtagcttacctactgcatttgaagaaaatcttttgtgtatgtctgtaagctatttgtgtgttttgaaacagtttaccagaatagactgaaactggtagaaacaggcataagtaactctgcagtggtagttgtattgaaaactggaatggtagtctctttcaaaatcttgaagagatggaaactaatgaatcttttttttttttggtaaaatagtatttttttttgttcacttaaatgaaattatttgtactttaagttttgttccaggaaattacttcagttgtagctaatttattggcaccctttactaacaaatttctgttctgtattaagattagtattagaaaaaaaaggagatgtatggaaattaagaaagcaacaaaaattataagaataattgcccttataaagaagtcattatatgaaaaagatacttgcacacgcatgtttatagcggcacaattcgcaatggcaaaaatgtggaaccaacccaaatacccatcaatcaacgagttaataaagaaactgtggcatatgtatacgatggaatattactcagccataaaaaggaatgaattaatggcattcgcagtgacctggatgagattggagactgttattctaagtgaagtaactcgggaatggaaaaccaaacatcctatgttctcactcataagtgggagctaaaccacgagtatgtaaaggcataagaatgacacaatggactttggggattcaaggggagagggtgggtagagggtgagggataaaagatgttgggtgcaatgtatactgctcaggtgatgagtacatcaaaatctcacacatcaccactaaagaacttactcgtaaccaaagaccatctgttccccaataacctatggagataaaaaaaattcaaaaaaagaaaattgtccttatatacatgtcagacaaaagatttaattatatttggtaagaacattgtagattgttttgtagtgtattctgagaacttatgtcagaggccagaaatggccattgttaccagaagtaatggaaggaaaggaaaagtaagggtatgcttaccattttaggtaatctgatttctgcatattgtagtgtaaaaatatgatagttctattcaaaattttggagaaacatttgaacttcgtttattttaaattaggaaatcagctcaaataggcattggcctttgatttaagagtgttaagtcattcttatgtagaaatgtgctatctcccgagaaagcatcagtgtgggatgccttcagctcatgccatcccctcttccattaggaagcatttgtaaatgcttagccgtgttagggatcatgttagatattgggggcagtgactctgaagagattgtgcgacataatctcaaagagcttagggtctggtagggagacaaccaagcaaacagctactctaaaatagagacatgcttatggcttgagtgagtacataagaggggcacctgacccagactgggagggaaggaggcacttgtgagatgcttatgcttgaactgactcctgaagaacaaataagaattagattaataaagatgagagagaaggctgggtgaggtggctcctgcctgtattcccagcaccctgggaggctgaggtgggtagatcacctgaggtcagcagctcaagaccagcccggccaacatggtgaaaccttctttctactaaaagtacgaaaattagctgggcttggtggtgcatgcctgtaatcctagccactagggaggctgaggcaggagaatcgcttgaacctgggaacctgggaggcggaggttgcagtgagccgagattgtgccactgcactccagcctggacaacagacaacaaagcaagagtccatctcaaaaaaaaaaaaaaaaaaggatgagagagaggaatatttcaggagaaatatgtagggagagaaaagcttggtgtccaagaaaagggaataaagctggaggataggatggagggagggagagaagagagatgagttgataggagccagatcaccaagggcctggggttctctgataacatttaaacaattgtctgaagtgggataaaatccaacacagaaaaacaggtagctattataggattatattggctatataggattatataggctgtataggattatattggaggatttgtattgccagtggtgattagtattttaaaaagttaagaacaaagatgaaaataaatttggatatagtagaaatggaaaggtggagaaaacttgactttacttggtaagtagctgaatgtggagggttaaggggaaagagaggtttaagactattctcagatttctgttggacaagtgagtaaaaaagaaacacatatgtagatcacttttgggtgaagggagatggaaagacgtgcctactttccttaatgagtaagaggaggagaggtgagatgtcagaacatctctgctcacaaatgtgtgttgtgtggatgcttcagagtttggcacgcctgtatttgctactttcaattggtgctaaaacttcgtcattgcacctttatttttgctggcatattatttcttttgataataaagacttttggttataagtgattgtctcaatatgtttgagctgctgtaacaaaatactataaactaggcagcttataaacaacaggaattgatttctcacagttttgaaagctgggaggtccaagatcaaggtgctagcagatatggtgcctgtagaggccccacttccttgttcaaagtggctttctttttgctgtgtccttacatggaggtcgggggcaagggaattctctggggcctgttttcaaaaggcatgaatccctataatgaggatttcattcagatgacctaatcacctcccagatgcctcacctccaaataccattacactgggcattaggatttaacataggaattttcaaggacacacacattgtgttcttgtcattagcagtgacatgagcacaattcaggaaaggtggagcctcttgcttgtctgaaccaaagagctctaatgaggccatgaggactctgtttctttcttcatctcttggtccggctayggtgatcttcatgaccattggcaacctagagttttctccctaattctctctgaagtgctctgtggaggactttaggtatcctgacttggggaatggtagggatactttgtctaggccaaggccttgttcctgcacttacagtctggcatatgagtggaaaggaggcaggtttgtctgtgtgacactatatggaataggttcaccaacaggaaacacactctgttaggaggaagggcaaggtattcttggaaggtgggaggatcacagaggtcggtgaaacctatgaagtcctcttctgttctactctcatgacccttggcaataagtagtattcttggtttcaactccatcataaatgcaatatttgaaatcatgtaggcccacagaattatgaggtggtcacctataggagatagttgattcatatagatatgcgtgcacaagcatgtgtttgtgttggattattatctgtctcgagggtgagcatcttgtggggcaaacccaccctgcagtctgtttttttaaaccagccacgcccattcatttatgtgttgtctgtgtctgctttctctctacaatgtcagggtttagtagttgtgacagagaccttggggcttgcaaagcctaaaatatttactatctggcccttaaccgaaaaagtttgccaacccctgatctaaatggaaacacataattttaaaactcttctggcaaacttactgatccctgagagcacatctggacattctcaggggttctccgaccacagttgagaaacacaggtctacgatgtaattgttaggagtgaaagctcaaggtcagacttagagatgtaaaattttacagacttccctttccctgagaccacactacagtgagcactatctgtgacttttgcagaacttggcaagcatgctgcctaggagactatactagcagtaagtgactagatggcatggaccccatgctactataatcgttacaggttttgtcccaactaatcctatctgwgtgtgctggcgagcagcgattttcatgcaactgtaagtctttgtgtgctggtcccatcagcccctgtcacgtggtcctggcagtcctgtttggcctgcaggaagtgcctgctgtttcatctcagaatggctgcttctacgatgctcgagttgctgtttgttaacttgggccccctctgcctccttagctgcaagcctgtgtttccaagcagttgtttcccagctgtctgttgctttgttacattgtttcaggctgtgcttcaatgtgctctccaagtgttttgcttgacctccccatgggtatctgccttgctttagctcagtgctaagcagcagtttggtattcttctggtatccatttttctcatgtggtcagcctactggtcctgattttctgtgattgaggttttgacacttgcaaagtgactctgcatcattgcttggttgttgacagactcgtcttcatgcttttttgttctttgggctacccaggagtcacctttgataaaatgtcagtaacatactgctgtgataggattttttttttttttcttattggcaagaaaaagccatgtttttgccgtgatctggattgctatcttctgtactttttgagactccccatttgtcaaatggttgcagtttgaatgtggttgtcctcaggtaggaaagtcagtgtcaggacccaggattgcctactgcagagttatatctgattcttatgtttttcaggaatgttgttaatttatgtggctagaaatgtgaattttacaaaatagtaacaattggcttttcaaaatctgtagctgaaatgttggtttgtagatttaaaataatacatgggttaattgagtggaaaatgctgccttggatatgatttttaatagtgaatttgaaaaatgactaattttatatgcatgtgaaatgaaattgtaagtcctgacaagtaaatggaatatgttttagccaacagctacctgtacttaaaaacaaaaccccaaaaacctgctcatttgattttcagtaagagtctattaaaaattcttaaatcagaaaccaggtagtaaacaatttctgtaaaagccgattttcaagtggagacattttgacctggagctagtgaattcaatgaaaaaaacaaaaaacaaaaaacaaaaaaagctaagagagacacattatatccaatgtatgttataatacttatttaaagggtatcataatattttgagtttggggaaagttcaatcctaatgttaatgtttatgaggaaatgtgtaatattcatgcatttctatgcaattctctacttgccacaagccaaagaagaaacaatcaatttacaaataacacagaggcagtaaatttgttggtggtgatgctagctaggcctattgtaattccataattctgtagttttttttcaacctgcaagtggtgaattgctaatgttgctgggagccaaagatatggtgatatgtgaaagtgtccaggcagcgcttacattatgtaaggcttggaggtattttgatgtcagtaaaatactttatgggagtaataggaaaatgtgtactgttgaaatcatatccagaaaattcagagtttatgttgaattttatttcccaactcacatttgaggtttacaagttttgcttagtgtgcttggtgctactcgatcaattgagacacagttcctctctggtgggggttcatgtctgtgtccagacatcttgttggctgtgctctaatcacagtgatcattttgagctgttgttaagaaaaacatggcttccaacatagatgccttgttttctccaacaaatatttaagctatattgccacctccattttagttgtttctctttagatctggctgtcataatttatctgttttgcttcatccaagatgattgctgtaaacaggcatagggtgctgtcttcccttctaggcagcccagtaattccatctcagataatttctagttacctgttggatacttacgtgaaggtctgaataaattatgatcattacgaacatgatacatgagtaatgaattaaaagaaatatttaaaagttttatattttaagtctccagggagtaaggcattgagaaaatggggtaaatatttcttgtcgaagagaaatcaaatatgggtgaatcattgactactgggagtccttgggtttattctcagatctttcactttttggcagtattctggaagcaagttagtgacttgactgaagctcagtttgcacatctgtgaagaggacagtaatttctggtctcatagggctgttaagagcatggaatggaatccaattcggcttcatctatctttatttttcatgtaatctgtcaggcaccatgttagtggaatgtcttgtaaataatgaatcgtatagcctctggtctcaaggatctcataaacctactggacagatattatgtattttggtttcctacatgacatccaagttcatgaatcttttgaattctttccatacaacccaggatgcaagcttctggtaagacaaatggatatttattaagatcctgtaagaaacaaggcagaaaattaaagtcattaggagtatagaaataaaagatttcttgggctttcacctctgtaaacttgaggagtttggctaagtcagtagttggaagcgtagtaaggtcagaagtcaccgtcaacttccgttaaatcccaaagcttacaattatttaacagaggatcacctacgctaacagaatgttgggattttgtttgtttggggttttggtaaataattatatacattcaggggtcttagtactgggtagcttatataagtccaaaaatatgattgttagccttgccttttgattaataaaatgggggaaatatgttgttaaaaaaaaaaacgaaaaagggcargaaactatttgaaaaccaggcattgggttgaattggaagtgaatacacttcaaaaggtctgaggagaaaatattagaaaccactgatttggataatgtctaatagctcttttaactcttagtcttttacctaaatatccttgatatttacagcatagtaaaatctggttttccaaggattctgatgaaagaaaagaaaaaaaatgaaaacagatggacaatctgagaagtaactagtgattgatggtaaatgtgaacaatgcttcagaaaggaaatgaaatgtctgcagcagatagaagtgtgtaaattttgccttcactttagagctagaatcactatgagtggtagcatttcagaatcagaagaatggaaagctcagttgattatcatcacacataggagtaaaaggaaaggttcacatttttattgacagctcatatcgaaaagacagctcctcttagagagaagtgaattctccaccttcttgttgtttcttctgccacctttgccctcatacagcacgctctatcttcatcttcttcccttttccctcctcctttcctgtcttttcttatcttcctccattctctccccatttcctttctgtgctccctctcctttctgcactcacctccttcacctttcatctgtaggtgacactaaaccaaggtttaagaagagccaccttggctgggtgcaatggcttacgcctgtaatcctagcattttgggaggctgaggcaagtggaacacaaggccaggagttcgagaccagcccagccaatgtggtgaaaccctgtctctactaaaaattcaaaaattagctgggcgtggtggcacgcgcctgtaatcccagctactcgggaggctgaggtaggagaattgcttgaaaccagaaggtggaggttgcagtgagccaagatcgcaccactgcactccagcctgggcagaagagtgaaactccgtctcaaaaaaaaaaaaaaaaaaaagccacctcacagagttgatggcagtgtgagtgctgctttttgtacattacctcattcagttctggacacaggaggggtctccaaatcatgctgcgtgggccagggagtctgatggaagaagtcatacttgagttatggctgtctcagggatgctgtgagttgactagcttgctgggaggctggagtctggctcacacattcagaacatttgcaggttactgagacaaccagtaccaaggacttgttctggagactaaccagatatggaaaacactgaggtaggcagaaatcagtttgtgatgggctattgatggtaaactaaggagctaaatggaaagctctggcaaacccttgaatgagagagaaatgatctaacagagaatcctctaacagaagtaggatgaacagattaaaggaaaaagtagggggagaccaggtgggaatctttcgcaccaagtcaggaaggaaatagagttgtcacaaaagctgagggaaggaagaggaggagaggcaaattcaagggactaaagaggttgactctttagaacttggcgatgatgtgaaaatgagtaagaaagagtttaggaggccaggcgcagtggctcacacctgtaatcccagcactttgggaggccaaggagggcggatcatctgaggtcaggggttcgagaccagcgtgaccaacatggtgaaaccccgtctctactagaaagacaaaagattagctgggcgtggtggcacacgcctgtaatcccagctacttgggaggctgagacaggagaattgcctgggaggtggaggttgcagtgagccaagatagtgccattgcactccaacctgggcaacaagaacgaaactctgtttcaaaaaaaaaagaaaaacaaaaaaaaacaaaaacaaaaaccgagaaagagagaaagagtttatgaatttgtcattgtattagtctgttttcatgttgctgataaagatgtaccagagactgggcaatttacaaaagaaagagttttaatggacttacagttccatgtggctggggaagcctcacaatcatggcagaaggcaaggaggaacaagtcacgtcttatatggatggcagaaggcaaagagagagcttgtgcagggagacccctgtttttgaactcatcagatctcgtgagacttattcactatcatgacaacaccagaaagacctgtgcccatgattcagttacctcccactgggtccctcccacaacacttgggaattcaagatgagatttgggtggggacacagccaaaccatatcagtcatagtgtatgactgtctggcttctcatagtattttctgtgtgaaaaaacacaggaggaaagtagttttgagaggatggatatacagtttgtttttgggcatgctgaatttgaggctccactggctctgaaacttttgtagagttacaagcaaatagtatcaatgtcttaacaaaatacttaattcatttattgtgcacttgataggtgccagcctgtgtcctaagcatttcacatggactgtctcatttatttcttataataatcacgtgaggtgtagaaatcattattgcgagggaaattaagcacaacaatgttaagtgatttcactgaagttacacatttagaaagtggtgggatattgtgtaattccatttgtttgaaatgctcagaaaaggcaaatctgtagaggcagagagtagattagttgttgactggcattgagaatgggattattgtaaatgaacattagggatcttaaatgatttatggtgatggttgcaccacttggtaaatttactaaaaatcgttgaattgtgtacttgaaaccggtaaattttatatgaaaaataaatatttagaaagttgtaaaaaagtaaaaggatttcaaattggaattgttatatttaattttaggtgttttcagtggattataatagaaaaatgctcttaaatgtagtagagtgcttccttatcagaaaggtgccctggaaattgtgtctgtccttttttttattttcctttttaaaaaacaaaaggtatttgggtcttttatttctatgctagtgtttcagatgtttgttgattactacctacgaagcattttcctgttacttcctggaacctgctgttcctgatctctttcaggataatgttctagatagctaagctggcttccacctccctcattttccttcgcttcctctcttcctgctgaattcaggaattgtgttagggaccgtgaattttttttaaaaggataattaaaatgttgtcacatagctcacattctaaaattagatattaaaaaaagtcagtgggggtttcctcatagaaacaagggaagacctttactgagattgcttctcagtttattggtcttcatttgttttttggctcatgggacttgaacataggtagggtacaactttatttacataggagccaagagaaaacttcctcttgctatctctaggtttgctaaaaatcagctgacaaaaggcagattaatagaaaaggcatacaaatctgccaggcacggtggctcgcacctgtaatcccagcactttaggaggccaaggcgggaggatcacgaggtcaggagttcgagaccaggctggccaagatggtgaaaccctgtctctactaaaaatacaaaaaattaaccaggcatggtggcgggtgcctgtaatcccagctaytcaggaggctgaggcagagaattgcttgaacccgagaggyggaggttgcagtgagccaagacgagatcacgccactgcactccagcctgggcgacagaacgagactccatttcaaaaaaaaaaaamaaaaaagaaaaggcatacaaatcttttaacatgcataaggggaaaatcagagtgatgacaccaccatgcagtgagatatggatgtttatatcccctttttcttaggggaaaaggagatgggaaagtgtggatgattttagggggataggaaatgatttttaggggatttcggtgggcttgaaaaatattcagtggtctggaacaaagtctgttggccacgcagagcacacagtggtttgtgacaagtctgtccaggtgtactgacagacttcagactttcttcctgcagtaagagttcagtgaatgaaaactcagagaagcaaccagaggtagttcttttctttgttgggtctggactttaggcagataaggaaactttaaagaaggacttcatcttctgccttgaaagagagagaattgagagacaggatggtgggggatgggatggtagggatggggtagggatawcaaccttgaagctgcccgttcagttcagcatgtcaaaaaaccatttgggatattggtttctgagccctaacatttagaatatttcacattttactgtagctgctgtaaaaggttccctgtgactgtatcagccatgagtcctgtagaaatcagataatgacaacagaagcaattacttccttctcccctccgctcgtattatcatcatctacttttgttattttcattaggaagtagtgtattagatcatccaatgttacgtgaaattgaagagggataagaggtgttttgattcttttgcttggttttggaaaacttggtgtctaaattgtttcttcttttttggggtcaaatgaatctaattttgaatgcaatagggaatttttcgatatatttttggtatatctttgggcaaatggcaacttgatatgctagtttaaatactgtcttctaaagagcaagctttttatttctagacatctagtcttatttgtgccatcagagagcttgctggtagcagaattaaaaatcattatgctattaccagtcagtggacacttgttaagagttactggtacattcacattcgtatgcttgtctggtacattttttttttttttttttttgagacggagtctcgctttgtcgcccaggctggagtgcagtggcgcgatctcgactcactgcaagctccgcctcccgggttcacgccattctcctgcctcagcctcccgtgtagctgggactacaggcgcgcgccaccatgcccggctaatttttgtatttttagtagagacggggtttcaccgtgttagccaggatggtctcgatctcctgaccttgtgatccgcctgtctcggcctcccaaagtgctgggattacaggcgtgagccaccgcgcccggcctgtctggtacatttttgctgagtgccagttaaatgtaggggtggacatactatcaggtgcccggatttatcaccgaatctaagtaatgtgtgtttaagattgcactatagtctaccatgtgttacatcattcactaatagaaaatgataacattgacacagaaagccaagacttaaggttagtgaaatgcttataagcctcttctgcttctgacatataagtactgtattgctctttctgcaatttgttgatacagggctctgcagtgagaaagaaaggtatatatagaggagataatacttacctggtcctgtagaaataaaacagaaataaaaacctccacatgtaaagcatcacgaatcttaagggtggaagctgatagggtgatttagggatgtttgtaccaatgaggaatatatatcacctctgcctttgtgtgcccagaagttgaggtccttcaagcagttctgtgataaaattctttctcacattcggaacctgctcccaagacaaatgtattatctgtttgctgattttactttacaggcaaaaggcactttttttttttttttttatcctggagacagagttttgctcttgtcgcccaggctgtagtgcaatggcgtgatctcatctcaccacaacctccacctcctgggttcaagcgattctcctgcctcagcctcccaagtagctggaattacaggtgctcaccaccatgcccggctaagtttttattttatttttttagtagagatggggttttaccatgttggccaggctggtcttgaactcctgacttcaggtgatccacctgcctcggcctcccaaagtgctggcattacaggtgtgagccactgcacccagcccggcaaaaggtattttttattttttgtactgtaagcgtcttatcttaggcacttaacttgaacaaataaaaaccagctctttaaaatattctaaacatttgacaaatgcaaagcaggaaatcaattatacaatatactttaaattttcaaggtacctctattatttatccagaagacattcatttagtaaattgtttagcactgagaatgggtcaggaattttactaggtttgaaattacaaattgttagctcagttttttatttagcttcaattatgttgtaaaaaaccaaaccaaagcaaaacagaacaaaataaagtcgccaacaaagtagcctaatttcctgtaatcaggaaattttatkccctgactcatatttccagctttcttaattaaaacaattaaaaaggagttggcaacagtggtcttatatccatgaaaccaagtagcaggagcaaaagagtgcctgccctctcattaccagttttataaatgagaacttaacccatttatgcctggtgttccattattggaacactaagcttatgggagttatttatatcctactgctcaaggtcattgccaaggtctgattttttacacacacaaaaattgcaacctctggcataaatggattaaggaacacagaattaggcagtatccataaagacacaaaactggttattgggcttgatttgaaacttcatctaatccaattaaaaagcaaaaatcaaaaaactgctccatctattctttcacattgcagggtattgtggaagttgcaaaactaagcaagacatgaactaatattaactacatatggtaatgctagaaatcagttaaacctgaattatacctgtagatcctcatatcaccgttgtaaatccaggcaggggttttaattcccaggtttcagaaagggaagctgcagaagcccagaacataaagtattcatggccacaaatctattaagtgacggagtccatatttgaaccctgggcccctgtgccctggtgttggagcttttgggatactgtgaacgtcaagggttggctcaccatctgaatactaagcctgaactcagaagatgtgtttttcttatgtgtaggttgaaccacatgacagggccatttttgcctgctaagaatgagcaaaaattcatatggttcaatgggtacttctaaaacatacccatgccctattatttctgatatgttttacttttatgtttgtggaaatttaactcctcataggaaaatggaagttggtagtataccataggaaaataggaagttttagacaagtttattaagattcatatagaaattgtggatccaaataaacagattaaacataggatttaggatttagccctacagataccacattcatgcccattctataatctgtagagtttaatcctattgattataaaaatgaagcagtacttttcccttttaacatatatattcagaaaactggrtgctagtatatagagcttaatacaattctacagctttagatgattttatatatatatatatatatatatatattttttttttttttttttttttttttgagacggagtctcgttctgtcacccaggctagagtgcagaggcacgatctcagctcactgcaacctctgcctcccagattcaagcaattctcttgcctcaacctcccaagtagctgggattgcaggcgcacaccaccacacccggctaatttttgtattttcagtagagacggggtttcaccatcttggccaggctagtctctaactcctgacctcgtgatccacccgccttggcctcccaaagtgctgggattgcaggcataagccaccgtgcccagcctggatgattatattttaaataaccctgaatcattaagcacagttacaaaataagcaaagactgaaaatcagtaaaatattcacttaaaaattttagtgactcttactttgcagatggtagactcttgggaaatagttattagtgaataagtgaaaatatcatgcaacacaggtacaactgtgagcaaatgccttttccttttttatacctaattactcatgtagcaatttcctttgggcatatgcctgattgaggaaacatgattctatgtctctctgtcttttttttttttttttttcgtaatgtcatagtgtagggtaaagagcacagttttggccccaagtaaccttggatacatcttctgattcccttggttttctaactgttgtgaccacaggcaagttatgcattctcgtagattcttacttaactgcataatggaaatgttttctgtatgctacgagagtttgaaatgaaacgtaagttcatggcaaatagtacaggctaggcaaacagtagtctttactaatttatttgtttgttgaaactttttataattaaatatttgcaattaaagtgatgccaattttgaagtgcaattattcatttaactgatctctacacttgcatattttctgtttttttgtctgtttcttgggaggaggaacaggtttattgatacataattcacatatatacagttcacmcatttaaactcaaactcaatggtttttagtatattcacaggtgtctgtgactgtctctacaatgattagaatattataatcacttctaaaagaaaccctgtatcttttagctatcacccacctataccttcatgtccccgaccccagccctctgcaaccacgaatatactgtctatataagtttgcatgttttagaatatttttgtaaatggaattatatgtggtctttcataactggcctcttttacttagcaaaatatttataaggtttatcatgttgtagcatgcatcagtagttcatacctttttatagccaaatacaattccattgtatgaatattaaacattttatattaaatattaaatattaaatattttcatcagctgatggccatttgagttgtttccayctgttggtgattgtggatgaatagtactgccttgaacaatattttacaagtttttccttgaaaacctgtttttaattcttttgggtatatatgtagcagtggaactgcagatacgatcattatctgtttaatcatttgaggagctgctgcactgttttccaaagtgactgccttattttacattcccaccagcagtgttgatgtcaccagcgcttgttgttatctgtctttgattctagtgagtatgaaatgctatctcgttgttttatgttttcttgatgattagtacttttgaacgtcttttcacatgttttcttgtcatgtagttatgaatcttgaataaagcaaaaagctctagattttggcttgtttgtcttgtccaattcccaatggcctggttgaaaaaacattttatttgggtctagaaaactcagcaaagaatgatgtcacagatgtttctcacctctgctgtgttttagctgtaagtagatcaagaaaggaaagcaagactagaactaattgctcatcaagaaaggatttacaaatataagtggttctgatacacatttaaattagattacatttaacgacaggttttgtaaatgaagttaatttgaaagggcacacagtcattgggtttaatctgtaaacagctatcatccttcctcctccatccagtttctggtaaataaaagttactcttctagaagagtatttacttgcatgttgcccatgctgtctgtcagtggcagctgctgggtcggtttataaggggatgctacctggttagggacgaagctcatatttttgcagttttcctatggaccagaaaatattgacaaaggagaaggaaataagattttctgcttgcttttgcccttataatagtttaaattgtttttttaattttgtttttttctttctgaattaaattatggtttagccacttgaactactaaaattaaaaaataaaactagaaataagacttctttattatagttgctgctgaataggaactgtgtctcccattatgcagtgaacctattgtctgaaaaagacccactacatccaacagttaactgagataatttctaaaaataatggagtaagagcataactgactaatttagcaaactccttgacaaaaattccaagttcattttgatgagagaaggcaaaaatagagattaaaatatgcacgctatttaaatatttatggaaaagtcagtgtcttgccctgactaaatttctgagatttctttaataatatgtgtgactatttacgtagcatgtaaccttttattctaagtgtttttccattcacaattgtgtttgcctcttcatgagtactatgtgatataaatagggcaagcaatattatcttcagtttagaaatgaagaaattgagatcctgagatgacagtgacctacctgagtctgtcctctagcaagaattagaatctgggtcttctgacatcatcagggatttttctcatatactctgtggatgtttcacttttgttggattgcttctggaagaactgtaaggttttattctgtgtgtattttgtaaattgttcaccagctctcccatttctgccattataaagacactcctaatgaattatgcatcagcttttgacttaaaaaagaaaaatcaaaggacttggatttaagtagtattctcacacagaaacatactacttcttacttgcctttcttttcccctaaaattgtgaaagaatgatttaaatactaatgtgaggttgggcgcggtggctcactcctgtaatcccagcactttgggaggccaaggtgggcgggtcatgaggtcaggagattgagaccatcctggctaacacggtgaaaccccgtctctactaaaaatacaaaaaaaaaaaaaaaaaaattagccgggcatggtggtgggcgcctgtagtcccagctacttgggaggatgaggcaggagaatggcgtgaacccgggargcagagcttgcagtgagcagagatcctgccactgcactccagcctgggccacagagtgagactccatctcaaaaaaaaaaaaaaaaaaaaaaaaaattagccgggcatggtggtgcacgcctgtgatcccacctactcgggaggctgagaaaggagaatcacttgaacctgggaggcagaggctgcagtgagttgagatcatcccactgcatttcggcctgggcaatgaagcaagactccctctcaacaacaacaataacaaaataaatacaaatgtgaaatctcagaatgctgctgcctcaagaatatctgatttactaaacagagaaacagatagttttaaagaaaaagtagcttcattaacattaaaaaattctgggtctttccccttgattttactcagtgtcagtaaaatccatcttaagaaacaaagtggatttcaacctttctgcctcaagttattgtcattgggatttaacatgttccattcaacttttctgtaaaactgtagttttttcatggaaaaatgtctattcatagcttcatagtacctagcacagagcctgacacatagtaggcactcattagttacatttatgmcacatcaataaattaggattcagttgatcatcatttgacttaaaggagaaacataatcacacaagtaaagagacgattttaactatagtaattattggccctcaggctcatagtttggtgtcggagagggtttgatcatgagagtggtgcaataaacctactcaaaaccagggactctcctagtggttggaaagcttgaggtgtaacagtttctattttaatttaggagctccaaccgcagctttctgagccctgttagttatggttatgcaaggcttcctgagagttaagatctaataaaggtttattatctctcccttacctgaaatgcttggaactaaaaatatttctgattttggatttttttggattttggaatattcgcacatacatcatgaggtactggggatgggacctatgtctaaacatgaaattcatttatgtttcatgtacacctcatatacatagattgaaagtaattttatttttctcttgggaatgctgaataaactgtacctgcattttgactatggcctgtcacatgaggtcaggtgtggaattttccacttgtagcatcatgttggcactcaaatatttcagattttggagcatattggattttagattttcagatttggtatgctcaacctatatggcctttcctgcattaccaaaccaaagcataggctagagtacattccaaagcatctaggacttctgaaaacacacctagcctactctgtgtactacagggctgctggtgtgagcagagtattggctttctagctaaagaaccacctgagttccagccccactttgtcaaaagaaccacctgaaattcagccccattttgtcatttatccagggtgaccctggataaaccacttaatttttctgacttctgatttccttgtcagtaaaatggggatacaaagaacttctggatttgttttaagagttagagataatatctgcaagatgccctggggaaagaaattttgtctggtttctctctgacacagctcacgtttgagcatagggcattgagactgtgcaaggcaaactagaaattcagaaacaatcatttattaactttggagccctaaatgtgagtaccacggcatgcattaagaatccttcattacattatgaggaatgaagggagatgttggttttaaataggaggaacataacaattaatgctgcttattagacttgtgatatggtttggctctctgtccccactcaaatctcatctcgaattgtatatgtataaccccccgtgttgagggaggaacctagtgggagatgattagatcatggggactgtttcccccatgctgttctagtgatagtgagtgagttctcatgagatctgatggtttaaaagtggcagttcccctgcgctctctctctcctactgccttgtgaagaaggtgcttgcctcttcaccttccaccatgattgtaagtttcctgaggcctccccatgcttgaggaactgtgagtcaattaaacttttttgtttaaaaattatccagtctcaggtggttctttatagatgtgtgaaaacggactaatacaacttggaaagacttacaaccagttgtcaggtttattttccatcattccgtcttctcaaaataggttggtgtgattctctgaaaacatggccattattgaataatgttactgtcttatattttgtttcttatagatagcagtatcagtatacttttccatagaaaatactgtgtgacttcatgaccttggtgacaattttatgtttgtacaataaacacatttctgctgtgagggatgatacatgcaggctgtagggcatcaggcgatcaggggatgtgaaggtaattgtaggctgatcactgtaggctgaacacctcaaatttttgagagcttgtcctattaattatccaaaatttctgagcattcttttctagcagtaggagagtaagaaattataaatttgattttgattaagaggcctttctcctttttcaacagtgttgatttttaaaaagtcttaaaaaaaaaacaaaaaaactatcagtagagaatatttttagaagacatccagatatccaggtttggaagtggagggttaggggatacttttttttcctccaaaaataccttgctaatctgtataaccaaagtaagttttcttttgacccagtcacttttctagacttattttatattttctgtcagcttctaatgcctaaaggagtttttgttagatgtgaatttatttttaatattaattttttattggacaggtcactttagaaaattgaaattacagtttatgaatcacattttgggatggatagtctacaagattcttatttccattaatactttgatatcataaaaagaaaaataaaatcccaattgttaatggtgcacactatcaacaaagagtcaaattctgtaaaatatttggagagatttattctgagccaaatatgagtgaccatggcccatgacacagcccacagtcctgagaacatgtgccaaggtggttggggtgcagcttggttttatacatgttagggaggcatgagatgtcaatcagatacacttgataaatacattggtttggtccagaaacatgggacagttcgaaaccaggggtgggtggggcatccaggtaataggtaaatttaaacattttctagtttacaatgggttgggtttgtctaaagacctgggattaatagaaaggaaatgttcggattaagataaaagactgtggagaccaaggttcttttgaagcctcatagtggctgcccttagaggtgacaaatgtttccctttcacacctttaaaaggtgctagactctcagttaatctcttcaagattgggagggcttggaagaaaatgatctagttatgttaatagagattctttacagatgcaaattttcccccacaaaggaccactttgcagggccatttcaaaataaggcaaagaaacatgttttggggtaaaatattttgattttttctttgtcacataatgttattctagagtcagattggaaagtaagccgtgatatatagggtgaaataaacccatctgatgagaatttatgatttgtagggcatgactccctagacccctcagataggaatttgggcaaactaaaaacaatcagtttagttctcaacacagattaagattaaaaacacagggtacatcatagatgacttaatagtatgcrtgaagcrtacctaccagatgataatgagatggtaatgacacttgtggttctttttcctagcaaaaagacattctttgtgtttttcttatgtgccaggtgttgggctagacactttacatatactttctccaccagagacttttcagtgatgctggtaggaaggttatgttatttgcatgttttacaaatagggaaattgaagcttggagatgatagggattttccttttggtcacatagctagaaagyggcaaagccaagtctggtgtggtggctcacgcctataatctcagcactttgggaggccaaggtgggcagatcacaaggtcaagagatagagaccatcctggctaacacggtgaaaccctgtctctactaaaattacaaaaattagccgggcgtgttggtgggcgcctgtagtcccagctactcgggaggctgaggtaggagaatggcgtgaacccaggaggcagagcttgcagtgagctgagatggcgccactgcactccagcctgggcgagagtgcaagactctgtctcaaaaaaaaaaaaaaaaaaaaaaggaaagtagcaaagccaagcttggagctcaaatagagtacccttaaccaattctactgtactgcctttgaattgctgtgtatccttagaaaagccccttttctttcctgagccacagttgagtgacctgttaaataaggaaaactagatgttttctttgttccccttctaattctgatcttttgtgttggaactttaaaactaattgaaaaaaaaaacaaccagaaaacttataatgtttattttctttctcccattatagaaaatagaaaagaagaataattaagctgtaattctaccacctcagtatagaatcagtcttaacctttcttctagtcttttttccttttccgtgtatgtatcgatatatttattttactgagattaaaattacatcacatatataaccatttgtattctgcttgttgggcttcggattttcaatatgattctctgttattggtgagactgaatcttttccagagctaccctgacccctgactggaaaggttgggatcattcccaagactagaggattcataacttaaaattttctgtttttttaaggctgggcgtggtggctcacggtggagggtggatcacctgaggtcaggaggttaagaccagcctgaccaacatggtgaaaccccatctctaataaaaatacaaaaattagccaggcatgatggcgtgggcctgtaatcccagctactcgggaggctgagccaggagaatcacttgaacctgggaggcggagggtgtagtgagctgagattgtgccattgcactccagtgtgggcaacagagtgagagtgtctcaaaaaaaaaaaaaattcttttgaaatccaactttcacctggaaacctgggtgcagggaaagagaccactccattatataactccactagaaagtactaccaattgaaggatagtctaagaaaggccaaaaaaaagagagaaggaaatggcagattactagatagctgaacaggttatatctggtaagcactttcatgtctgttattttggtgtctccttttaacactcttgaggtatagtttcaagagggtaagtcaaggatatgaggtcccttacatcgtggcagagccatggctgaatatgcagtcttcctctcttacactgttcttcctgtggtaccaggcagtttcaagcatttgcaatgcacacattagaattgcgcacattagaatagctgggaatggcaggccccactgctgttccccaacaactgcttacttggttaggtagggtgcctggttctctgctggccctctgcttgtgagagcttaggtaatagagatgagtcctattctgttttttatttttggtaccccagagcctggtatacaataggaggaactcttacttaaaattaatttatgattatttaagtttcttagtttttataaaaaggtttttttttgtttttgtttttgtttaattgatctttctcatttgaaaaatcaaaagtacctgaaggcttttaatggaaaacagcagacccaggctgggcgcggtggctcactcctgtaatcccaccactttgggaggccgaggtgggcagatcacctgaggtcaggagttccagaccagccgggccaacatggtgaaatcctgtctctaccaaaaatacagaaattagctgggcatggtggtgagaggtgacagcgtgctggcagccctcacagccctcgcttgctctgggcacctcctcggccttggcgcccactctggtcacgcttgaggagcccttcarcatgccgctgcactatgggagcccctttctgggctggccaaggccggagccagcttcctcagcttgcggggaggtgtggaggcagaggcgtgggcaggaactggggctgcacgcagtgcttgcaggccagcgcgagttccaggtgggcatgggctcggcggccctgcactatgagcagccagccagcccgctgcaccgggcagtgaggagcttagcacctgggccagcagctgcgctggacttctcgtcgggccttagctgcctccccgccaggcagggctcgggacctgcagcaccccatgcctgagcctccgccctcaccctgcggcctcctgcgtggcccgagcctccccgacgagcgctgccccctgctccaggtgcccagtcccatcgaccacccaagggctgaggagtgctggcgcaaggcccaggactggcaggcagctccacctgtggccccagtgcgggatccactgggtgaagccagttgggctcctgagtgtggtgggggcttggagaacctttatgtctagctaagggattgtaaatacaccaattggcactctgtatctacctcaaggtttgtaaacaccaatcagcactctgtgtctagctcagggtttgtgaatgcacccatgacactctgtatctagctactctggtggggacttggagaacctttatgtctagctaagggtttgtaaatataccagttgcactctgtatctagttcaaggtttgtaaatacaccagtcagcaccctgtgtctagctcagggtttgtgaatgcaccaatcgacactctgtatstagctaatctagtggggatgtggagaacttttgtgtggacactgtgtatctagctagtctcgtggggaagtggagaacttttgtgtctagcgcagggattgtaaatgcaccaatcagcaccctgtgaaaacggaccaatcagctctctgtaaaacagaccaattggctctctgtaaaatggaccaatcagcaggatgtgggtggggccagatagaataaaagcaggctgcccaagctagcagtggcaacccgcaggggccgttttccgtgctgtggtagctttgttcttttgctctttgcaataaatcttgctgctgctcactctttgggtccacactgcctttatgagctgtaacactcatggcgaaggtctgcagcttcactcctgaagccagcaagaccacgaacccactgggagaaaggaacaactccagatgcgctgcttaaagagctgtaacactcrtcgggaaggtytgcagcttcactcctgagccagcgagaccacraacccaccagaaggaggaagctccgaacatatctgaacatcagaaggaacaaactccggacacgctgcctttaagaactgtaacactcactgcgagggtctgtggcttcattcttgaagtcagtgagaccaagaacctaccaatcccagacacactggcacgtgcctggagtcccagctattcaggaggctgaggcaggagaatcgcttgaacccaggaggcagaggttgcagtaagccaagattgcrctactgcactccagcctgggcaacagagcaaaactctgtctctcaaaaaaaaaaaaaaaaaaaaaaaagcagaccctacctcatccactccctatcttatataaaaaacaaccactttaatctcttgggcttttcttctgctattggaataataataagagtgtagtctgggggtcactcagacttgagttcaagctttgctagttatcagtatgtgccctccaaaaagaagtggaggtgcacatgcttctatgtccactttaaacaacattgactctagttagatttgtgagtgctttgtgactactgagcattctcttgaatccatgcagagattagcacttttagcacactgttttgtacagttgtgtatcacatatttttattgaagacactagtttaagagttaagagtgaggtagttaagtaatctctaaatcagatacagtggaatgagaaaataggtttgatggagccatcttgaaaagaaagttgtggccgtacatcaataaccttaccttattgtgggctcctgtcctttcgaattccaatggacacactagcaaggtaggatctacttagaaattgtgagatacaattttctagagaggtaaaatcaaacgggtatatggatagctattctgctttttcaagtatataagtcgttttgattaatgtgtttgcacatggaaaactattggattcagagtagctagcagctatttctagtagcttgtggaaaagcagacatcttcaataaggtaattattttaaatgcatctgtagctatgtaatgtgcacatgtgtttgtaattacagttggagaatttagaatcaagtgctagacttatcggtgtttatacattcaacaaatgaaaaaaaatcgagtattggctgctacctttgcaaatgtgcattgtctcagagtctgcaaagcataccacttgatagttgtcacaacttaaatttgctgtgtaatgtgtagcacaaaaggttgtgttgcgtaacctaacaggcttatcgctgaactgagcaaatgtttctgcgtaggttgccaacgtggggctccagagtgtctggccctgtggttttaagatttggcaagtatgaatttagagttttttctcatcttttaaagaaagaaaattatacgttagtgtgagtacagtaatatgttcagtaagtagaaataacatgctgtcatgacataatttatgagaagtatttagtaggccatatacaaattttagaccagtgggaatttttggctaggaatttatagctgtttgttcttaacaaaactgtaggcatcagaaagccgacatagaaatacttgataattagtttacttatcaatttattgaaagttttagactattactataaataataggctttattttaggcaaagtgaagaaaaatatgggatacagcaaaagcaatgtcttcaatacacagtctagttatgtgtgtgtgctgcaattaaactgctgtgtaatcagcaactagtaaaccaagtaagtgtttagctgacaaggttcaattttacatggaatggtttgtgtgataaatgactaaatggttctgacttcagttcttggatcatggtaatatatgcaaaaataatatagagccaattcttgattaataggaagtttatctaatttgtaagtcatgagggctttcccttttctttctccttgcttgttgtctctttccctggctttgctcattttcctgttaacgagggatgatgcttagacaagggttggggtcaggagagtgatgggaatttatttgttctagattttggctaacatttttggaaactaagaattgttaaaatgttttacaggtgttatatttcaaacagaattaagtacttatgtatttaaaaattatttagctttctttaccaatttcaagttgactcctgctgcgtaataccaattttggaagtttaaaattctgtatcatactttattgattgatctttctacagattcttgtcagagtaaatgtctcagtggggcttattttactctggctactgtttcattgaagaataggataacctttttgcattttggttctcatcatgttttttttttatgagacggattcttgtcctgtcgcccaggctggagtgcagtggcgcgatctcggctcactgcaacctctgcctcccaggttcacgccattctcctgcctcagcctcctgaatagctgggactacaggcacccgccaccacgcttggctaatttttttgtatttttagtagaaatggggtttcaccgtgttagccaggatggtctcgatctcctgaccttgtgatccgtctgcctcggcctcccaaagtgctgggattacaggcatgagccaccgcacacagctggttctcatcatctttaaggctaagggaatgactgaatatggtagctatagaaagacagatgaggactaattttggtttccagctgtgtggaagtgtagtttaatctgtatttctgtaggtcacacaattaagtaattttatagttctaatttgaaacatcctggcacctacctaaaacactgttagctggagcttagaatatgataaagcattgatttctcttagatgctatccaaataaggctaattgccttaaaaggaccttgttgtaagggagttccaaagcttggaaactaatgccagcctcattgttggatgttagtgggttatatttacataattacaacaattataggcattgactaatatataagacatctttttaaaggtttttgattttaattgttctcagagggaagatctctttattttttttcaaaatgtttcatttgtgaaatcctttctccattatgcatacgtaaatactgttaagaaagtaagttgagtaatagaaatgatgcaattaaggaaagctgaatattggaaaggatcatttattttaaaccagctcagttataagtaattcattgctgtgaggtgaggatattgtatgtgtttaaggacaccaaaaatcattacagattttactgctatttcagttcagcaacatgcgttgagtacctgctaggttaccaggtattgtgataaatgtttgggattcaaagataaataaatacataacatgcacactagctcctttttcttgcagtatttagggccctataggtggtcagcattaagcagctaattcctgtagtgtgatttcagtcttttgtgcatgtgtagggagggtgggggatcttcccttctaagaactacttatgaacaggcagtctagatgattaattttacttcattatctttctgtaaatgacatgcctttgacgatatcctttgtagaagacagaattagtttctagtggaaagtttcagagattatggttttgtttgttatcccagcagcaaaggaaaaactggaaaacaggacaattggagtgaagagaagtaaggtacgtggtgacactggagatactttatctaatatctttgtggaggatataatgctattctgtatcgaaatttgtgtacttctctatagattatagaaagatggagcatattccagtaaatatcatatatttacatagctgtggaactggtcttagaaaatgtgtgttctttcaactgtgtgccaggatacgaaaaagcaagatttagctcacaaatattaattgagggcccaggtaggtgcaggtcacttcattttcattatcattgctgtcagtactttaaacctttattgaagaactagtatgtgaattcattcatgtcttcagtgtcaactctgtgtttataatgtgcctggccttgggcagatcacatcagggtatgtgagtaaatctctaggccttggtaataagaaggttagatgaaaagataattgcaatgtttgtgatatgatgaggttatacgtaggttgatatattagttttctattgctgcttaaaaaattaccacaagagcgagcaggcttggctgtattctctgctcagggtctaatagggctaaagtcaaggtgttaactgcttcttctctggagaccctgggaaagatcagtttccaagcctttccaggttgttggctgaatccagttccttgtgattgtaggagtgaggttcctgtgttcttgctggccatcaccagaggccatgctctgttatcagagaccgttcacattcctactcaagtgccaaccctccctccaccttcaaactagcagtggtgtgcatccttctcttgctttgaatctctctgacatctcttctgccacctgcctaagaaattctttccttttgaagggttcatagggacccttttgccataatcataggagtaataccaggagatggagatcataagtgtcatcttaatattatgcctaccacagttgctattggaaacagaagacaagtaccaaaatccaacttgagaggtttaaaagtgagttcctggaggatgaagtccctgagatgccaggacatgtacttgagttaaagtctaggtctctacttattttctttgttattattatccaaccaatatttactgagaacttgtgttggggccaagtcactgcactgtcagaaactcaatttccttagtgataaagttgggatggttatatatttttgaaggtctcttaagagaattagaaataataatgaaagggtctaacaaagaagggtgctcagttaatagagtttgtatcaagagagcccacgtggtatattgggaacagtctgagattcattgcaggttaattcacacattctattccttattccacagatacttattgaatcctaaaccacagggctgagactcaaatgaagtgagagagatacttgccttgagcacagaatttcaggatgtgcccctcaaaacatctatgtttaaatcaaatcaatcatatgctaaaataatataaagttaatttagaaatctatatcaaataccaaaataaacccaatatcacaatacagaatcagtaaccacttatactgagccatgttagagtccaagggaaaaggaaaagtcagtgatactgatctgatctgtctttaacagttttatacattaattttgatttttttttttttttgagacagagtcttactccgtcgcccaggctggagtgcagtggcgcgatctcggctcactgcaagctccgcctcccaggttcatgccattctcctgtctcagcctcccaagtagctgggactacaggcgcccgccaccacgcccggctaattttttgtatttttagtagagacgaagtttcactgtgttagccaggatggtctcgatctcctgaccttgtgatccgccctccttggcctcccaaagtgctgggattacaggcgtgagccaccgcacccagcccccctaattttgattttttaaagatgtattcatttatcttggtcgggtgcggtggctcacgcctgtagtctcagcaccttgggagcccgagtcaggtggatcatgaggtcaggagttcaagaccagcctggccaacatagtgaaaccccgtctctattaaaaatacaaaaagtaaaataaaaaataaaaaaattagcctggcgtggtggtaggcactacttgggaggctgaggcaggagaaccgcttgaacccgggaggcataggttgcagtgagccaagttcatgccattgcactgcagcccaggtgacagtgcgagactccgtcacacacacacacacacacacacacacacaattatcttgattaatgagttttaaattttgctccggagatgaatgcctccctcgccttatcctactcttgccctggttgcttgatagaagactttgctttttccatttagggaccataggaaatgagcaataggataaagaagttaaataaacagtacagaaaatgtaatcggagttgaactttgcttgtaatattattttgactacatctaagtattattttaggttaacatcctagcattcttctcaatagttctttagattcctcagttattaaaataattattagcaattttcaagatgattaactttaaaaaaaaacaacatgtcctatatttaaagtacagaatttctttttattttggagttactttaaacatcttccagtattagtaaagtcccattatcatgttcatatagtaacacatctgtcagtttttacttttttgtttgattcctctgtgatttcagtagctttataatcattctttttagctattgcattctattatgcatgctttccagtaatgtaagtggttaaggtaattgcaacctaatatcagaatgactttttcatttcaaacctttactaggttatgttttccttccacagccttgtcagagagggctaaaattttctatggtctgggcattattcccatgatggatatttagtcccatgattgctatattattgctagcattttaacatttctgagaagtacaaaccaagattgccacttgctattttgaatgtatttcaaataatagtctttatctgagaacagatagttagaaaaggaaaatattggaagcttctagttaatcagaggtgaaatgaaatctctaacattaatgaatatcccagttatagagcttttaagacatagtaggtaaacttaatccttttcttctgccttacaaactaacaaatgccctatttgtataaactaatgtacccatgattttagacattcttaaatcacataaaatgtaagcaactaaagatcagttagaatttatgaccggtaaaataaaaagtccatcagggagatagtattaatcaatctgagggaatgatacttccatttagaaattgttctgaataactataagcattaaatgagcaatgccatgagtgcttttctttatacaattttaactagaattataaaatcgtggtattgtttaaactctttatcttcaaactttcatcacattgatgtaatttaaataccagttaagtttagcagtaatttagccaaatgattaattccatcctacattatgttcagctaaacagtctaacactttttttttgttttttaatatcaggtctaaagtgacaccactgtgagagtaatggtaataaaaattgttacgtgcagcactgtttagaaatgaatttgaacctatattcaaagcatctgtcttgtgagactcgacagttctgtttactgctttaaagcagccactctgtgggaaacttttaaaaatagctgcattattaatatatttatttaaaatggctgccatctttatcaaccccaggaagggagcaggaagtagatgccagtataagcaacataataggcttgcagtttggttttgtttgtatacattttgtaaatagttcaggaaatataaatgaataagtaatcagaagtcaaagagtaaaataacacaaagcttttccagctacaggtttgattgtttatacaggaatttgaggttgacttaaatctgtaatgctcaaccttaccagtagtaagtcacaaacaccccattgagctttgttacatgcttttaaaaaggagaatattttatctttctaatgctgtttctaatgcctaaataccagtgcccaaagggagacagttccctgatgttattcttccaaggaccacattctaaagaaagctttttgggcagtgatatggaataataaatgtatgttgggagaagggaagagagtccattggggtggcaaaaaaactaaattctctctcaactttctcattagtaatttactgggcagcattgagttgctatggtatttttattgttgtctcccttagaaatttccagttgttccaaggtaaacaagatagtataagtcctttggtctagtataattaggtaatttttttattctgttcatttgcaagcttgaaaaggaccaatggcagaaattaagtgctcccttaaatgactatgccagggcaccaatgtatattttatcttcattgttcataaaagtgcatctatctttactgatgatgaattggggatgtcatggaggattgatttttatcctgtagtttcagctacttgatcagacctcttttccttctagttagcttattaggacatttcttattattttgattatgcaagaagagtgatctagtgccttttaaattttatgatcacttactgagtgacagggatatttacattctaaatgaatgcaccaagagtttaatagttacttataccttaaagagacacaaataaggttggctcacgtgttcattttggttttatagtagtattcaggtgttaagtgctgtgtatgaggttaagaacaggaaatgttctcctctgaatcacttggaataaattgtctttgaactagtaagaaaacgtgatagttaaaaatgctgtcattcatatggaatgagaattctaaattgtttgccaccaaatatttaaaaattttgaggcaatagtgtcaaaccagaaccaagtataattattagttattttaatgtcaaccatagtcatttttatcagtgatgaaaaaaattagtaaaatgttatttaataattcttctttctagttaatgaaaaatgatacatggctgggtgtgatggctcacgtttgtaatcccagcactttgggaggccaaggtaggtggatcacttgaggtcaggagttcgagaccagcctggccaacaggatgaaagcctatctctactaaaaatgcaaaaattagccaggtgtggtggcgcacacctgtaatcccagctactcgggaggctgaggcaggagaatcacttgaacgtgggaggtagaggttgcagtgaggtgagatcatgccactgcactctagcctgggcgacagagtgagactctgtcttaaaaaaaaaaaaaaaagaggatacatagaaatatgtttgatacatgcttattctatgaatgaatatggcagtgattgtaaatatcatactgccaaacattttaaacagtgccagaaaatgtgttggaaacttgaagttgaataagacacatctctaacctgtataagagctcagattttccagcatctttgtgagcaggtgtggccatatgatttagttctgggtggagaagagatatgtgtaacttgattgctgttgtttcttttcctgtttcccgctgcctgaaatgccaatatgatggctgtacctagatgggccaaaaagcagatgccatgagttaaatacagcagagcaacaaggtagatggagtatgggtgccttataattaggacttgccatttctaacactggactatatatttatgtagattgatgaaattccatcatgtttaagtcactttttggaatttctatttatttttatttctatttatttctataagacattttacaatcattggtcaataaaccagacgtctaagtgagttgagtaatgaaagaaaaggccatctgttaggaatagctgggttgtaattaaggcaagcgtccaagtttatctatctttatgtgggtagaacatactagataggaacccaggaagactttcagataaaaatttagaggaaaacagagtattctagagttgactatagaaccagtattgtagaaccagtattgttgtttactactccataagtcctagtttcttaaactatgaaagtgtgattgttataaagatgaaatggaacatgtatggtaaattgctttgcaaaccatactctgggtagtagtcagtatgtttgaacatatacatgtaatggatgaaaggaaaatgcaaatttaaattgcacttcctactatcaattgaatatatattcagatgggaaagtttatcctctgctattaatgaaaattctagcagatcctctgatttttctgttactagaaatccttataatccctttaaattacaaatacagtctcatttgggaaataaatctttgcctctggtgtaccttgctatagaagggaatctgcattctggaaaagtggggtgtgataggttttcatttgttgagcaaatatttattgaacagctactatgtagcaggcattgttctaggctgggaaacaatacagcaagtgacaaaacagataaatccctgcctcttggaacagactatctaatggctacttatttcttcctggtcattttttcttccatttactggctcctgacatggactcttcagagatgtaagaatggtgtgaaggatccgcagggaaggtctgtgtgtgttgtggatttaaactgatgttatgtactctgatcctagcacatattcagagctgactcattttcttatgggtgtgtctcgaattcattagaaccttccctgctgggattctctaaccacagctcgcctgaagtattttgcctttccctctggctaacagtttcccctcagcccttggttttttggttgtctgtgccacagactttctctatctgtgaccctccctctcaggaaggattcacaatggctccataccggctcttctttctgccaagtctgtgagtccatggagaacagttgcctacctttctttgacctgctctcagaaggggaagctaaaaggcctctttcatgctgcccgagcaatctggtatttctcaggttagagacgccagaaaaaggtgtcttccaaactcgagcacaacatagccagctcttgacatggccttgagctttctctgtcttgatgtgaaggaggtggcactcttaccccagcgctcctcagcctttattacctgtcacttgtatacccactatatcaacaaggggtcatgtactttagtgatacccactttgaaatttgcattttggtttgcacttccctgtgagtctgacactcatctcctgaggcctaagcctaaactcttattttagtatgtagttacacatacttttcaatataaaagttgtttatttgtatttcatcccaagagtgctttcctgaggtggtttgtttgtttgttttttgttgttgttgttaaatacttgactgtttcccacagctcagatgtagagaaaaagtcggagctttttagctttttttagacggaatcttgctctgttgcccaggctggagtgcagtggcgtgatcttgactcagtgcaacctccacctcccagctacaagcagttctcctgccttagcctcctgagtagctgggactacaggcacgcgccaccacgcctggctaagttttgtatttttagtagagatggggttttaccatgttggtcaggctggtcttgaactcctgacctcatgatcagcccaccttagcctcccaaagtgctgggattacaggcgtgagccaccacacgcagctggtgctttttagcttttcaatttaccaatctgaccttctttacctgctagatagtagtgaaggaaaccaatgtgtaatcaaatagaagaaatttcatccatgacatgatttaaatcgtaatttgatgtaaagtgtggaggctgtagtgtttatcttcctgtctgctctcctttaagatgtcatgtatatgggggaggaagtgggacactgggtagtggggaagaatggtccttagacctatgtggagtccttgggattcttatttgttcctgtggctggtattactggtattacagtgatcaagaagagcaatgaccaagatgcaaggagttctggtttttctgttgaggaaatctggacacatctcttgtttgcatcccagtgcccttctcccagtcatcatgtatatgtttcagcgtgaatgtcccctactggagcccataaaaattctaggtccactgcgtaccatgtggaggcctagtatggcccaggatagttgtcagtgccctaatgctttggggcttctcctaaggcgcatccctacttatttactggagtaccatggaatgtgacctcgagaccctcctgtgtctgcatccttatgacccaaatccttcaagacaaacagaggcatgtcttcatgtatttcttcctgaaactttccctaggtcatgccattcttttttatgtctttagcctcggagctaagctaagagacccaaatgacaaaggggcctaaatgaagaagtttaaaaaaaaaaaaatgccgtgttgtctacaacatttacattatatgccaccactatatggtagctaggaacaggtagtaactgtatagtgttcaaatgagagtaaataagaatttagtagttgctgtctaaacgagatgacttcccactatatcctgtatattctttttttttttttttaaggtggagtttcactcttgtcgcccaggctgtagtgcaatggtgcattctcggctcaccacaacctccgcctctcgggttcaagtgattctcctgcctcagcctccctagtagctgggattataggcgcctgccatcatgccaggctaatttttttttgtatttttagtagagacagggtttcaccatgttgcccaggctggtctcgaactcctgacctcaggtgatctgcctgcctcagccgcccgaagtgctgggattacaggcgtgagcctccgcttccagctatatcctgtatattcttcattccctagatcgagtccatttttattaacaccacttcaccatttcaccaaggtcatatgatttcattaactcaagtttttagccactctagtgcatcatgattgttttctacgtagacagttgcctttctgtgacagttttcattgtgtttatcttatttgctgtctttgttaggaaattttttctgcagttgcaatagtagctgtgtggctgtagaccttgttacttattttctgagcattgatttaccttttggtaaatgaggataataatacctgtatcacacaattatgaagatttaaatgaaaaagcagatgtagctgggcgcagtggctcaggcccgtaatcccagcactttgggaggccgaggtgggtggatcacgaggtcaggagttcaagaccagcctggctaacatggtgaaaccccatctctactaaaaatacaaaaattagctgggaatggtggtgcgttcctgtaatcatagctactcggtaggctgaggcaggagaattgcttaaactgggacccaggaggcagaggttgcagtgagccaagatcacacaactgcactccaacctgggctacagagcgagactccgtctcaaaaaaaaaaaaaaagaaaaagcagatatatggcttttagtaccatgttagacaagaactgccaagtactcaataaataatttattattaatattattattccttttcattgtttcccacaacccaccttccctttcaaccaggctggtggtgttactttcctaaacattccatgtccaattttgatcttggttctcagatttggcttttatactataattttttgagtgcccttcttcctccactttggttatttaattactacctatcctttcaaatctaatgcaagccctgtttaacaaataaatgcctttctgatagctttattttaaactaatctgctctttcttttagctcccttaatactacagaaaatatgactctgttgtcctaatgcatcgtgacttatctattccagggatgtattatattttgcattgtttctcattgttttctatagtttttctatgttttaatttttgtatgatggttggttgctatatttctaaatgtcaggtacaggttttggtcagaaaggaggggggtgctgggcatggttgctcgcacctttaatccctgtgctctgggaggccaggcgggaggatcgctcgaagccaggagtttaagactggcctgcataacaaaatgagaccccaagaaaagtctctaaaatatatatttttaaaaattagcagccgggcacggtggctcatgcctgtaatcccagcactttgggaggccgaggcgggcggatcgtgaggtgaagagattgagaccattctcgccaaccaacatggtgaaaccccatctctattaaaagtacaaaaattagctgggcgtagtggcacatgccgtagtcccagctactcgggaggctgaggcaggagaatcgcttgaacctgggaggcagaggttgcagtgagccaagattgtgccactgcacttcagcccggttgacagagcgagactgtctcaaacaaaaaacattagctgggcatggtggcacacagctgttgtcctagctatgtgccaagacataactgaggggctgaagcagaggatcacaagttcagggctgcagtgggctgtgattataccactgcactccagcctgggcgacagagactctgactctaaaaaaaaaaaaaaaaaaaaaagagtgaaggcagcaaggggtggacagggacacatctgccagttattttaaaaatatttttatttatagaaataacataaagttttatggaactctggccagaaaccctccacttagatttctttgcatggaattatgtcacgtgttgacccctctctaaaagttgcctctggcaggggctagcagaaggttgctgcagacaaccaacagtatcccacatacatagtaagcaacagcttaaatagctactttccctatggaaacttcagtctgaaaaagccctctacatgtatctttcagaaaataactttttaagttaatgaaactactaacttaatttctgaagggaagtttatagttttatttggggggaggattttgatgcttattggcttttctttgttgtcaaagaatgtatacaaaagatattgctatttcaggtctggattgaagaactcctcagaatataaatccttgttttattgctggaaggaaaaaagcagaataaggcacgagttagcatcttgaaagacacaacagggatttattttcccttctcttcgtgtgtgtgccctttaattttttcattcctcaagcagaactcaggcaaccccaaattaaagcagttcaggacgtacatcacatgatgattacattgtatctggctgttctggagatggacagataacagttgttgtagaaaaccttttgtagtgtctgaaaagacaactgtcacaaagaatgctgtaactcccctgtgttacaagataaagttaaattagatcagctgaggttctttacaggtagtgatctctttagtggtatttgaaatgtgttgactgaacagaactagagtgtcctaagtgaagttttgttatccatgggagcctgttgtaaatgccacagtgttgtgatgtatgtttaactaatttcatgttctttcgaagctcctgttcagtagcttaaaatgttcattaccagtaaacattgtacattagcagacaagagcctagagaaaacaccacttaccctttggtaatggacaaatagataatagtggaagatgagaattaattgtctttatgcaggtgtcacatcagcctgcaatagaacaggattatttatgctttcaaaaaaataccattgtgcttttatgagatacagagcaggcaaatagctgctaaagaataaattatttgaattggtattaatgtggtgacttaattcagagcatcgaggaatataatgcacgtttctaacacccctcccctttttcttaaattcaagaagtactgcaaaatgattgagacttcagaattaggaactgtggcagaacgatttgttcttttatcctgctttttacgtgggcagtttgtttgcttatcagcactcttgaaggtgctgatcctaaattgtcaggcctattggtcctggctggagagagcattgtttgccttattgtgagagtgaaagcattatggaatacatttaagaatttttatatagaggccttcatttgtcttagaattattcagtgatacaaagagctttcatagctgttactggacactagaatactaagaactgcatgtatattcaagaaatatttttgcccatttgctcacttattcagcttttgatttgcctctggcatttttgtattgagacaactaacatcaacatcttgtccataggtctaataaagtatgtcctttgagttaggtatatatttcatttttatcttgagtgccagggctcaattaatagtagtatttggcactgtscatgtttttgtctactgggaagtatttcatttaattgaacacatatttatgggatgcatcatatttcagcactcgtgtgtataatggggtacaaagaagactatggctttgagctttgtgagggacatacacccacatgaaccttcctttctctgccccccatctgcctccaaaacacattgtaggcagaattctaaagaagagaagctagggtcctgtcccctggctattcaaacctgaatccaggccctattgcaaagggacttcgtagatgtaattaaagtcccaaatcagttggccttaagatatggtgattgtccaaatgggcatgacccagatggataagcaaaccattcagagagttttctctagcaacggcagaacaggaagccagcgatatgcaaagcctgagaaggactctactcactctgctattgccagtttgaagacagaggagggccaaatgaaaaggaatgtgcacagcctctagaagctgacagtggctcctggatggcagccagtaaggaaataaggacatcagtcttggaatagcaaggaaatggaatttgtccaacaacttgaatgatcatggaagtagattcttccttaaagcttccagataagagcccagtctggccattaccttgattttggcttgatggggctctaagcaagagaacccacctgagttattgctgagtttctgacctacagaactgtgagccagtgagtttgttttgtcctaagcctctaccattgtggtgacttgttatacaacaatggcaaactaataaacacacacagagtgatcatttcctttataccaggatatatgagaggtgctaattaatttcagttttcaggaccaaaaagaaaaggtttagataatattaacaggattttaaatttactacaaatatcttcattttatacatgagaaaatagaagttcagagaagttaaggttttatccaagattttagatctggctagtggcagagctgggatagaagcttgtctcctgattcaaggttcagcatttttttaactgtatcttactatggtgcataatgacttccagctttaaattggaaccaaagtgtaaaaaagctaaataatggtaatttctctgtcataatgccaagtgtaatgaaggaaagaaatggaagaaaaaggtaatttcaggaaagcattattattttttgtctaaagattttagagcatggaattgagtgcattgctttgacttactcgttaggcaatatagaagcattcataccttcaatggagtattgttccttctaacaatatcgacccactgctgaattcttctaatgatgttgctattatttggcatatcatgggagtagcttttttacttaaatacgtttagcactttctttttagcaactatttgattgggaggattaatatgatattgtttccagtagcttgtagatagttctaatatgaagaatcagatttggtgatcatcctgaataatataataaacaccagttgggctagtatataagaaaattgggctaggtaatataaccaaaagaaaatactggtgttaagtattaagttggactttcttatttgttttctaaattcaatctaattaaccgtagtttttaaaaaaagtttaggccagacgcggtggctcacgcctgtgatcccagcactttgggaggctgaggcgggtggatcacgcggtcaggagattgagaccatcctggctaacagggtgaaaccctgtctttmctaaaaatacaaaaaaattagccaggtgtggtggcacgcacctgtagtcccagctactcaggaggctgaagcaggagaattgcttgtacccaggaggtggaggttgcagtgagccgagatcacaccactgcactccagcgtgggcgacagagtgtgactgtctcaaagaaaaaaaaaaagtttagaagtcattttggagcaatgttggcatgactggagtgagtatcccatctcttctggtaggtagttaaatacagtatgcgctttggagggaattgaatcccagcttggcaacttactaatggtatgatggtgtacaaattacttaatctcttcagactccagtttcttcacgtgtaacatggagactaatagtattaactttatacctgtcacataagaggtactccctaagcaaatgaactgagtggattaaatacattagtgggggccagactcggtggctcacacctgtaatcccagcactttgggaggccaaggcgggtggatcacctgaggtcagaagttcaagaccagcctgatcaacatggtgaaaccccatctctactaaaaatacaaaaaattagcagggtgtggtggtgcatgcctgtaatcccagctacatgtgaggctgaggcaggagaatcgcttgaacccgggaggcagaggttgcagtgagccaagatcgtgccattgcacaccagcctgggcaacaagagcaaaactccatcacaaaaagaatcacacacatacacacacacgtatgtatgtgtatatatgtatgtgtatctctatatatatgtgggtaagcttcttatatataaacctaatacatagtttgtgctacgcattgtttgtctcttaaaatgtttttagtggtagttaaatgatatgttcaggtttgatgaataagtgtagcttcttgttttacttgaccccaataaatagaattccccagtgaatcttatcctttgcttatttcacgtcaaatatgtgcatagcacctctttgacggtggctcagagtatgtttgctgacaactggaggagttaaagtgggtggttctctgtttttataaccttcttttcctgccttggggacacacgttacccagaatcacactggcttctcctgagtatgctaaactcttttaatttagactgcttctactttagaaactaatacgcatttgtatttacactatgagaaaacaaaatccttgccctcgtagacttacattctcatgggagacatgggaagcaaacaatttttttacttgcttggtgtctctcacctgagtttaaaaatctggacacagctccactttgtagatttgatgcttttttgtttttttttaatttggtataaaagctgtactgtgattgtgagacacagcctcagcacaaagaactgaatgtcttcatccctattggtccaggtgggctcctattctcttggtctcttgcagccttacttgttctgtggctcctcagagcagatataagcagtagcaatgctagtgcttcaggaacaagggtaaagattgtgttaacagatagaaactgtttgtttttctttctttctttctttcttttttttttttttttgaggcggagtctcgctttgttgcctaggctggagtgcagtggtgccatctcagctcactgcaacctccgcctcccgggttcaagcaattctcctgcctctgcttcccaggtagctgggattacaggcatgcaccaccacgcccgcataatttttacatttttcgtggaggtgggctttcaccatgttggtcaggctggtcttgaactcctgacctcaggtgatccacctgcctcggccacccaaagtgctgggattccaggcatgagccactgttcccggcccatgaaactttgtttttcaatcctgttttgaagatggaagagaagggttctcacagaaaaacatacagtagccaattcggatatttctgtgatggctcactacatacttatttgtagttttttttctcattcctttaattgtatttcattcaaattttgaagttcctcttttgttttataccactgaactctaaaagtttaatctttttttttttaatacaaagaatgattgattttaaatactttctacaatgctggccatatcaagcagctttctatagaaactagcatgcttgtttaagatgaagagaagagatggccctggatgtcttttcctcatgtttttgagaagtgacctcaggtttggcatttctttaggggcttagaggatcttgttggcaattggcattctgcactctgttctccgcacccagtacctccaggggatagagattgcatcagaaataatcaagttgattattttatgataatagctgatatgtagagaggtttttttaaaaacctaacggtaagtgctttgtatgaactggcttatttaattttcacaatgctgtgagataataatagctatcgtcagtcctgtgagatattattattaatcctgactttatgtctattgtctctccttgtttcagacactatacaaagtgctttataggtattatttttctaattcctccccaaagtcttctgaaatatcccactagaatataagctgtatgagtgttatgactttttcttcttctgggctaaattctgggagagcatttagtataatacctattgcaggataggtgcttagtaaatagttattgattgaacaaattccagttttttttgaacgaggaaactgttaagaaaagttaaataacttgcccaagttcaagtgatgaagctgggaattacacccaggcaagcgtgacttcagagcctgcaacctttatctttgtgttatgagagttattttttctttgttaacaaatttctgggataatgttgaattctgaggcagaatgatgtgttaaactaggtttctaaaattaaatatatacacaatagcaaagacttggaaccaacccaaatgtccaacaatgatagactggattaagaaaatgtggcacatatacacaatggaatactatgcagctataaaaaatgatgagttcatgtcctttgtagggacgtggatgaaattggaaatcatcattctcagtaaactatcacaaggacaaaaaaccaaacaccgcatattctcactcataggtgggaattgaacaataagaacacatggacacaggaaggggagcatcacactctgggaactgttgtggggtggagggacgggggagggatagcattaggagatatacctaatgctaaatgacgagttaatgggtgcagcacaccagcatggcacatgtatacatatgtaacaaacctgcacatggtgcacatgtatactaaaacttaaagtataataataataaaataaaataaaattaaatatataaagttattttggaaacttcaaatttttgaaatttgtaaattgtcacttaatgggaaaggttttaaggtttacaatggctaataaagaaatcatggataatggtaatgttgctggtttatgggaggtgagtatattaacattcatatgaatgtatgtgaatattaagattctctgatacattcaatgtttgtagtctttttaaagaaggaaaatagtgtggaaaaagtatctggaattgtatgttgtgtggaatctgaaatattttttccatatttacatattttggatggttccagttaaacagttttgtgttaaaggatgaacaaaatgccaaagtatttataaaaggagtgtgtcagtctacactgcctctcgatcattgtgaacatgtactttattcagaccaatattattggctattagtgtttaaacgcattgacatttttatatgggaaaaatgccattccattagtaatttgcagtctgtatttaacatctttccaaatagttgttaaatagatacattatccctctcccccatagactgtcaactatgtttttatatttattggaagctccattttttttttttttttttttctgaaggctttctcgttgcttataagactctcaggctgggtgcggtggtgactcacgcctgtaatcccagcactttgggaggccaaggagggcagatcacctgaggtcaggagtttgagaccagcctggccaacatggcaaaaccctgactctactaaaaatagaaaaaattcgccaggtctggtggctggcgcttgtaatcccagctacttgggaggctgaggcaggagaatcacttgaacttgggaggcagaggttgcagtgagccgagatcatgccattgcactccagcctgggcgacagagcgagactccatctcaaaaacaaaacaaaacaaaacaaagaatcttagggctggagttaccctgagtgacgataggggcgctgtttatagtcttgggagcataaactggggagtggcgattcttttggtaaattggcttagagacttcataaagaccaactaccacctccagcaaattaatcttaaaataggcctatatagctgcataacatcatcatgtatcttagtggacatgagtaaacatctaggatgcagaactttaaagacaaatgtgtgctgtatttggggtttgctttaaatagggacagtgaacttcataaataatcaagatttttagggagctaggtttagcaacacattgagtcacatctcttctgtcttctgtttatccctgctcagctgtgccatggagtagcacagctggctttaaaatatccaacatcaggtgtcactgtcttgcttttattagacccctaggctaaaatcaccttgatcacttgttcctgctgttctcgagggctgctacagtgagaatttctctctcttggtcttttcatcatctttttgaatgagcggctctcttaagccaataagatagaaatatataccctgttgaccttgtggcttttcttttctgttaaagaagcattcaggcagataccagatatatgaggcggtcctttcagctgctcatcttttccactcatcacttttgccctcctaccctcaggagccaggtcattctccgtaggtgagctgtgtaaaatctattttatagacgtatataaggagaaaataatttatttctgcagtcttcatattgtcatgccagtatgctagctgaaaacataatggcttttttttttttttttgaggagaagttttctggttttttagcaaaagagactgaccatgtgtaaacattctttaaactgtttcctcactgtggttttactgtgtggagggctaaattttaaaagtaaatataatgttataacaatttgcttattaccagcaagtttttaatattgaccaatgttttatgtattgggtggcttaatggttttaactggagaaaactgattaggaagacagttattcacttctgtttgctgaactggaaggaagtcataaaaaaagaaaacttcagaagctgacttttttcaaagaagatatgagaagtttagatataacttgtgaaatttaggtctctctcatgagattgccaaaggcacagttaaattctctgggaggcccaattgattattgtgtaaagctgtttaaattttcaaggatcttctaaaatgcatttctagtttttgatacaaaagttaattgatttcagatgtcagcttgtgtcttatggtgatgaaagtggttgaggaaatacaggtaaaaataaagcgtactatattaattggaaaacattgatggagttggagctgtcattgagtggattctctagggagtcttagtaggtcacgtttttccaggcattggggcattctgggatccaacagttaaatctgtgaagggacaaataragatgtcaccagaatcaggagattgagatttatgcccaaaagtccagatgctttcttgggagataccccaaagaaatgatatctactaacatttctgcctttagtttatcagaaagaagttgagagaagatcaggaataaggcatttcttataataagagtaattgtatttttttraaggtactcctttcttagtggcttctagaaatactgtcattgatttttcatatcaatagtttaattcactgagttaagaaaactgttattttttaaaaaacaaaacaaaacacaaagaaaaacccatggggttttggggcttagaaactttgtgttataagaagtataatagctatgttctgctaatttatttatataacaaaactttttaaattaaatatttggattgtagtagaggtacttgcctttaaaaagtacttcaggccgggtgtgktggctcattcctgtaatcccagcactttggtaggccgaggcgggtggatcacttgaggtcaggagttcgagaccagcctgcccaacatggtgaaaccctgtctctactaaaacggtacaaaaattggccaggtgtggtgctgggcatctggagtcccagctacttggggggctgaggtgggagaatcgcttgaacctgtgaggcagagtttgcagtgagctgatattgtgtcactaccctccagcctgggggacagagcaagacttcatctcaaaaaaataaaaaaaataaataaaaggtacttcagctgaggcagttcatgcagtagtgtatcattttggaatgtgggtaagcacccctgaatttacatggcctggaaattttttatatttgattttctcaaagtgcagtataacatactcatctccttgtgaacagaaatgtttgaggatgggttaaatgaactgtagaaagcatctcagaaaaaggtgttatgcaaggcataattattttccaagtgctatctgagcagctttcaccaatcaaagcttccttgaaatagagattacaatcaaagttcatctgtatactattgtgtttggagtacatgccaacattccaacttgaagttgctttgagggaaaagttcttcaaattcatcagtgttgtggggaaatgtgatttaaattctgattactggaagccttattacagaggaggtggcaagcaggtgagttgagctgttcaggatgtctgtttcttatttgttcttttaagatattgcaaagaaactgattgtggtgtctatctgttgctagttcttctccagcatcaattcccattttcttcttatagtctggaatttcctttgggaaacctcctatattctttgtctatgtagttcaagaggggctgctcacaccccaacccatgctgcaatcaaaaaggggttcatctgctgcccacagtgactaactgatgattaattaatcaaaattgttcaaatgaaattcagttcctggcatttttgttgaaattatttaaaagaagactttactttttcttctggagtttttttagccaataataagcaagatcaccggtgttagtggtagttcttttgctaccatcacgtttgagaggaaggcagagcttggagctggagatacagaatcctgaggacctagtctgaatacctgatcagttaggcaggccagtgaactcttctgctttgtgtaaaccagtttgagttggatttctgtcacttgtaactgaaatagacctgattgacacacccttgtaagtttagtgtcggaactgctttcaccccaagagctaacttttgttatatgtatgtcattgatttttgttgtggtggttgttgttagtatttttcttaaaaaataaaataggggtttttatcataataaaaatagaaattactaaatataaaatgctgtactaggaaaaaaaaaccctgatatttgtgctcaaaggtgacatcagatgcctgtgtctagtttgggagtcagggtgacagtacctcataaaataagttgaaggaacatttcttctttttgtattttgttaaataatttgtagttacctgttctttgaatgtcataaaattatctgtaaaactatctaatcataggttgattatctccttagtttttatttgggtatgttctactttgtttttctaacttcttgagttggatacttagtatattttctttatttactaaaaagcttgtaaaattattttaaaaaatccttgtctcacaattcttctcctatcaataatgatttgaaatttttccatgtatatgaaacacctccaaggacagataatgtccttgattagcagagtagctgggttattacagtctgtctcaaagagttgaagggaaaagcctacatatattctttacaaaaagagaggttagatgtgcttgggagcaatcatcctgccagtaaagctgcgtgagggttttaccttactgatgtggcctccctgcgttggcaggtattactgcttccagatttggtcacagcatgggacaaaggaatatacagacctccttcctgcctttgaataattagcatcagcagagtatcctgaatagtgattagatataaacaaagcaaacagatagagaacctggagagagttagcttttaggaatgctttagaaatgatcaccaactctgtcaaatgtggaggcatttgtggattttgatagtatttatttatttattttggcctagcagcatttactttttttggaagacatccaccctgtactgcaagtgatggccctactggctgtatatacagatgggcaactacgattccaaatatcacacagctatagtagggttcacccaaatggagccctttgcctccagggtctttttcttcctgtgaagagaatttgaatcagtgctctagtggtaataatacaaatattgctatcttagaagtacttaaacctctatattttcttattccaggtggttttcctgaaatcaaactctgatttccagggataaaaagacaacacgtgaaaaacccctggtattctcagatttgacatgactttcactgtatacatggctttaactctatttaatagaatgttcctgtgaagctgaaaagtaagtggatcctgtttttgacttagtggtagagcttgcagtttaaataattccactgggaatctattaggaagcaaatgagagcctcctccagagatctttgagagaggcttaaggaagcattcctctgttatttgttgtgctatgttcatctggttctaagtcaagataaatattgcttcatttgtatagttgttttcttttgcaatttgctcatgagtgaaatctctttaaaacgttaacatttgattaaatayacttgaatgcttacaaagagtttttcatataatttatcttgtttatctttatagcaacattaagggactggtagatatttatgttcctcttggtgagttcattgaagagcaatctgaggctttatataggttaggaaatacactttttatattttgggaatccagcctgtacagtgcttattatcaccatttctgcagttatgaggttactcttgaagacaagaaaatatttattaatgaattttcaaattgctccttatttgtatatttctctctgcttaatgctaccaacatttccactctttggcatcaagtgttgataattcttttactgtcttctgtgaatatctcaaaaccacatgcaaatgcattgcaaaatgcacagtcagattttacatcttgcaaaggatgcaggattccatraagtcagggaaagtggctcagtaagatctgcattaacatataaacccctaggcaaattggtatggcaggattggatcaggcaattatcaccatagataatgacaagagaagcccttcaagagtctgattgaaatatcaaaggattacgtgagactcttgggaaatcaaaacccttgactatttttggcagaaacagtgtttttgttcagattttactgtaagttgtatgaagtaagatttgtgtggtcctgttatcacttaagaaatataaattttaccttattttatatttataaaagaatatgaataacctgaatatctgtatacttctcccagatatcatatttctgtctctactatgaaaatctggaattctgtgtttattctccagttttttaaaaagtagttttaccctgtatgtgtatattcctttatttagatatgcatggttttgagctttataaaaatgttattgatctctatgaagcctcctgtcatttgctttttaaaactcaatataatgttttaaaaagttatctttgttgtagtatgtagctctgttttattcatttgtactgctgtataacattctacaatatgactcacaatatcaaaaaatggtgtggattcatggagtttcttatgtattgctggtatgaggataagttggtataaaactttgaagaacaacttggcattcacttctaaagccatttctgcagttccattcctaggcatagatcctgtatctagagttatcaatctgaattataaattttgtaaaattattcacaaaagcacttattttgtaagtgtagtgtagaatgttagatgtatgacctataattaattccattaatcctcaaataaaactgtggaatcattttcctttcaaacagcagtttaaattcaaactgtattaccattagcataagaatagcttttaacaataattaaaatcctaatggtatcatgaaataattttagtttagttatccttttgatgtaaatatttatccagtgggagaacctgatttgttaaacattttatatgaatttgatttgagaaatgcacagcaccatataaatatatcactgtaggaggcagtgtagccataaggaaaacataccggattgagtgtcaagaactggtgtctgtatggtgctgtactgcacaagcttcatatgaccttaatttccgagcatcagtttcatcattggttaaaaaaaaagagatgacagtatcagacttgcctcacggctgtctgccaattaagtgaattagaaaattattttcaattatatagtgctgggcaaggtgaatgattgctattactgttgtcatcactgttgtttgaagcactgtgctttgggaagcaaatctggttcacatcttttgaacatttaaatgaagagaatgtgtctcagtgctctagtgtgtattaaaacagccttttaacaagaatgttttgaaccctgcccaatacctgcacatgcttttgttaatacttcattacataaaatgaccaagaagctgtcataagaatttaaaggaacatttaccctcatctttaaaatgtatcttaaaagagagataagattctaattacaaattttgaacagtttattttctctctatgaaaaatttccaagaatgatacaaaagcacttttatgtgaagaggatacactggaacattgaggtcttgatctcattttagtaactctctgatgtgattaattcataagcactgagttgtagctcattccttctggcaaaattccagcacttgattgttaccttataaacttttaataagagtaattttaaaaactgcacttgactcttgctttatgaaaagctggaaatgtaaaaagttaaaaatgcttgacaatttttctgagctctagtcagaaacagtggctatgcccttttatagatgacagcccaaaggcgagtttgtaaaacgataaataaattgtaaagatctatcgagtggcaacttggatggtttaatgcctatgggttagaaacccaggagttaatgtttaaagtgatttggataaatgtgaacatgtttaaatctttagtattattcctttaagccaaatgtgaacgatagttattttgacaaagtttgggttacctcgatagcctgatttttacagaagtaccgtgtatctcaaattgttaactgatgaatgggtggtgctgctggattatttcctgtgttttgtgtttttcttagttttaatttctttgttattcaagttatactatcacctcgtccaaagttgggtctcaggattagattaataaactaaccaagtaaatttgggaagtatgactaacttacataaagaaaataattggggtttttttttgtattattattttaaaatatgtaatcagcacttttgagaagctctcattttgttgaatctctaggcagacctttgtggttaagcatcatcctggaaattttttctgacagtcatttgaccaggtctttctgtttatactcagtgtcaaaacaacaacaacaaaaatgcgtatgtatcctcaggtttttattcaatgaattatattttcttagttttaggagaatattaaattgtctactaaaattatgcttatttggcttgcactgtgcccagggtttttttttttttttttttttttctcgaaagctgtcagkggcagatttgtagttagaagstaagcatttytccagagaaagagacattttagcttgagaatgcagtaaagcaggggtccctaacccccaggtcatggaccagtatgggtccatggcctgttagaaactgggccacacagcaggaggtgaatggcaggtgagccagcgaaacttcatctgtatttacagccactcaccattgctggtattgccccctgagctccacttcctgtgagatcagtggtggcattagattctcatagggygcaaaccctgctgtgaactgcgcatgtgagggatctaggtttcatacttgttatgaaaatctaatgcctgatcatctgtcattgtctcccctcacccccagatggaaccatctagttgcaggaaaacaagctcaggactcaggactcccactgattatacattatggtgaattgtataattattttattatatattataatgtaataataataaagtacacaatatatgtaatgcacttgaatcatcctgaaaccatcccgtgctcccaagcttgtggaaaaattgtctcccatgaaactggtcccttgtaccaaaaaggttggggactgctgcagtagagaaaacagtaaggagtgtggggtttagtctcagatttcagtttttattcttgctactcaggagcagtgtgatcttgatcaagtttgttagcttctgagtctgcattttctcactctgaaacaacaaagtacctttttcattggactaaatgttaaaggagatatggatataacatgcgttattaccattcagcctggtatgttatgatgtttactaatggtttgttcttaagagacttgtggctggtcagataagagaaactgcagagcaatgagggtggggatgagtacagtgtcagttgggatggagatggctcatcagggagactcatacaattcacacccgtggccatccagtcctcacagattcaagcgagtattcgcttaaattcctgtcccacatgtggtgggattctctatggccttaccatctataggggtgcacacaaaactcacatttctcttagccactgcctactacaagtttttgctgaggtcttgatcactcttacactttgtatctcctccttatggtgtctcttttccaccccggaaccctgcttggcagaagtgacctctttatttccaggagtcccattaatgctagtgctgtgtacccagatttcatgaaggttttctgtcagtgaagggtttgcagtgcaacccagcaacaactttaaacagacccttagaaatctcatcttcttacagccgcttagctattgctactctggaaaatattcattgactgtttctctttctctctttctttctttctttctctctctctctttctttctttctttttctttttctttctctttcctttcttccttccttctttctttcctttcctttccctttcctttttttttttttttttggccaagtcacgctctgttgcccaggctggggtgcagtggtgcgatctcagctcactgcaacctccgcctcctgggttcaagtgattctcctgcctcagcctcctgagtaactggaattacaggcacatgccaccaagcaaggctaatttttgtatttttttagtagagatggggtttcaccatgttagccaggctggtctcaaactcctgaactcgtgatccacccacctcggcctcccaaagtgctgggattacaggtgtgagccaccacgcgtggccgactgtttccttctactctatctggaaccagttttctggcacattgctgggcatcatgtctcctccttaactcactcatcccctacccctccaatgctcgtgcagttctactgtagagccatttatgtgtcttttcccaatgcatcctgtcgtttaccgtrtacataatgccagccttgccaccaaacaattctcttcctgagaggaatgccgtggccgcttaacctctttttccacctccctgttattcaagttatttcctttgatgatattttagagatagaatataagagataaagaagagagagtcagctgggtgcagtggctattgtcaatcctgtcataaaagagaatgcaaacggtaccagtaatttataaaaaaatgagtagagaaatatgtaaacataaaaggaaacataatatgccaaataaaaacacagggagaatggtgatcaaaggaaataaaattgagtaaatactgtgaattttaaaagtggatatcaatgtactttttcttataaaaacaaattaatgaataggaaaatacatgtttatgttttttaaaaatttaaggtagatattagtggaacaaaaaaaagatgsattcctctcaaataacttaaaaaaggaaaaatccatcaaaagcataaaactatgtgagagaatatatatgggtagtgtattagtccattttcatactgctatgaagaaacacccgagactgggtaatttataaataattagttaattaattttttaaagatgtgacaatattttgtgccaagtagtataatagttagtttttttaaatgtgactatattttatgccaagtaatattgagacacaaatttaaaataaaatgctttcatccctaaacactgtaaagcagacaaagttaaacagatattcaagcatagaagctagaaaaaaaaacaagaaaaaaataattaagatataaaatctgagccacaaactgaatagaagacagaaagacagaaagtaaatggtagaactaacagattagtacatccaagaaaaagtgttacaaaaaatagaaccctctagatcagttctcaaaatttcctgtactgaaaggtcacttaggggaattattaaaatgtgctgacccaagtggggagagtgctatccaggactgtccacttaaaaccaaccaccccagtgattgtgatgcctacagcctgacaacaataaccctttgaaaacttgagaaaatgtttcatacccagctctggtcttttaaagagaagtaaataaactgaagaacttgataataaaagaagacacagacaaaaatatgtcaaaggcttttcaagttataagaaaacattgtccactgttttatcctaataaattctaaccactcaaagatatgaatgactctccaaagaaaaagaaaaacgtgacttaagaaggaaaataaagctaaacagatcaatagccacaaaaacaatagaaagttgtcaatgaagtaccttttaaagagaaccaagctaatatggttacatagataaattcgcagaaacccaagggacaaatactcytgtcatggaaaatgtttcagagaacgtaatagcttctcaaatcattttatgatgctagcataatcctgaaaaatacagcttaaaaaaagaaaaccacagcccaatctcactcatgaatacaggtacaaaaataaactacttgcaagaagactctaggtgaatattaatatatcatactgtatttatgttggttttattctctggtgcaatattcatttagttataggaaaattattagcataattctttacatcaatatgggaaagcagaaaacatgggtaactayacagatatacatatacacacacatacacacttttttttgagatggagtctcattgtgtcactcaggctggagtgcagtggcacaatctcgggtcactgcaacctccgcctcccgggttcaagctattcttctgcctcaacctctagagtagctgagattacaggcatgcaccaccacacccagataatttttgtatttttggtagagacagggtctcgctatgttggccaggcttgtcttgaactcctgacctcaggtaatccacctgctttggcctcccaaagtgctgggattacaggtgtgagccaccatgcctggcctatacacttttttttaatggaggctttctgttaaagtcagcagagagtgaaaacatgactttgcctctgctctctcacaaaatccaacagatatatcaatggagggatcttttacaggagcataaatgcttaaagatactttattaaaagaccacattttgcccttaagctctgtcaatcgagaaaaatgatgagacaagtctcaatcattttaggaggtttatttgccaaagttaaggacaccacgccggggagacaggtctacgcctttctccgaagatgattttgagggctccaattttaaaggggaaagggtgagatatttaaaagtacacaattttcatgtaagaggggttagggaaaaatactcattcatgcctttggctcagtgaatctgcattttttttttttttaacataagatgacatagacaaatagggcagaggaaaaatgcagggaatctgcattttacrtaagacaacacagacaaaacagggcaggggaacaatcagatactcatttgtgtctggtgggcgggggggtgactgcacctgtaaaggtaagctatcaatttacattgccatggtgaaattttaacagaaacaccttaaagatcttgcagctcactaggcatttccttgtgggcaaaatatgggggaggcatgtagcttttaatcttgcagccacattatttaggaaccaaaaatggggaggcaggtttgcgcgacccagttctcgagcttgacatttccctttggcttaatgagtttgggggtcccaagatttaatttcctttcatatttcaaagcacctttctatatgatattactcaatcatccattcaataaatatgtatcaagtgtttagtctatgtcagatagtatgttgggtgttctcaatttctctccttcccccaaacagactaatgactccctaaaaacaggtgccttgctggccgggcgcggcagctcgtgcctgtaatcccagtactttgggagtccgaggcgggcagatcacctgaggttgggagtttgagaccagcctgatcaacatcaagaaaccccgtctctactacaaatacaaaattagctgggtgtggtggcacatgtctgtaatcccagctactcaggaggctaaggcaggagaatcacttgaacccagaaggcagaggttgaggtgaaccaagattgcaccattgcactctagctttggcaacaagagtgaaactccatctcgaaaaaacaaaacaaaacaaaacaaaacaaacaaacaaacaaaaaaaaacaaagaaaaaacaggtaccttgctatcatattcatcattctctcacccagtcatatcactggggctcaaaaagtatttgtcagaaaaagaaaagaagaaaaggaatgaagaatctatgtattaaaagataatactttttaaaaggggctggggatagatgatcaaacaagagttttcattgraaacactgaaaaatgttcatgaactcagtgggtttcaacatcattatttctgaccatacccggcttctttggggtgaggcccaaaacgtgtattgccattttaagccaaggtaaaacaggttccagtcctggcccgggctctgctggtctaggatcccatgacagtttcacagttaaaagactgctttggatcctaaaggcttggaagtttctctgtgtctgggctttcagtgctaatgcttaaaaagctccaaatttctacctatgttcaatatcacctcagggcagagtatgcttcaaattttacttggccctctccttctcgctttgggctatgcactttccactgtaggcttcctggaacatagcaaaggcatactcttatctgtgactacattcttccattcctagggagaattccaatgagctaagttactgtgtctctcccaggttcctgtttttcatcaactaaatgccccaaagaaagaaaatggtattgactaagkgtctcccctgaaatgatccttcccaaagcctggaagagttgacaaacatctgcctgatgattgatcactaggcacactgttttgtcttagcttcttcacttcacttcctctttcttagaggaatcacaattaataacaaatgggttttatctgcccttccatagttgcattttttagcctacatcttatgaagatgattattctagatcaagtccgacgaaaatgccaaatatggcagagattccaaatattcagattactgtccctgtataccatgtcagtctccttgaataaaaatcccacttacattgtaggcaatactattcttctagtctctcaatctagaaattctggtatcattgttgattcttctatttatttatttatttatttattttgagacggagtctcgctctgtcacccagacaacagactatagtgcggtggcatgatctcggctcactgcaacctctgcctcccgggttcaagcaattcttctgcctcagcctcccaagtagctgggactacaagtgcacgccaccacacccagataatttttttgtgtgtatttttagtagagatggggtttcaccatattggattgacaatagcttttttttcatcttggtattggctctgtatgtgaaggaatactgtctttacatacaaacatgtgagggctccttcatacctgtcactgttctctattttaaatcatgagtgaacaacttgtgtggttatgtaattcttgaattacagtattgctgccttttggaagatttgaagccagtctgattttactccccatactttgtagctttttaatttctcttttttctgcttttgagattatttcttaagttcttacactttaaagttgaactagggtatgaatgggcactgtggcttatgcctgtaatcccagcactttgagaggccaaggctaaggattgcttgagtccaggcatttgagaccagcgtgggcaacatagtgagatcctgtgtttacaaaaataaaaaataaaattagctgggcgttgtggcacacacctgtgatcccagctacttgggaggctgaggtgggaggatcacttgacccaggaagtcgaggctgcagtgagctgtgatcacaccactgcactccagcttgggcatggagtgagactctgtctcaaacaaaaaaaaaagttgacctaggatatggctggatgttggtcagtttttattaattttgtcctttactgaatattggtttctcatctttctactccatacgtagcttttcctccttcttcatctgtttttgtcttttctttggtacacaggaagtttgttttctacgattggttctattgtttatttcttcttacgaaaattgaaattctgctattctgaaattttcaacttcagtaaaccatttccttaaagaaacccagctccccttaaagtgatccctcctcaggtgatcctcccctgctcctttacaaaatcctattctattctgtggtgtctcttattccatagagaaacaaaggtgaatttaagaatgtgcttcctgaaacaattcgtttcaaaagtttgtttttctccatattactttgtgttttaaacttacttactcatctttacctatcaagaggtctgctcagagcagtttatctccctgtcctacaggatagccaggggcttctcctctcagaacttgtacaggagcgctaattgatagaaaccaacactacagttgaaagatgctagaagttagaagggaatcatagcagaagatggagctgcccagaatccagcacaagagtttgtgtctgccgtcactccctctgcagttgcatctgtagtgccagacctaatgtggagtgccygtgtttttgctttgatcrtaacacctggtttgtgcaatagctgtgtctaatgcacgttcttatacttcagcatttgacagaaagaaaaggccctagaacacttctgattttctgcttgtaaaagaggctgtgtgtgtgttgggccttctagcacagctgctctgagttatgctaaatagtgtgcgtcccatcttccatggcctgtccgcacttccagctctcagccctgcaaattaagatgcattagtggaattttgccaaacaccttttatttacatcccacaatgctggggagttttctggcagtgagtctggttttttcgactcttcatgtctgttaaaattaggttccatattcaatatatacaggagaaattcctcaaggtttctggcatcttggtggtgtgcttccttagtttatagtgttgatgcaggattttctacagttgtatacttattggtcattacagttggggttccgagagcctatagtattttttttcagttaaggcagaaccaagtgagagggagatacaagaatgatggggatcacacactgcttaattatgataaagctgttttgactgtggcaagattgtgacaattgagcatgctaatgctttttccttaatgaggcttccacacccagtcataagcagtgtggctgcagtcctctcccaaagagagagcctgtctagctgctatgtggccaagacagcataccaaaacacacactgtctgcaggcaagcaaatcccaaagagcttcaggggctaagccatatgcctagctcaagccccagctcacaaatctagtatgtctctccttttccctcaggcgcatcaattcagtggccacgagaatctagcaatattactttaagagcaacttaagatgtaagtggtaggccaggcatggtggctcactcctgtaatcccagcactttgggaggccgaggcgggtgaaacaccttaggtcaggagtttgagaccagcctggccaacatagtgaaacccctgtctctactaaaaaaatacaaaaattagccaggcgtggtggcaggtgcctgtaatcccagagactcaggaggctgaggcaggagaatcgtttgagcctgggaggcagaggttgcagtgagctgagattgtgccactgtactccagcttgggtgacagagtgagactgtctcaaaccaaaaaaaagaaaaagaaaaaagatgtaagggtaactgctgaacaattatgacaacaacctaccaggctgtgttcaagccattatcttgtctaatgtttctggagcataaaagtcagaagtgatgttaaagacacttactatttttattttgaaatggagtcttgctctgtcgcccaggctggagtgcagtggcgccatctcggctcactgtagcctccacctcccgggttcatgtgattctcctacctcagcctcctgtgtagctgggattacagttgtgtaccaccatgcccagctaatttttgtatttttagtagggtcagagtttcgccatgtttgccaggctggtcttgaactcctgacctcagtgatccacctgcctcggcctcccaaagtgctgggattacaggcatgagccaccatacccggccaagacacttattttttatggatatctgagttttgttttcttttaatatagttctctcatccctgaaaaaccaagatgcctatattctaagttactttttattgaaaatgatatattttaccttaagtataaaattctactacgagagtttaatttgtgtgtgggtgcgaattcccatagaatttaagtgtccttgagtgatttattatgttaccctttataaaatgtataactgcaagtcaaactgtgacttttacttgagtttgcctaggaaacgataagccttctaatctgtgaatttagtatcccatttaatataatatgactgtggtatatggttagacaattaaatttcatagacatatgcatttgatgattcaatttgcttctggtcattctgagtctattgtttataagagtatatcaaagatttagggtttcagattttcaaatatgttttactctattgcagaaaattagaagaactgagcactctattttatagttcagtaggatttttccatctatttaaaggttcagtaactttcttagatagaatttagtatgcctaagaagatgcgttgattctcagagcaagttaaatagactcaaccactgaccttaccctgagtcatccctcaggtaattttatctttcatttgtgtgagaaaaaccagggggaagattgatttgtcccgagcacttaatctaaatgagcctataactcttttatcacatagctctactttattttattgtttgaatacagggtctccctgtgttgcccaggccagacaggaacttctgggctcaagtagtcctccttcttcagcctctggagttgctcggattacacggtgtacttaaagtataacctttatgactatctaaaattatcttattagttgtttccttgcttattatctatttgccctatcaaaactaagttctcacagagcaagtaccaaatgtctcgatcaccaaaatattcctagctaggaacacagtaaagagttgttgcggggtgcagtggctcacgcctctaattccagcactttgggaggctgaggtgggcggatcacgaggtcaggaatttgagaccagtctcaccaacatgatgaaaccctgtctctactaaaaatacaaaaattagccaggcatggtggcactcatctgtaatgccagctactcaggaggctgaggcaggagaattgtttgaaccttggaggcagagattgcagtgagccgagatcacgccactgcacttcagcctgggcgacagagcaagactctgtctcaaaaaaaaaaaaaaaaaaagttgtcgaatgcaagcgagtttgcctagagcccttatccatttgggcagaggtcagaaatcagtaccttgcagtatcttaccagaaagcatttgtttgataccttcagtatcttttttggtctttcaattaaataagtgaaacatttataaattgtgttttaaataatcacctgagattctgacttcccttgaaaacttaaggccttattaccatgtggcaccatcagcaggaagtagataatgctgtcacttatcaattagatgggccccagttttttgtgtgtgtttttttaactgcttagtcactgaaagcttttgatttggtacccttgctttcaaaccagtccttaattttattataaccaagaataaataatggtataactagatgcaatgcttttaaatttgataactgtaatgtaaattatattgatatatgcatcaaagataagtaattcagtaggacagaaaggttatgcataaataactaatgaacaatagaaagtgataagtgctattttagtagaattccatttaacttatatgaatttaaatatctaggatgtgtaccaaaggggtggggaggggaagtaggtaggaaaggaagtaggtagataggaaggaaagtaggtaatcaagaaaggaaaacagtagtgagggagacaggtgccattatatgggttctgtctataccatgccatatttgcactagaatatgggcaaatcaatcttctattctcgcagattgtctcattaaccttgttcgtctcatagtaacaacatctccctctgctgctgtcaattggatatttagatgtgtgtgtgtatgtttttttcttgcaccatggcgcttaactgtaaatttcctgctgcatttgttgtttaactgaatgaacaggaatttgtttccagcttgggagaaaaatgggctagacttaagagttactgtttatcttgataaggggttccagacagttatcttggctagaccaaaagtttgccttgcatgctgagccaacttcatgcattttatctatgtgtacatttaaattgctgtggcataccagaagaaaaggttttaacttttaagctgcaggatctgggactgctttatagaggagacagcattttcagtggagtcttgaaagactgtggaagtactgttttatctaatgttgtagccagtagccacatgtgacaattaaaattaattaaaatttttttttataattctatcttcacttacactaactacatttcaagaacccagtcaactcttgtgagtagtggctaccagtttggaaactgtaaaacatttccatcattgcagaaagttctcctgaaagcgttagtagacatagtagtctgcatcacagcagcaggtagaaaaaatgttggtttctgtaaaggggagtagtgagtagttaacttcttagagttaattatccctgtctctcttcctggtccatgttccaccccctgaaataaatttaattcttttttttcccctggaaccaaaagctaagccaaataatgctactttcccaakaaaattctgtaattttacacctatttaaattctaygttgggtgctttttttcgctaatgatctgtggaaattattttggtgttgacacaaatgggaaagtagtgtyggagtggggggagacagctctctttcctaggtataaatgaaaaaaggataattattaattactttagaaaattgtctttctacttcyttattttcaaaggtttgaaaggtattttttgtttgtgtttaaatatagtttgstattgtcatgaatatgtagtttacagtttttcttcataaaatttatatgccatgttggttttttgatggaaaatggatcccaagtgaaaatgttatatgttgctttgctgcttctaaactttctcccaccactcttcttctcactgttattcctgrgttagttatattggttgtcaccagtgactacagcttctatgtctttttggcagtttgagagtcttgtttcaaattgtatatagtcaawagcttgacagtgatttattactactcaacctaatgttcttttgattgtattgcagtttgtgataaaatgtgtttgtgataaataattaatattactcagactgttggagttgcctaggtagtggtttgtgtcctgaggactaaagaaaatttgtctagaatgtaattcatccacagcaaaatgagaagtgatatttcttttttttttttttttgagatgtagtctcgctctgtcacccaggctggagtgcaatggtgcgatctcggctcactgcagcctctgcctcccgggttcaagtgattctcctgcctcagcctcctgagtagctgggattacaggcgtgtgccaccaggcccagctagttgttgtatttttagtagagacggggtttcaccatgttggtcaggctgctctcgaactcctgaccttgtgatccacctgccttggcctcccaaagtgctgggattacaggcatgagccaccacacctagccactgatacttctttagccaggatattaatgcttgagccctaaagtgactccaggagcccttccccaaccattttcttaaccttttatttttttcttttttcttttaattctggcagtccagagatgagaattttagggaagatttttctgtgttggaatgaaaataataatccctcattgtggtataagctatgtatatgtatttttaaaatgtaataatttgatgtagtttagaattgatattgccctgccaatggttaggaagaatactcatcccaagatattttaactttttttcctctattatttaagaaatgaagaacaatgaagagaaataaagaaaagctaatttattcagcagtttacaggttgatgctgttatatatgtgtgtgtatacatatgtatacatatacgcacatatatacacacatgtgtatatatgtacacgtgtacacaaatgtatatgtgtatatatgtgtatgtgtgtgtatatgtgtgtatgtatatatatggtgccaaaataacagtgacatcaatgtgatagaagtttatttcttgcttataaaatttttgtgtaatgtccaggtgtggtggctcacgcctataatcccagcactttgggaggctgaggagggtggattacctgaggtcaggagtttgaggacagcctggccaacatggtgaaaccctgtatctaccaaaaatacaaaaactagctgagcatggtggcatgcacctgtaatcccagctactcgggaggctgagacaggagagttgcttgaactggggaggtggaggttgcagtgagctgagattgagccactgcactccagcctgggtgaaagggtaagactgtctcaaaaaaaaagaacaatttttttttttttttttgtctggggatgataaagttcctttgagccatcctcaagagcaggctttcatctcgtatcttagatgcctgccatgccttccagcatgtctccagtctgggctataccgaggtgatgggaggggtggcacacacttttctctaagggcaagacctgaaagttgtgtttattacttctgctctctctcgtttgctgcctgtcatttttctgcagtttgctcacacggccacaaccagctgacagggagggtgagaaacagtctttaggtattcacgtcctcagccccagctgaatgttgtattctaaaggaataagaggaaaaatctatcagggacaagttgcttctgccatagatcaactaattgtgagtcttgccattggtaagacaccaaaatgtcattagtaaaccagggtttattttactattagtaacacaatttaaccacaatgaaaaaaattaaagcaggggctccttactttttaggtcctttgtgaaataaagatagaaacaagattcccggccaagcacaatgactcacacctgtaatccctgcacttggagaccgaggcagaaggattgcttgagcctaggagtttgagaccggcctggacaacacagcaagacctggtctttataaaaaattaaaaaaaatacccaggcatggtggtgtgtgcctctggcctcagctattcgggaggctaaggtgggaggattgtctgagcctgggagattgaggctgcattgaactatgattgcaccactgtacaccagcctgggcaacagagtgagaccctgtctccaggggggcgggcggggagagaaaaagagaaacaagatttccatactcaggaatcaggagtgacgtgtatagagaggaaactatgtgagacatgcaaatggaagttaggagagggcatgtaaagtaattagagctgattttaggcctcatgaaatacatagagttctaagtaatgaataatggtcactgaaatttttcacagtctcaaaaagaaaaatatttttactggagaataaaaatgttctgcttgaggccagccttggtctctagtagcaataaaagcctgtgatatataatgatgctyatatttcttccattttcaatagcactgtggtagggaaagtaaatgtaccaacccatatctagtggaaggagacaaaattctgctcagtttccttttatgcttcgtttgattttttctctgacacatttataattttttagtttctttagtctctagttgagggcttggcagattttcattttttgagaggatcgtgttctttccttttgagaggaaacataatttcctctcaaagttgtacatgcatgggttgcctgtgtgtgcacccgtaaaacccaatttctggttttaccaagaaaatcagctatgtatatgtatacagtgtcccattgaattgaaccgttattgagtttccagtgttacctacataaatattaatactagctaacatatcttaggactttcttggcttattcacgttagcattttttgaaactgcttgctttatgtttaggtcacttttttcaacatacatatgctaaatgtaatgtagcatgaactaaagagaggaaaaggccaacctaggccttcctgatggttcctaggtgttaccaaatggtgtggtgctataagtagtccccagggaatggcagacaaacatcctgtgtccactctgggtatatgctggacttgagattacctgtgcattttatttcctgcttggtatttagtttggacaccaaaatctgctgggtaaatgagtatcatactaaacaagctttaaaaggtatacttggtcaggcatggtggctcttgaatgtaatctcagcactttgggaggccaaggtgggagaatcactttaacccaggtgtccaggtgtttgagaccatcctgggcaacagaaagatgttgtctctaatgaaaaaaaaaaaaaaaaaaaagaatctgggtgtgatggcacatgcctctagtcccagctacttaggaggctgaggtgggagaattgcttgagccctgtagtgagctgtgatcacaccagtgcactccattctgggcaacagagtgacagcctgtctcaaaacaaaaacattactttagctagtggttgtggctcacacctgtagtcccagctacatgggagaataaactgggaggattgcttaagcccaggagtttgagtctgctgcaagctatgatcatgccactctactccaacctgggtgacacagaccccatctctaaaacataaacaaataaataaatgaaggtgtaccttaaactgccctgaaaaagaagccagccaacacactttgatctacatggtgccctgtttgtctgagttgcacagctctaggggataccatattcatagattttatttacagtgaaatctgtgaaacccccatggagttgaacatgaagtctctggtcacacccttgaatttgctatgttagttgtagtatgttatagctaggatgactttatcatttattgtccaagccagaacactttttagagtgaaaggggrcagattttataaccatagtagaatagygggcatgaacttggactcttttgggaatatagacatttatagttcttstacttattgcaatcaatatagaactggttggttattaagataggttaaatatgcttttctctttaaaacatttctattggtatagcaagggagtagaacaaatagaatcaaaatgaaatatgctaataatgattctctctttccatattgtttaatttctgaaagaaatctttagaggatacatttctttttcagggtattttttggccacctttacagaggattcaaaatgttccactcttttatgtgttcaaatctaagtttctctagctgctaaactgttaaacttatattgaattctagtgtggttttcccaataaaatgttctggagagtattaaatgtcttttaaaaattctttaaatttgaggttgccttgctcacaaactgccagtagcaaacgtttatataccatctcattccaaatgcctattcttggctttgcatctctctttatactagctccatttcccattcctcagctgaaatttttgctcttgcacattcatctcttcagtggctcctaaattgttgatgttcatgctttgtttccattggttttcaccacgatttgccattttctctctttctgcctgcccagatgcttccctttcttccaaggcccctgtcctctgcctgctctctttgtgggggctgtacctcataatctagtgactcaattttattttcagtaatttgggtatattatgaaacattttttcacccagatacaaggattaaatttggtcatatataaagattactcttcgcattgtaaaatactatgtaaatattcttcagtattactctagtcttttatttttgctcagattttattagggtctgctaattattttatgtacaatagtctctcacctctccaacaatatcatatatagcttaagggcagagagcatatctaaagtttcattattccccaatcatgactagagatgtgatgaacacagagaagcaaataatttattatttttttaaatattgaacattttacatctgtcccccatcttccctgttcttcaatttcatccttctgacaaagtttgaaataagatttgctaagtattaaactggaaggttctttttattatggttgtcagtcaattaagaattctcatggctgggcccagtggctcatgcctgtaatcccagcactttgggaggccaaggcgagcagatcacaaggtcagtagatcaggaccatcctggctaacacagtgaaaccccagctctactaaaaatgcaaaaaatcggccgggcgcagtggctaacgcctgtaatcccagcactttgggaggccgaggcgggcggatcaccaggtcaggagatcgagaccatcccggctaaaacggtgaaaccccgtctctactaaaaatacaaaaaattagccgggcgtagtggcgggcgcctgtagtcccagctacttgggaggctgaggcaggagaatggcgtgaacccgggaggcggagcttgcagtgagccgagatcccgccactgcactccagcctaggcgacagagcgagactccgtctcaaaaaaaaaaaaaaaaaaaaaaaaaaaaaatgcaaaaaatcagttggatgtggtggcatgcacctgtagtcccagctacttgggaggctgaggcaggaaaattgcttgaacccaggaggtggaggttgcagtgagccaggattgcaccactgcactccaacctgggcgacagagcgagactccatatcaaaaaaaaaaaaaaaaaaaatctcacacagcctgaaatttaaaggctgagtagctctctgggcaaacaatagtggcagaggagggcattccagacagagcataatatatgcaaaggcaaggaatcccaacatcacggcagggtagaaagtgtaaggaagtctgaaatggttgagcgtgtgctaggtgatgatatctgatggtgggggcagaagtgggaaaagttggtgagggcagaggctgatgggcttgccgatggagagaactgaaggatttaggcaggggatgtcaggatatattaaataaatcattctgatgtcactcagatagcaaataagaatgtttcatgcgataagcctttcaggtataactcacatttattataactagaaacttgatatttggggcacagctgtacattgtaaaacctaccaagataaacttatgattaatatctctgttattctatgatcaacaagtatagattaaactgtaaccaagaatagtgaagatgtgataatagatggcatcttttcacaatttaacttagtgtagctgttaaacaaaataactatagttctaggctgggtgtggtggcacatgcctgtgatcccagcactttgggaggccgagacaggtggatcacctgaggtcaggagttcaagaccagtctaaccaatatggtgaaaccctgtctctactaaaaactacaaaaattagccgggtgtggtggcatgctcctgtagtcccagctactcgggaggctgagacaggagaattgcttgaaccaagaggcggaggatgcagtgagtcaagatcatgccactgcactccagcctgggcaacagagcgagactccgtctcaaaaaaaaaatagccatagttctcatgatgttacatgccagagttacggcattaagtgagactcatccattcgactgctacttcaagagtaggggctgtcccttaaaagatgggtattttttaggtattttttgtaccatttacttgtaaatatttaattacaggaaagattatagttttactaattatctgttctcagtcttttctatttgccttttagcacgtccacgccagttgtataattcagttgttaatgcattgaacaaagcacagtataagatttttgctaatatttaatgcaaacttgcatgcctgctgtggataatcttacagtgaatgaaaatacctggctcattttccttatgaaatgaggttaactgaccattctgatatctaagaaaaatagctttctccagcttcaaatagaaatagcatactttatttttttcccttttgcaagaaacagagaatagataactttctgataacttccctaaaatatcagacccattgcttcattttcacaacagtaaacagtttttttttttgttgagtgtttatgttatgcagacctgattaaacacatgatataaaatgtatcataccgataccttgtgatgtgaatatattaaaagcgtaagtaatatcatacaagagaagttcacaaagttagtttgcatgcttctttgcttcttatgtcaaatgaaaagaaagattaggaaatgtgctttaaaaagtctcttcataagcaacaacaaaaaaatgtttgcgtcatgagaaatttgaactaacacttcgtttggtggtaaaaatgtgtttgtattctcagaggcaaatcttaaagaaggcacgtgacacaaaatgtcaattgtgtatttaaataaaatttctcaacatgtaagaagttttgtttttttttttaatttggcttaatgagctttctggttgcaaatattttttgttttctagttgcagtgtggtgtggaagaggttttttaatagggttatgtctcatgtttttgttacaaagacaactttttattttagaaagcagggctggaataatgaatgttagcttttattttgagttttctaaactacagtttctttttgagttatcttggaaaaatgttgcttttgcagttttagatatttttttaccttaaatgcattgctggtataataaaatctcttcccattcagagtagctgaaacttttcccaagatggatttgagcaaaagcaggattaaaaacaagacaacaaacaaaataggacacgagagtatcgttgatgagtagatcaaaattaatagggttcaaaatgctgaaaatatatctctcaaacttttcaaaatcaaatttctgcaattatcttgcagtaatttgaagaagaaagaatttttattgctaggagaatggaaaaaccaacagtcctgtagtacattttaagaaaagggttctttgtcacgtttgaatagagtatgtgtgtggagtttgctctttttttttttttttttttttagcagaaaaaaaatctacaagttggcagttggttgtacagatttcctctttgtggtggaaatactgggatgttgtgggagaaaaccgctgtccatcttaacacagatgctaattgtattctgtaattcttcttggttgccattgcgatgttcttagctgccttttatttgttgtttctccaggacagaagtgattactaattacgtatcatgctacacagaagaagtaggccatttggttttcttttctttttctttctttcctctgttgttattattattgttttttttttttttttggagaggaaagtgaaaggcggcttagaggttttaatgctgctgctcatctctacatgcctaggctgcttctctaatttgcatgggtaccttgggcattgtcctgaggggctggggtagtttgacctcctctttagtttagtgacccttgtcatcttgctgttcattcctggggcctgtttaatgctaattaggccttcaaccagttgctgtttacaactgtgtgctttagaaagcagggccttccccaaagaccacattggtggtcctaagctaaactggtagaattgaagacctcccccatccgcagagaaaagcctcttcacacttctatttatttagaaatatgtaacagtcacaccattaacataaataaataaacaatgaaggattgaatatttgactctgatgcttcctaatgatggctggatgcttcttaggaaaacttaactttgaggtcctaaaaaaacagatcatctcagcctctcctcccactgtgaacactgggtaaagatagggcaagagtgtttaaaaagaggacagttaaatggtcccaggttaagaaatatttatattatgtttatctactgtttgattaaactgattgaacaaaacgaaaaaattcagtggactcttatgtatgatatgtatcggatggtactaaatataggtctcagaattgattacaggctttattcagtagacattttatcttcatttcagctgagagctttgctagccttcctagtgtttggataaaggaaggaacaggaactctaaacagagctctttggccaatactgtctctaatactcctcctgcctaattttatgaagttattaactgatgtttgtacaagtcaaagatctcactcatgatcactttggagagctgattacaaaggcacattttgaaacagaacttctgagatcagcgtttggatagtcattgaaccacactatctccaagaagaggataatgaaaataaatctstgtcctatggacattgatattttctaccytttctagactaagtacaatgtggatggctatttgtggcgttatgattcaaggcttgtgtgatgcacagtgcctttgagttacttctaagtagcctctttattcctaattttgataatgtgacatttattgcaatgaaattaacaaaaattattgaatgttcctttttgcacagagacaagatatggagtttatagagggaaatgccttcatttagtctttcatgggtataataaatataatgttgacaagctactttgcttgataaacttgtttatatagtttctttcacaatgaaaacagggtacattagaatttttgattagaaatgcttcaattaagggcaaatgaacttggatgctaaatgagtttgaataatttcctggactttgagggaaattaataggtatttaaaaaagcaagtagggctggccatttaaatagaagtccttagaacaattcatagtattagaagataaacctatttttgtgtaggtgctgggtaggtttaaataatttttttgtagctgttttaacaagaaggtatatgcctctgtgtgtgtgtgtgtgtgtgtgtgtgtgtgtctgagagagaggggtgggggtggcagacagcgtgcttctaagccttcctgaagatcctcccttgcctcttgtctccttctcatataaaaaggggttggctggaggcaaaccttcccttttgttgccattgatctgacactaggatattttgtagtccagtgagtagaaatgtgtcccagctgtaagattctgattgtggatttttcttcagtaggttactgatctttctttatgcctaaattcacattcttctaagtggaggatttacatttatgatttcatctgggtttaaaatctggccggaagcatggttatgtgtttaatgcaaatccgggggaagagtgcttcctactaagttgtcatttcatgaagaatttagcttacttattttctccaccatttgaaggatcctcaagggggtgatttttttctcaagggtacaagcttctgcagtaaatgaagtgaaggaatggaggagcaactgggaagggtggggaggaggaggatcaaagcagcaatcaacctcaaatggttctctcctagtcttggtttgctcaattgttgaaatatgggattgcacctctctctgcctgctatgtccaagattgtgatacatgagaatgtttataacaatattctacaagttgtagaatggagtacatggatgatgagaattctgattatagctatattttccattaattattagcagacatgaatatgtagagtgggcctgctgtaaactggagtggttcttttttttaaccagttcacatcatcattccaaaacacatgtatactacatatatatttaaaaatatacacaaataatacttgaatagtatattttgaatattgtaagtctaaaataaatggaaacccraataatgtgacagaaatagaagttccagatatttttcccataccccagttaattattttgtgcaactctttccttttttggcatgtggaagccactttgaaaggcattggctaggggactatatcttagagaaggtgtgttgggagaacctgcatattaagtggaaaggatacatgaaattgacatggtatattatggttaagtatatctcctacatggagttgggtattaggtctcatgtaattactatgatcgcacggcctgatacatcggtgtttcctcctaccttgtagaaaatagaggggtacaatttgatactggggactggtttcctgctttactgccagtgggaaagctgaagttgtgaacattaaaaggaagcaagacttctagctttcctctttctcattcaccttaaagccacctctatttgtaggcgaagggtaacttccttttaacttccgtcttgaagtctgaaagtggttaggaaatgtggggttggtatgttgtcagagcaattccatgcttcatttttgtatttggaggttttaatttttccagcgtattttcagctggagttaacagcatattaattttttggtggagaacactggctttattacagaattctgccctgcagctttctgagtttcactgatttccttgcgtgtgtgtcttttttttgtttgttttgtttttgtttgtttggttttggttccaaaggctttagaattttcagaaaatagcttagtttacaatttctgtgtctttttgttcagtttccaattgggaataataagagtgaacaactgaaggctattacctggcatagaagggaagagacttttcttaatagtttttgcttctcttaaagatgtagtcatgtataggattcatagagatccatgccaatgggaaagaactcagttttactttgaggcctctctttagacccggaagctgctgggaatctcttgagcactaaaacattagatgagaaagacttagcgggaaaactccattttactttgataccaaagggattgagaaatgcagtcgggaaggaatttccctaccctatgctgaatcctgagccctcttattctttctggtttcagctattttaatttttaatccaaaataaacaaacaacccccccccgtcccccccaaacacaaaagaaacaaataacaaaataaaaacaaaccagggaatattattagagcactggaatgtgagaatgtaactttttcttttctgtgtatcacatgacttttatttagtttaccaagttgctggcagtaaagctctttgttttcaaacaggaaaatatatttagcaaaatatatgtccattcatatttgtctgcctgttgttggactgcataatttaagcagacttcacaagatagggcagcagcaaaaggaatggtttattaccacattcattctcaaatcccaaatgccctcaataaaataatgatatcgaagattaaaatggcagtctttcactgtctaacctgatttacaatcctgaaacatggttccctttgtcactttggaattctctagtctccttgattctagagaccatgattcagagattatccttgtccattaaaagatttggttcatttctgcagatatttgttaaatagctgctaaatgggtaaaaggcactgggtagaagtttatgtcaccatctcgatttaagtatgttgaaattctaagtgtggcaagactactttgttttgtgtccttttctgatttttagatttcttcccatgttctggttgctgcaggggctacagtcttttaagtgtttttcattgcctgtcgaacaatacagaaggttaactggctctgattacttgatttgtgttttgctgatgtctttcttttcttgatctccctgtgttctattgccttagatttcctttccactaagaagccatagagaaaatcatctaatatgtatctgcatgggtgtaaagtgttagaaagaaaaatgcaaggaaacatcttactttctagcttccttcttcaaaggaattatagtctagttgagaaatgatgacacacacacctgaaaagataaatgattagtctcccctcccccagtttaaataatggtataaggcaataatggaaaggtatcacaaggtatagtacattatatgttgcccaataaattgtaatggctctcaccgttcagaagtgattccttgtattgtagtcattttattcacgttgacatagagatcagtggtgctgacttaattttctccaatttgtactttgaaaattacttctccggctggtattttttgatagtgaaaaaatatatttgattaaatttggggtaaaaaaatgagcatctgccattattttgaagtaacactgatgaactagtgttaaatgtttactttttagactcttattactgggaattccttgattagaacactgcttggtacatctcttccctttgtctcaacagtgatctgggcctggcatctttgaagagagtgtctccagctccttagagcttttaacaagagattttccttagtctttgttggggyactgtgaagtcggaaccactccatgtactagggatcttacaataaaagtttttgtttttgttagaacatttttactcctcagctatgctgtagttgatttatgtatatggcattttaaaataaattcctcatgcatacctactttcttattacaagctagagaaaatgaaaagtgcttaattataggagcctatataaccatacagtttgtatgtagccctcacactattttgtttgttcagagagctttatcaggctgtttctatcaaatattgtgttttcgttgggggctagggttacatattttaattatcatacccagtatggaaactggtgaaactttttcatatttatattttcactatctactagacaaagcagtttttatcattttctatctttcatgtttttttctcccagagttaattttagatggtgtgagtctaatgaggtggctaagggacattatttatgaaatgtcattggacttattttctgagctgaattccattttacatgtgggatagcttgtttgttgttttaactatttctgagytggaaaggggatatttaaggaattgtttgtaatgaggtttagactttattcttaaaggatttgaaaaaaatacagaacctagttatatgtaaatgaatgtatatttttctctgaaatgtttgctaaactttttcagacagttgcttaagttagatttacttcttaaaatctttatccattaaaattatctttgacctaattcattttatgatgtcagtatggatttgtatttctgtaatactcttagcggattaaaaacagatattaggaattaaatgtcctggccagacgcagttgctcactcctgtaatcccggcattttgggaagccgaggtgggtggatcacacgaggtcaggagtttgagaccagcctggccagcatggcaaaaccccgtctttactaaaaatacaaaaaaattagccaggcgtggtggtgtgtgcccgtagtcccagctacttgggaggctgaggcaggagaatcgcttgaacctgggaggtggaggtagcagtgagccaagctatcacgccaatgcactccagcctgggtgacagagcaagactccatctcaaataataataataataataattttaaaaaagtaaatgtccttagaccaccagtaggctaaaattttctttccttacttcatcttgagaatgtatgtcctcttttaagaacgtggttacgtggtttccaaaagtggtattttggcgtgagatgagaatagactttccagtgtccccacatttaaatgatttccttacaaaacgactgtaatggattttctttaaaaaagtcagatctgctactatattttaaatatgacttaataaaaatatgtattattttggcaacatcttttattttaggggtaagttatagcaatgctatttgagtacagagatgatattacaatataccttctgaccctttatataaatatttagagtaagggaaataagtatttttctacaaattcaatggaaatattctaaattcttacatcattgcaactattggtaactactagtgaagttgaatttagatggcacaaattgactgaattttcatgggtacatgatttttaagtttttactgcaaggtttggtagcctaggaacagcaataagagcacagtggggttgcttgagtggtgggttaacaatgctgggtaaatatgtctgttctccccacttatattttgcatgtctctttacctaattaaatttgtttagttacaatctcctagaaggataagaaaaaacttactaccttacttacctttctctccctcacagccttcccagaactttttcatgttcaggagctaatgtcctggtcttttcatctctggagaatgtataatcacatccttaacatctccttgcactcaccttaagcactgccctgctcttaggttcttggcctactctgcttttcttctctttccagggtgctgaagttctaaactcctgcagcttttctctctcttcactttcagaaccaagaggttctgaatggacttttacaggaaagcctggcctggaggagtggctcatgcctgtcatctcagcactttgggaggccaaagcagaggaccacttgagcacaagagtttcagaacagctcaggcaacataggaggactctgcctcaaaaaatagataaataaaagaaaggaaaacctgttacctacttctgtctgtcaccagctcctcctaacccatttagggatgcttctttgaggtaatacttttttgattcggcttccttttgccaaatggcttcctcaagtctccagattcacgcttttgtcgttttgaaaccagtgtctgatatgtacgataaagttaaatgggttttctaatcttgtgaattgcaggtgtaggaggtggagctttgccaagcaatcatgaccatctagaactgtgtcaggggaaaaaagagaattgcaacctgtggggtctaattgtgtgtatgctgaattttagaggttattaataaagagggaggaacaaataggcttaagtatactataatggttaagaaacatttaaaacaatataagcagacacacagcttaatgggttctatgaattaatattcccgtgatgaattagcaacatgaacaatggaaagattcattagagtttgtcctttcatctggtatgattaatatttatttgaagtaaaatgccacccgatttaaattatatagaaatatagactaagccaggctctctactggaatatgcaaacaattctgattcatgttcacctctgatgaaacagtgaactgtgaacaaaggcagagaatctaaagaaacttgtgttattaatactataggaagaatcctaactgatggacatttggttcatcttccctctttgaatgtaaccttgaatctattgtaagatcatgataggaatacatagactaagagtttgctttatgccctcagtttgctttctgtgttctattatatttgcttttcacatctaactggtaaagtaggcaagacaagtactattaatgttatctttcattttacagaggaggaagctgctcagtaaagatgagtaagctatctgggcacagtggctcatgcctgtaatcccatcactttggaaggccaagataggatgattccttgaggcaaggagttggggcaacatagtgagacctcatctctacaaaaacagaaaaaattagctgggtgtggtgatgtatgcctgtggtctcagctacttaggaggctgaggaggtaggatgaattgagctcacaggttccttgcaccatacactctagcttgggtgagaccttgtctcttaaaaaaaaaaaaaaaaaagatgggtaaactgtccatggccatgttgtcatggacagtcttgtgctttcagatgctgagcccagggctttgaaccaaggatttcattactgtaattgtgagggggtggattgggcctgtaggagttggttctgtctctgtttacagtttactgtccctctttgagagagtcaatatttgaaatttctcaaaatgccagtaatttgtttggctttggtttggaaatgtcatttgatagcattttttaaaaaactattcttatgaattctcttcacaagaagaggatgttgattttcctgggaagaagtaaattgctggaccagactcaatgtgtttgaaaaatttcttcttgtggccgggcgcggtggcttatgcctgtaatcccagcactctgggaggccgaggtgggaggatcacctgaggtcaggagttcaagaccagcctggccatggtgaaaccccgtctctactaaaaatacaaaaaattaactgggtgtggttgtgcatgcctgtaatcccagctactcaggaggctgaggcaggagaatcacttgaacccgggaggcggaggttacagtgagctgagatcgcgcctttgcactccagcctgggcaataagggtgaaactctgtctcaaaaaaaaaaaaaaagaaagaaaaagaaaaagaaaaaattcttcttttgcttacctccctgcctctttccctttaaaaaagaaatattcgaacagagtgttataattgctggggagctattgtgccactttacccctgtttaggggagccagttgagtgagctcatccatatgacctggatgggggtgagcatcatctctgggcttctgtattgtaggaccagatgcttctcctttctgcttttccttcatggaaacatagcttatctttgacatagcttattctttctacatgacttctcctctaatcagtcactactttgagaaaaattatattcccatactatgtaattccaattcttgagctttttatctttccgtattactaaggttttttatttttactgatatagctgtaggtcataacatccctacctccaaaccctatttttgttatcctactttaagtttttatttatttatttttactttggacattgcaataatcttgtctgtattctctgctaccagtcctaaatcaaatgttatatatatttccataagttatggaatgaatggtgaaattaagacaggcagatactctcagatataagaatcagacctactactaactaacacaagtgagagctaggctctttgtcacagaaaaagtggtacaaaggcttttcctcctgataaataccaacttcagaagggaagggatttagtaactccactgcaagataacttttccatatatagtgttatatatgttcataaaatcatgttccttttctacttaaaaacctctgattattctataggccagaagttcctaagttatagtcactgaaccagcagcatcaacattgttggtaaatgtttagtaatgtaaattctcagacaccaccctagacaaagtgaatcagaaatctgtactttaggaaacctgccagtgattttgagacactttttgagaactactgctgtaggtagcaagacaaagcctgtactccttaccaggcatggaggacctttgataagctttacctccacagccactgcttatgctatatcttcattgctctcctaccccaactgttrccgttctaagcttsttatcattytcagaacatgacatgacgtatacttccctgccccatgctttgctaagctgttctgatttaatcaagagtgttttttcttacccacctgcttgggaaattcccacagaagcaagaagcagcaaggtagaggggaaagagtgtgaacagccttgagttaaaatctgtcgactgtggtgttcagatgtgtccacttttgcttggcttttcttatctgaaaatggggctaatgatacgttagcattattatcaagaccgaaaacaaaatgttctgtataaagcacctatctttctatcaactagagttcagtactgtaatttttttttaggtgaaattcacataacataaaatttaccattttaaagtgtatgactcagtgacattcagtacattcatgatgttgagcaaccatcacctctatctatttccaaaatatatcaacacttccagaggagactctgtacccagtcactttctattccctctcctctcctcaatggttttttgtttgtttgtttgtttgtttgtttaaattgacagagtctcgctctgtcgcccaggatggagtgcagtaatgtgatcatggctcactgcagcctcaacttcctggggtcaagcaattctcccatttcagctccctgagtagctgggacaacagacgtgcatcaccacacccagctattttttatttttttccattttttgtagagatgggggtcttgctatgttgcctctgctcgtcttgaatgcctcaaatgatcctcccaccttagcctctcaaagtgctgggattataggcctgagacactgcacctggcctctcgatgttactttacattttattttcacatgatacagattctggagatgaatattctcatattcatcttttattttttgaagatatatagtacttgccacctagtatgtgtacagttctagcttaattatggtaaattaaaatgtgctgaagatctaaatcagaccacaaaatgtgattaatttttgccaaaggaaattaatacatgttgtccaggcgttcctctgagatttcttaaagtgtgctatatttttatgtttactttgtaagggcaccttttgatagawtgaatacacacatatgcacgtaaccactgcagggtttaattacacgatgatagtatggctaattattcagaattgtttccacagtatcctcactacctagctatttacacaaagctaactgttgctgatgcaagggatagaacattatttccttttttagtaccttttggttcttgggttcttaagatctcaaaataatatttaacatttttaaaggacttaatacttttcgtcgtgctttcatttacatgtcccatttcatctttttctcaggataagaaagcaaaatcaattgayccagtcttttttctttttttttttttcaaaattagaatatatcttcagttctaaatgtagggacagatttactttgaaaatagtaagttctaagaaacattatttaattaatgttcattgagttttccaatgacaagatgcaaatgtaatatttccctaatattttatatgtagaagaacatgctttcattataaatgactaaattagtgttactctgtcaaatgacacgatttaattttaaaagtattagctgtaataaaaaattaacagcatgaggagttgaagaatttttaaaaacgccttcttcccgtgctgttagaaatgacttaggagctatatggtatgggggtgggaaggggagttttcaagttggaacactgcagctcattagcatctttcaaaccctaatgctgttttgtttcagttagatttattacactgtcttcttccccaattcactgcagcgtgtaaaggctcagttggaacaaacaaaagagatatataacctctgaaccaattagcatagcttacaatgttcttaataggcttatctactgtatatgcgacttgggaaaatgactcaacttttatgctttcttgatccctagggacgtttttcaatatcaactgctttgtgcccccagtatgtgattttcagctttctgatagaaacccttctttacaatttgatggctccagggtgcttcagtcactcacttgtgactgttcacttatttgcccaggctctgttgatgcgtgagaagagggcacatgtgacttggtcccgggrcagcctgctggcctcagctggcatgtgggacagggcgcaggcccgcaatttgttcagctagtgttgactcctggggcgccctcctctctcactcctcccctcatcctttgtccttcctctttttactgcttgtcattggaatctggttcgtcttttgttcttgaaaggtataaatgatgcacgtttcccctcttccccatctaccaactcacacagaaaaaaagggcctgtgttggggggaaacacaaattgaggtatattgttagtgacatttcatagagcaggccaagctctgccttgcatatttatagaattttgattccacaaacaagtgaaggactctaaatcttatgaattttgctggttgtgtgtgtgttttattttttaacagcatctatggttctattttgtgttaggtcaaatgaggtatttgcattaccacctcttataaaggcttctattataagcacattaaaatggtcattactccaattaccataatcaatgattttccaatttgagaaggtgaatttaaccacatcttgaaagtatatttattaagggaatagagtgtgaacccggagagacatgccttagctattgactgtttgactttgggaatgttatctaactgatgtaagtcgcagttttgccatttgcagagaagaagtagttagttatcatgggatccttgtggatatttatataaagctaccaatagtctctgccttgtaataaccactcaagaaaaggtagcagtgatgctaatagaaatcctttggaaaaataaataaaaggaggccgggattctaagagaggtaagccaacatagaagagttcatctgtgaatcgctkgaatccgaagttgagaaaattggcctggcgtggtggctcatgcctgtaatcccagcactttgggaggctgaggcaggtggatcacttgaggtcaggagttygagaccagcgtggccaacatggtgaaaccccatatctactaaaaatacaaaaattagctgggcttggtggcacgtgtctgtaatcccagctactcaggaggctgaggtgggcgaattgcttgaacctgggaggcaggggttgcagtgagccgagatcgtgccactgcactccagcctccagcctgggcaacagagagagattccatctcaaaaaaaaaaaaaaaaaagaagttaaaaaatttatatggtaagacagcctgtatattctgtacgttatatccactatagaaaactctcagtcatatgttgatatcatggtcctgtatttaacctagtatttgtgtctgaagggtagagataggtttgccttaaaagaacattggtttccacaggtgctatggtttgttcacatcccctccaaaattccggtgttaacaatatgatgtcaactagtatgatgacaatatggtactaagagatgggccccttaagaggtaattaggccatgaaagttcttccctggtaaattgggattatgacccttagaaaaaaaaaggcttcaagagcactcaactagcttgcccttctgccttccaccatgtggagacacgatgtttctccctttctggggatgcagcaacaaggcgtcatcttggaggcagagagcagccctcaccagacaaccacacctgccgggaccttgatcttggacttcctagcttgcagaagtgtgagaaaataaatttttctgtaagttatccagtcagtctccagtgttttgttatagaaggacaaagcaaactaagataacagtggagaacatgattaagtgatttccactgctttgcttttatatgttgtagattgaggtttatgagttatcagctattttggcttttcagaggtaataagatgggttacaataccagaacaccagaaacttagaacagggccagccacatagatggcactcagtgtgtgtatctgaagtgagtatgagcggcctcccatgggccttttgagttgctggattttaaaaagattggggttgaggtgggtgtggagttttgggaggagactatttgtagccgggacgacctggctgaattcattgcagtcctgtatttcagtgaaagcattgagaactagtgagggaagaacatagagctggttactaaggtatcttgaaacaaggccgaagaatgatttttatttgctataaaaattagttctgtaatagactgataccccagctgaaggctctcatggtaaattgagccctttggcttcttgttttagtagtgaaaaatttcaagaaaagctagtggcatttactccaaaacaaatgagtaattatttacagtcttttacatgcattttaacttacacaacagcctcctttacattttggtgaaaataataaaaataactttagcctattccagcagtttaatgtaagtagttggtctaagaataactttgttatggtggtaagcttaggggaaaagtatatatattgcataacatatttaataaagttgttctaagtgacagcctcctcctcagcagcctctttggctgaactgtggttgaaacttctgcccgagcctgtttcttctcaggctggttctattaagcagagtggtctaaagaccaagagcaggktgtattgggagtctgactgggatgtaagtgcagttctacaacttaccagctactggttataaccttggtcaggtcactcaacccctctaagcctcagtttccccagctttaaaatggggatataaaagttcctacttcatatttttgtgaagttttattgacttcatctcatgaatagatataatcagctcaaaataaaagttggctataataacaattatttaagatatgtttgtataatataagactaaatgttggttcctgctgtgatttatgtcagaggatctgaagtttttagttgcctttccgatgcagactgtattgttcatactttacattgttcgtagtatcattatcttccctgccttgctttctgcaacactgattgccattttaaaaaacataatgggtgttccacaagtgatcttgaaatttttatttataccactggaaaatgatttgaaatatttcccatatagcctaggtgttactgttgtgaagcagtgtgttgctaattacaattttaataaaacgtgtgggaggctgtcttcacattaattgttttattcaycaagacaattgttacacttctgtagcataatgaattggacaatcactgttatgtacttcagagaaatagacttccttgttgctaaagtgaataggctggttgaattttacagagaaatgaccatgtagcagcacctctggtacggtctcctgatacatggtgttttaggaagcactgtgttcttcaagtatcacaacatatgttggttgccgtgtataaaaaggtctaggcagacaaaaatgagtcacctcaaaagcgtataaaaaaatctcagtatctctattttctgaattctgaattagatgttaaatcaattttaaagataataggcgctggtttatcaagctttgaattatctgacagtggttttctggcttactcatatattcagtgcatgtttttgaaggattttaggtagacagaaccaggacagtattaagtcattttaggctcatgtgggaagattagatcatacaatttatataaaatactctaaatcttataattcctaggtaccatgaatggctctaaaattgtttacagagcaggtattgttctgcttttttagagtagtaatttttaatataaccaccctaatttttttttttttttttttttgagacgagtccctctctgtcacccagggtggagtgcagtggcgcgatctcggctcactgcaagctccgcctcccaggttcacaccattctcctgcctcacaccattctcctgcctcaggctcctgagtagctaaggctacaagcacctgccaggacgcccggctaattttctgtatttttagtagagacggggtttcaccgtgttagccaggatggtctccatctcctgacctcgtgatccacctgcctcagcctcccaaagtgctgggattacaggcgtgagccaccacgcccggccacctaattttcattttaaaagaagtaaagacttggggccgggtgtggtggctcacgcctgtaatcccagcactttgggaggccgaggccggtggatggcgggcgtggtggcgggcgcctgtagtcccagctactagggaggctgaggcaggagaatggcgtgaacctgggaggcggagcttgcagttagcagagatggtgccactgcactccggcctgcgcgacagagggagactcgtctcaaaaaaaaaaaaaaaaaagatgtaaagacttggccggttgccgtggctcaagcctgtaatcccagcgctttgggaggccgaggtggttggatcacttgagttcaggagttttgagaccagcctggctaaagtggtgaaaccctgtctctactaaatatagaaaaattagctgggcgttgtggtgggagcctgtaatgccagctacttgggaggctgaggcaggagaatcgcttgaacccggaaggcggaggttgtattgagctgagatcacaccactgcactccagcctgggcaacaagagggtaactccgtctcaaaaaaaaaaaaaaaaggatgtaaagacttgctagttagagaagttgtgactaatgaacagccagaggtaaatgaaaatatacatctgaaacaaatccaatgatgatacttgcaggaaaaattttgctttcaagagaagtaacctctagctgattcactctaaaaagtccatattgcatttataactccagcaaaagataccattctttacctttacaacagaaagttcctccgtctgccagtctgtacatcagtctgatattcttgctataaaatattttcatgtgagaattactaccagggaattatctgtagcagctacctataactttatgtagaattcttatgctcatgatagcactgattttaaaaatatattcagtgttgaaaaatgtactcagtcctgcagaccagagattagattgttacggactgagggtttaatgacctgccctgatggagaatcacttgactctcttggttccagcctccatgttgcaggaagagagattgtgccccgttgttttccagaagtaagaagtgagcttcgcatattaaggagcatttcctagggattacgtggaaaggtagaaaagaaagatgccctttctctcactactgtaagtcacatatctctgagattttcagatagggggtacgagtttcccaggactactgtagcaaagtaccacagactgggaggtggaaatagtagacatttcttcttcaagttctggaggctagacatctgagatagtgtctgcagggttggtttcttctgagagctgtgggattagttctgtgtgtctccctttctcagcttctggtggtttgctggccatctctggcattccttgccttatactccaatctcagccttcatcttcacatagtattctctctgcatgtgtgtctgtgtccacatttcccctttttataaggacacctcaacatatctttttgaggggacacaatttaacctacaacagaggtcttgccgatgaatccctcagagttgcttactgtagttgtggtgttcttaccggcaaggaacatcaagtttcatggcaaagctttcaccatcacatgtgccagcaggtgttgtttctttgtccaggatcctaatcccagtcaatttctctggccttttgcaagactacatcagattacatagtataataaaaaaaaagtaaagagatataaactagtttaatgtgtgtttgtaggtatgaagcagagaggtttagaatttaagctctagaatctaacctggtttcaaatcatggctttcctatccctgtgacctgggcaaggcacgtacactctgtcaactgaaggtaataatagtgtctctctcacagaggattgcttgcagaataaatgagatattactcttaaaaccttaactgtagtgcctggcctagagtgtgagcatatgaaatgrcagccaacaagaaggcaaacaaaaaggtcctgctgcctcttgcagatattgggaaacaggcctattccaggcctgagggaaacatctggctcgttaccttgcagtgtggctcacctctgtctgctacaagtcctacgctgtcatgattcctgctctattcagcttgtgtgtctggacagttgttctcagcactcagcacccagctggacaccagactgctttctcctctttcaagctgttgcatttattgtgttttcagagcaggactcatatttttctcattaaagcacattattggaggaaagggagaaaaaggtaaatgtcagaatttgcttaagctcctgaagtagtaaatgctatttaacatcctcccaccaccaaaatttgagttttagtgtttccacacttaagagcttggaaatgtatgacttactgtcattgatgagataatacaaatgacacctccacactttttttgcagagagtagggagacaacagggtttgtccttgtcgatttttaactggtagagtcaaatcctatagaaacacatttttcctgttagcatttatttggaaatatgaaatgtatttgtgtgtggcttagagctgtccctgttgattgtacatcattattaaacaacaaagagggggttaaatcagaaacatacattggcatgcttagtaaacatgttaatggaagttcaggatactagcctatagttttgtaacttttatgtatttgtttctcaacagtatttatttataaaccttttaaaaagaaggcaagggttttgacaacttccaaaatacttggccatcatttttaaggatctcctatattcaaacttatatgataggccccatgggaggatttcaggcatggagtaaggatgagagaagcttctgtgtcctgaattggtgggttcttggtctcactgacttcaagaatgaagccgcggacccttgcggtgagtgttacagttcttaaaggcggtgtgtccggagtttgttctttcctcccggtgggtttgtggtctccctggctcaggagtgaaactgcagatcttcaccatgagtgttacagttcataaagacagtgtggacccaaagagtgagcagcagcaagatttattgcaaagagcgaaagaacaaagcttccaccgtgtagaaggggacccaagcgggttgccactgcaggcttgggcagcctgcttttattcttttatctggccccacccacatcctgctgattggtccattttacagagagccgattggtctgttttacagagagctgattggtccgttttgacagattgctgattagtgcgtttacaatccctgagctagacataaaggttctccaagtccccaccagatcagctagacacagagtgcagattggtgcacctacaaaccttgagctagacacagggtgctgattgatgcatctacaaaccttgagctagacacagagtgccgattggtgtattcacaatcccttagctagacataaagatcctccaagtccccaccagattagctagatacggagtgtcgattggtgcattcacaaaccctgagctagacgcagggtgctgattggtgtgtttacaaaccttgagctagatacagagtgctgattggtgcatttacaatcccttagctagacataaagattctctcaggtccccaccagactcaggagcccagctggcttcacccagtggatcctgcacgggggcacaggtggagctgcctgccagtcccacgccgtgcgcccacacactcctcagcccttgggtggtcgatggaactgggcgccatggagcagggggtggcgttcgtgggggaggctctggcagggggaaggctcacgcatggtaggctgcaggtcccgagccctgccccgtggggaggcagctaaggccccgtgagaaatcaagaacagcagctgctggctcaggtcctaggctcctcactgctgggggcggcagggcccgccggcagctctgagtgcaggccgctgagcccacgcccacccgtgcrcagcccttgttcctgccagtgcctctccctccacacctccccgcaagctgagggagccggctccggctttggccagcccggaaaggggctcccacagtgcagtggtgggctgaagggctcctcaagtgcaaccagagtgggcgccaaggctgaggaggtgctgagagtgagcgaggactgggagggctgccagcacgctgtcacctctcacttctactgtaataagggacatcaggcaattgggtaaagacatttgcaggaatagaactgatttctaattcgataattcaagaaaacttttttagttttcctccttgaaagataaaattgattttgacaaaatagggtaaaggagaaagaattccaaggaaaaggcatgagatatagaaaagtgaattgctggtttgaagaattaagtatagggataatgttggaaagacaggaaaagaactggttgtagaaggttgatgatagcacgctaaggggtttagactttgtggtagaaaattaggagtaactcctttgaacaggctctgcagaagaaaaggctagtctggtagcataggatacttagagatgctccggcgatggagacacattcaaggagcttctgtagtattcctggtttgtagtcatgagggcttgaatgttattaatgaaagtcggaatgtagagagaatgacaagatgtgtgacatattgtaaaagtgttatcaacaggacttaatgcatgttagaatatgagaaggaatcaaagatgactcccatgttttgatccagggtgtctaggaacactgagtggcaaatgtaaagaatacaagaggatgttaaattttggctatgtcatccttaagtggccagtatgatattgtatccagatgaatgcctcacaaggcagttggaaatgtgaaagacttggtgagaggaacaaatattggactcattctcattgacaagacattaagacagctgagtttgttacagtaggtagctagccaggcaggagctgggctagaggaggctccccactctccacccaccaggaatatcaggcgataatcaggtgatggttcagcagttatcacaaggcctctctgaaaatgacggttggctgccagcaccagggagaggcagtttcctgatgggtcacagttgttacatgaaagtgataattgatctcaggtgccagggagagaggagtttcacagtagataaaaacacttgaaattgctaattggcagctcaggaattggatgagtaggcttgggcatgcgcattaagagacaaaatggcaagagtatcaccttccagaagcatttcactggaaaagggaaaaatgcttcggttgagcatgcatacacctccagtaaacacactgtgcatgctcacctcccaaatgttagcaggccaccaggcatgcaggcagcccaccccarggaaaggatcacggtaaaagggacgcaagacaccggaagtaataccaacatataaaaccccaaatcaaaaggtcagacactgcacttgacctccagagttcctgcttgggtctcttccaagtgtatggtcttttggttcctgtcctaaagctttttaataaacttccactcctactctgaaacttgcctcggtgtctttttctgccttgtgcccttcagtggaattctttcttctgaggaggcaagaattgaggttgctgcagacccctatggattcatctccggcagtttagatatttatcacatccctaacaagttcagggacatgaatgctatttcaaagaaaatagggttaaaaacttcaggctctggaggaagaactggaaagaagagagtaatgagcttcagagagcagaatgagaagtgcagcctcacagaatagtccaggagagagcatgaagaagtcaatgcagtagtcaatagcatgaaatgtttttatgagattaaggaggttggtcacctttcagaaagagaggttttggctaagagtttaggggcctagatcaaagtaaatggagttaaggcatctataagtgttcagaaagtggagactgcttttattgacttcctctgaaaatttctagaatttctttgaaaaatcatggtgtattatttctgttacctagaaactttttctgaaagataaatcttggggcttttaatggaagaggtgttacttcttcactcctggactttttaaagcaatgataatttttgttttaataacaaagggcgggctttgcaataggtgcttagctaaatattttttttaattgctcttttgaagcaccttatcttttcataaatataaaagggctttctacaaaagcctcaagtgcttattgaccaactgatagcaatttaaaattgacatgtcagttttcagaaggagtaactttttccggtattgaatagtgcagtgaggctttgttgcccagaaatttcaagtagcactcagttttcataagaaatcttgcatttgaagagactggaagttgctttccatcacaaccattagcatataacaggcagacctaactaagagtgtacatgggccctacgtaaacacagtggattgctcctgttagaaatgcttgttccctggtgccataaaaaaatagcacttgaacataaatttaatttcctcagcaaggccatttttagtttttatagaaagggtacactctctagcagttttgccatgagagtacaccaaacaaaggagacagggtcatttataacatgaggcgtccaccctactgctgtgtctggtttccattggctggaacaggacctcacattctgtatttgtccctattggctagcaacgtagaactttcaaaaagaggcaaaggtagaggagaacaaaggaaggaggaagtaacttgtggaatgctgagaaaggtaaaaataccttcagataaggaagaggaacaagctatgacctaatgcttgcttggaccagtataagcatgccaggacaaatatttaggctaaattgtgggagctaagaacataaagtacwttgatttctttattacagctagcagatatttaagaatgttagcacaggtctttgaataaattttgcttctaagagaagttattatgtattcctaattagatgggaggaaagtctttgaagaggaacctctacattactttttacaccccttagtaagtttactctcctctccccacttttttttttttttttttttttttttttgagacagagtcttgctctgtcacccaggctggagtgaagtggcgcgatcttggctcactgtaagctccgtctccggggttcacgccattctcctgcctcagcctccctagtagctgggactataggcacctggcaccacgcccggctttttttgtatttttagtagagacggggtttcaccctgttagccaggatggtctcgatctcctgaccttgtgatctgcccacctcaacctcccaaagtgctgggattacaggcatgagccatcgcacccagctggcttttccactttttgaaaaagcccttggcctttcattgctatcatcagtggtgctatataaaatttttagttttttaattaactcaccaagtctttattgaacatctagttggtgctagacactctactcgttctgggaatactgagatgaatgatacagcttttatccttgatgatgcagctcatatccttgaggcatatgcagtttagtaggggaggcagagaagtaagcagataaatcaaaattcagacagtgtgggatatgaacaaggtgctgtggaagcatctagaggggagggaagcactgggaggaattggaaggaaatcttattttgtgcgttgagttaaacattgttagatggcagcaatctaagtggttcacaactgacaaatgattcaggaaattctgttttctttactgttttctgccaactctgacagcatttttttaagacaagaaaaaaaatggctcaattagtcacacaagtacagtaaacttgaaattacttaagtagtaaggagttatgactgatactccatggcaaccatagtcaaattcctccaacttgcctgcaaggaccaaagaagaatcagatacagtatttggcattgtatttattttatccttggtatttggcatttttgtttattctccagtggggatagatacggaacgtggatatacagttgacctttgaataatgcacagattaagggcaccaagctccgtgcagtcgaaaatgtgcatataatttttgactccccaaaaacttcattactaatactattgactatacgccttaccaataagttaattaacacatttggtatatgtattatatactgttttcttacagtaaagtaagttagagaaaaatattaacggaaatatcttaagagagaaaaaaatatattcattgttcattaaatagaagtggatcgttataaaagtctccatcctcgttgtcttcacattgagtaggcttcagaggaggaagaagaggggggttggtcttgctgtgttagatggcaaaggcaaaagaaaatctgtataagtggatccacactgttaaaacgtttgttgttcagggtcagctgtatatacaccattcttaagtacatggactgtgtacatattttgtccatgaaaatctacccatgattttatgactcctagcacagaaccctgttgagttcaaaacgagctcctaacatgtacgattgacagctgtttgaagcaaacaggaattgatatgttgatctttaaattctaactaattaatggaaatattcagaaatattcggagatattagtgtgctgttcattcaatatgacttttaaacctatgaaacatatataaggaagtgattgtgttcattgtcaaatgatttttcactttataaagggatttacccagggttcctttaatttgatagttttacccagtgcatttaattgttagtttccaaaccattaattccttgacagaagactggagaggcagacagcttaaaccagagtgtgaggaacaagcctctaaattttattgtttgaaatggagcaaaaagaagggtaactagttccctttcattcagtgtcaattgttggggaaatatttcattttcatatcctgtgtgagtgctacctctaggagataaagtaggtatttcagtgtaagtttcttctgtgtcttactgcaccaaatatggacttagaagcatcagagacaatgcatgacagagacaatgcatgtttctaatgactgatggaaataaggtcccataaatctgtttctgtatcttaggggaattatatatggtctttgactgtggggccaaattgaatgaggaagcatcatgtgaggtagaatgtgtccttacagaaagagctaacaaatacaaaatatccagactcatttattctgggatagcataagtagaccagtgatctaatactcctacaataggtgatggagccatcctaatagatagatttgagatttagactggraagtaatagtctgaacaaaagagagtttatgaatttaattaaggtagaactttaaaaaaattagatggatgattagaagacacagaatcatccaatttatatttgtagctacctaaaaattattaggactttcttataatgggctttaaaaatttttaggttttatttgagactgtttaataatgatttggacaaattttaattggatgcagaaattggcatctctagattcagtttttaaaaaactgaatcttaaatcttaaaaatatcttaaaaaaactgtttaaaaaacagtggctgcatctctggggattaaaaagcaatagagaatattaatataagttgaaccaaaatgtcattaaaattacaattacctcacagtaaaaattattagctaaattacccaaaaacaacatgaatttttttaaatgtttcagaaaaagaaatatggtgatataattaatatacatgtatcttaaacttttttcttgaagttttgttatgcttgcttaaaaaatagacagtataattttatttctttagcgaatataagaaggtggtgtgttaactacaataaaataacttttattgatatagtgctttgtaattttaaatgttcttttatgtatatcatcttatttaatctttaaccaggtagtgaaggaattattgctgtcagttcgtagatatggaaactgagctgaaacattaaataaattaatcatcaagaattataaacccttactcctttcatttcttcatctgtttattattcagacatatattggtcaccgttatatgccaggaggccctctattggtattggaagcaaaatttgtacttgcgtcttttggtatctattccagtattcttctcctgccactgcttgctgcatctcaactgcagttcagaattacagtttaagtgataagcctttttactggacagagtttgggattagtttttattttgtaatagatacataatatttttctattctaacattttaatgtatagattttctataatcagccttttgtttaaagtataaatttgtattggccaaaagttttgtccattactatataaaattacagttaaattcttatataatctctttttccacttggtatggaaaagattcctctttcaagatttcttaggcttctaaatccattgtttgatttttttttctaggaaagaagctatcttaattgactttttattctgagtgaatgaaaataagattcagaaattatttatataatttatatattatttatatatctatagtatttagaaatagtaaataaaaacattcatggtaaagaaacaaaggatattaccgctaatgaccaataatatgcattggtcataggaagaatattccaaatctagtttaataaattgttcttggttatatatttagacttatgctaggttcttcataagatttttttaacagagaaaaatctacagatcttgcattgcatgtgattataacctggttgggaagagatactaatagctccattacaaattggagtgaaatatgtgtagccaatttccttgactatacagaagactgaatgcttaagtcctctgggtacagttttgtagggtaaaggagacagttgtattgggactcattttaaaggatgagcagatttctgcaggggagatggatattttgagattgcacaccagaattttaaaaagtgtttaaacatacagtatataagtatgtctacaaattggatttttaaaaatcttattgctgttaggtattctcacaaatacttaagtcattcacaattttttcgtactatttacctatcctccctgggattgagtacgtgttggaggcaggagcagattctgtgtatgcaataagtcattgccagttgcctggagcacagtagttttgggactagagtgtgaatgtgagttgggattcatatcaggaattactaacatacaagaaataattatttcttaccattttccctggactaatgactctgagaagaaacctggaagaaacatcatatttgatacgtctagtatttcatcagccgttttttatttgaaggaaatacttacggtatggggtcatagactttgaatattctccaaattaggctggtcctttctgtatatatcatcttaatctcttcattttagaggagctgaaatgctgagaatttatatacagaatctttttgtggagaaatttagaatgttctggtcatgcataatgatactattgttttggatatggagagaaattgttcatgattagaatctatacatgcttaatgagagagaagactgaattataatcagttgcttttgcataccagtttctttaaaagcatagaaaaagtggactttttttttttctttgctgtggtcaaaggaagcttatactgattactgtcaaatgttagatttttattttctttaaaatatagtggatgagattttaatttgcttttcatgtaaaaggcaagggtgcagtgtttatttgaattccacattacaaacttttatttttaaacaacagaatttttaacagaattatttttattttttttattatttttaaaattatatttaaaattaaaataattttattatttttaacagaattattagaaaacaaaacaaacattttacttacaaaacattgaccccaaaattgggtctgtaagatcctctttcaagtatgggaagttttgtattttccagcaaggtttttataaaacagaaattaactgtttttcattcactttatgcaggaaatagttattgtgcactgaaatggttaagctttgtgtccccacccaaatctcatctcgaattgtaatccccataatccccacgtgtcaagggagagaccagatggaggtaattgaatcatggggctgtttccctcatgctgttctcatggcagtgagggagttctcacaagatctgatggtttataaggtgctcttcccccttagctgggcacttctcttacctgctaccttatgaagaaggtgcgttgcttccccttcaccttccctcatgattgtaagtttccccagcgatgctgaactatgagtcagttaaatctccttcttttggccaggagcggtggctcacgcctgtaatcctagcactttgggaggctgaggcaggtggatcacttgaggtcaggagatcgagaccatcctggctaacacagtgaaatcccatctctactaaaaatacaaaaaaattagccaggcgtggtggcctgtaatcccagctacttgggaggctgaggcaggagaatcacttgaacccgggaggcagaggttgcagtgagccgagatggagccactgcactccagcctgggcaacagagtgagactgtctcaaaaataaataaataaaataaaatctccttcttttataaattacccagtcttgggcagttctttatagcagtatgaaaacgtactaatacaagcacctattttgtattaggcatttttctagtgattgtgctgcagaaagatctgcccttgtagaaattttattctcattaattaattaggttttggccaatttcttatatattttacaataatagtattaatttagttgctcaccatacatatttcttaagccaatattatgtataaattctaagtagtgttgtcacagaaagaaatggaaaaatcagtacaaatgtatgtataaggaacattggggaaaattgtttaaagctttagtattttcaaaggatgggtctgaagtttcatatatttgcaaatcattttagaaacttaaaatataatttaaattacaatgataagagctggtataagtttttctgaatgaatgagccgtttatactatgaaaagtattttttaatattagatccctgcttataggtaaaattacttagtacatttttttaagatttatttgaagttttcttttccatgctctccttcttttttttttttttttttttttttttctgagatggagtctcgctctgtcgcccaggctggagtgcagtggtgtgatctcagctcactgcaacctcacctcctgggttcaagcaattctcctgcttcagtccccccgagcagctgggattataggcacctgtcaccacacctggctaatttttgtaattttaatagagacatggtttcgccatgttggccaggctggtctcgaactcctgacctcaggtgatccacctgcctcggcctcccaaggtgctgggattacaggcatgagccacattctctccttctgaagatatcttaacacatctgaaactttaagagaatgctagtaccataatttttctttttaagtactacttttcacttactgatacttattagaagtaaaatcagttattgcagttgtctcagactgtcactgcatgtaatttcaactgcatgtaatttcaactgtttctttctgtaatagtggttgtattgagattgattcatgaaaccttaagttccttgggaattaaaaaaaagaatcccataagaagtaaggagtttattttaaagtaatggcccaactggaaatctgcatgtcataaaatttgtccatttaatggtaatggaaagcatcaactgacttagccaagttttttgagtggaagggttatttaaggtgacatctaatcagtttgaaatgtatatagatccaaaatgaaatggaattttattaaattaaactattggatattttctgtatcatgtggaatagctataataaagacagttaagatagaattatggaaagcatcttttacatgtgataaaagatggtttctgtaggtttattgaaataattaaacacattagatttttatttttgactaactcggtttgtttctctccctcttccattttcttttgctcttattttttttatgaaaatcttgtaagcttatagaaaaatattgataattaactattttttaatgtaagaaatattactgatcttaaaacatgatttgtaggattaaaaacaaatttttaaaaatcataaaatcacttagaacaatctctatccctataatagcaactttcacttttgattgttagatttaactggtatatgtaatttagttatttgccgtcacactgtgaatccagtttttaccattcagtgacaaattttcagaaatatatcagactagtactttacatatgtatatatggatcattatgtttatataaatattccccaacctcactgtaatagtgtttatctgtatctctttcttttaaaatgtgtgaactcagctatgtaatacttaygccaatatgtatagttttaaatattctagcatctctggcagatactattttctacttgaatgcttatgtttatttggaactcactactctgtaacagcagctggttatgttcctgggcaggtttaatagtcattttgtcatactcagtcaaaatgttcttccttttacatttttcgttaagtcttgtgaagccacacagaagtgatctactctctttacyaagtgttaactttgcatatattttatggggatgattctatccctacttaagattttctcttctcaggttaaatattccatttcctttgttcaggagtttcttatttggccttctttctaaacccttaaccattctgcttattctctgcttgacacatgctatttaatcaaggtgacatttaaaatatggtcctccacagagcaccactatgagtctcctacctcccttgatctataaactatatttttacagttttataagattttttggcagtcagtttatgatactggcatgggaaatttcttgcctaccctccctacccttttaatctgtatttcctttatctgttttatatatagcaatatttttaaccaaaaacttaagactgagttttctatgtacttattgatttaatgtttatggtcattcatttatggttaatttcaacaaatacttactgagctcctgtgtgccagatattctagtaggtgctggtagaaagtggtaatcaaagtatagtaccaaacttttaaatttcctctggttttaatgttatgtttatgataccctcagagggaacagggaataataatgaagatgataatgatagccagagattatagcatacttaacaggtgctggcatatttacctctcacaacaatccttaagtcacaagtactatttattattcccattttgcagatgaagaaaccacggcttattgagatgaaggtacttgctcatggtgaggtcatggatggcagagctagcattagattccagttaatcggcctgcaaagtaaattttattaaccactctgttaagtaagaaacagtgttactgaatttgaagtaagggaaaaaatttgtttttcagatgaatgacaaagacttcctggaggaaatgggctttgaagaaggggaactatccattcaaaagaaactctcaccaggaagaggcataaaagaatgagatggaaaagaacaaagctccawgggagaatactattcgtgtagtttggctacatggggacagacacataaggcatgttgaggaatacaagataggaaaaagattagagacagattgtggcagacatcaagtgccatgacaaaatgaatgtatgttgttagtttttgagcaagaatgttgagcatagtcatctcctgccttaaaattgttatcttgcagtagtattcacggaggattataaaggaagcaagtagataagagagaaaaagaaccagaattaccaatcatgattagaaggaacaaaaaggacagacacaaaagacagggtgttccttaaattgtttgactttaaaaccaaatgaatattggagtaagaaagaagtggtaactgaaaatcaagacactgacaacagaaatagtcagatgtggttgaggaacattattttaggaagatgaggaattgacctttacattgagtttgaaatactactgtagaatccagatggaattatctaatgagcagtttgagaatcagtgctgtagctcaggggaaagttgaaaatggagaaatagacctgattttagctgtgtagaggggaaaactgagttacatatggaagtaaacatacaggtgctaaagaggatgagcgggtgtaaaccatatgacatcaggacattggaggtactgcttctaggcttggagatgaccagtggcattttctgatagtagtgtgtgacaaacatcagcttgactgttttcttaaggactttgtgtacagttttcatgtaagctcctggttcatgcatttctttcttttattctttttttttttttggagacaagagtttagctctgtggcccaggctggatggagtgcattggcgcgatcttggctcactgcaagctccgcctcccgagttcacgccattcttttgcgcatttattttttttaattaattaattaattatttatttatttatttagagatggagtcttgctctgtcccccaggctggagtgcaatggtgctatctcggctcactgcaagctctgcctcccgagttgacgccattgtcctgcctcagcctccygagtagctgggactacaggcgcccgccaccacgcccagctaattttttttgtatttttagtagagacggggtttcaccgtgttagccaggatggtctggacctcctgccctcatgatccgcccacttcggcctcccaaagtgctgggattacaggcgtccttcaaggtttattgatgttggcatctgctctactgaagataaatacagatttttttatttttttatttttattttggcttattttatcccagtaagaagcaggaatgaaagtttgtaggccaaaacattaactgtccagtgaaggtgtgacccggcaaatctaaagaactcaataaacttcagactgacatgttgaatcaatctgaaagataacactgtccattctccggaaggaataatgggcttcattaacttgtattacaaaggataaatcttcacaggtacatggactgaggatagagtgggactggtttagtctgaggaagtctttttcctccctctattttgtaatgcttctaatagacctgtttagcttcacatctctcctgtaagcagattatgcttatctttgcatttctgtgatggaacatagtacttgatatagtagtgggtatgtattaaataatatataaaggcatgaatgagcaaactttgtctaaaaagaagttaaggcaatttacaaatttttgttgagtcgaatgtgctatctttttttttttttttctaattcttcagtttagaaatgaacagtgaaggttcctatttagagaatgctctaaatagttctctaaatgtgtagacctcaggacattgggaaaacctaaatcatttcaaaatgaacgtatataatattacctaaaattcattcagcaaaattaagcttcacttgtgaaaaattcatttaaaattgaagatatccatttgatacatacgtacaataccacagatgtccctcaccctagaaatgggctccgttaacacttgttaattctttggggggccgcagaattttcaggagactgccagggagtctccaaaaaaactcaggattagatggtaacagtggtgatgtgtttgaaatgttgtggcctttgagacgtagcatgagtttgtaataagatagaatatgtgtttgctatatcagacttctattatcttcccaaatgcatatggaaggtgtctcctttaccttgggacccaccaaaaacctgctgtttttacatcaaataatattaggcaaagattaggaggagaggaattttttggcctatagtgctctctgaaaatgaaagggcaggcttacaagataataaacttccaattactggaaatatttagtagagattggaaaaattcaaaaagattctatgttagaaggaatattggataaaatttgtgtaagcaaataaaatttctgcttattccagtctgcactgtagaaatagtttaggctgaattggtgaaagagaatatagcacagtatatgaacataggaacaaaactcgtaagagtcaggaatttttctttctttgttttttttttttttttgagatggagtttcactcttgtcgcccaggctggagtgccgtggcaggatctcggctcactgtaacctccgcctcctgggttcaagtgattctcctgcctcagcctcccaagtagctgggattataggcgcccgccaccacacccttgytaatttttgtatttttaggagagatggggtttcaccatgttggccacgctggtctcaaactcctgacctcrgttgatccacctacctcagcctgccaaagtgctgggattacaggcatgagccacagcgcccggctagaatttttctttattctgtgaaagtctattggtttttgtttttgtttttttatacttttaacttagtatctaagattttttctaccttttcctaaagccattttgtgtttattttattgttatatagtattcttcaggagttcagcctatagttcagttgttctttttggtacagtttgacctatatcctgtaataattcttgaatgtgtttctgtaagtggagtgacagaaggccatttctgctgttaaaatctgttgcccttggcaaaggaataaaaggatcactttgtgtgtgtgtgtgtcagtgtttactactggtgccttgtttgaatcatctccttcactgttattcattaggtcatttgtgtctttagtcattaaactttgtctcattcctcagtaagagaaagcacagtgagaccataaaagatgaaactggcacttcatttactccataatatggaattcactgcttccaaaatgaaaccaagttgattagatgaccttgataattgttgtctttttaaacgttggatcagttgccttttgtgtctcttcattttatcaccagaaggctcaagcttagtggcacacacaatttattcttggctgtgtatgttgacctttgagataatggaatattattttagggctctaatttctatctcctctatcttgggtggcattttctgtatagtaccaggcagcaccttttactttacactttaaaggaaggaatgagctacagctatgattttaagatgggagtaaaatctctgttctttccccctgtatcttatcatttagtgctatatctcatcttttctacatgaaaataattttgtatttttggacatggagccataccatttggacttcccagacctatttttatttcttaktgcagtacttgctatggaactgctgactggctatatatatttttatattttatctatggaaaagcagaattccaaatacttccagataattcatattataagagtaatttcttttgtccttgctaatattgtgttattttcttctcagtataagttttccatggtaagtctttgcaaaattgaaactgtttattacttatgggaagtccaaaaaatgagggatgactcaactttaatgcctacatgcttctcaagcacataacatttttgcctgactctttccatgcacttgaccacatgccctagaccatgattcaatagaaaggttaattgcaaggttctccaggtcattggtaacagtgaacaaggctgtaggtgaagtatttgtgtttatttcctgtgtaaatgtaaaggcatccccttgtttgattgtggacatgatgaagactctctgaatctctcaaatacctcatatgggagtgcccactaatagttgcttaatgaatactcaactatgttaaatagttttgtagcattttcagccatcacttatttactttctcatgttcaacctattagaattttatgttgacatggggcttgttctggaaacagatctgttttgaaccttatggactacaagctaattacaagttaatgtaatgtgaaaataaaaagtaggtcacttgaagtccagatgggcagtgatagacttcatctctaatccaaaatacttgtagtggataagctttctagcactattgtgtatttttttttctgtttttaaattttggtgtgaaaagataacttacggactacatttacagtaggtacaaagtaaggcctaccttttcctaataattagtccagtgggaattctacagggtttaagtagcatttcacatagattttagaattatttatatacatcctagatgagaagaaaattctagattgacagcatctgcagtatgcctcagaaatgaccatctagcctctgtttgaatgttttctttgaaaggaaggctactattaggacacaatttctgtcattcttgaacaattttaatttttagaaaacttttctttcaactgaaagataattttttgttacttcaactcgaattgctcttataatgttaactttttaatcagatcaaacatttctaattttataactgtttagataacatggctctgagatccttttttctctggcatacttatagataatctccagtttatcatggttcctcttgaaatgggatattcagaactagacactgttgttcatgatctcatagtactttttctttctctctttctttttttttttttttttttttgagacggagtttcgctctcgttgcccaggctggagtgcaatggcatgatctcagctcattgcagcctccacctcccaggtccaagcgattctcctgcctcagcctctttagtagctgggattacaggtgcctgccaccacacccagctaattttctgtatttttagtagagacggggtttcaccatgttggccaggctggtctcaaactcctgaactcagttgattcacctgcctcggcttcccaaagtactgggattacaggtgttgtgaaccaccgtgcccagcccctcatagtactttgtaagtgtattagggttctctacagagacagaactaataggatagatgtgtatataaaggagagtttattaaggagtttgactcacacaatcacaaggtgaggtcccacgataggccatctgcaaactgaggagcaaggaagctagtccaagtcccaaaacttcaaaagtggggaagccaacagtgtagtcttcagtctgtggtcaaaggtccaagagtcccaaagctgaagaacttggagtccgatgttctacggcaggaagcatccagcacgggtgagagatgtaggctgggagaataagccagtctagtctttccatgttcttctgcctgcttttattctggctgtgctggcagctgattagattgtgcccacccagattgagggtgagtctgcctttccgagtccactgactgaaatgttaatctcctttgccaacactgtcatagacacacccaggaacaataccttgcatccttcaatgcaatcaagttgacactcaaatattaaccatcacactaagggaactatatttctttccttctttttcttttctcttttttttttcgagacacagtcttgctataacgcccaggctggagtgcagtggagtgatctcggctctactgcaacgtcctccacctcctgggttcaagcgattctcttgccccagcctcctgagtagctgggactacaggtgtgtgccaccacacccggctaatttttgtatttttagtggagacagggttttaccatattggtcaggctggtcttgaactcctgacctcaggtgatctgcctgcctcagcctcccaaagtgctgggattacaggcgtgagccattgtgcccagccaggaaactgtatttctatgttatgtttttattcactctaagtttgtattaacttttacaaacatactattgatccttaattaccttgcaaataattaaaacactcatgttttctcccattaacccagaagtccctcatccattactggtgcaattaatttgtggacctggattctatgtttttacaaaaaatttcaaaaaatgaattatgactattttttacaggcaaggtctcactctgttgcctaggctggagtgcagtggcggaaagaactcctaggctcaagcgatcttcctgcctccacttctggagtagctaggactataggtgcatgccattgtgcctggataatttttttttttttcgtagaggaagagtcttgcgatgttgtcaaggctggtcttgaactcctggcctcaagccatcctcttgccttggtctcacaaaatgctaggattataggtatgaaccacagtgcctggccaattctaggtttttatgatcaagtacattaaatatcacctcgtttgttttgatcctttttactagtctgttgaaaactttttgaatcctgacaaagcaaataggggagtaccttcttaaattttatgccataagcatctcacaaaagtcctggcctaaccttctttctttaccatttaatttttccagaactaaaagattcatgatgccaagtttgtaaatactgttttaattatcaactcatgttggtaatgactaatgataacagctgtctttaaaatacagtcttctatttctcatatgttattatgaggaaggtgttagcctcattttacagataaggaaaatgaggcttagaaagattaagtaacttcatttatattttcatttgttcaataatatattcactccaaattatttactggattcctgctatgtggtaggcgcataggagtttataatcccagcacttagggaggccaaggcggatggatcatgaggtcaggagttcaagatcagcctggccaagatggtgaaaccccatctctactaaaaatacaaaaaaaattagccgggcacggtaacacgtgcctgtaatcccagctactcgggaggctgaggcagataagtgcttaaacctgggagacggaggttggagaccgaggttgcagtgagccgagatcgcgccactacacttcagctgcctgggtgacagagcaagactccgtctcaaaaaaaaaaaaaaaaaaagctagatgtgtcctctgccttgtatctcttgcaagctactgtaaaaagcactcctttacaatggagtattattcagtgctacaaagaaatgagctatcaagtgatgagaagacatggaggaaccttaaatgcatattactaaatgaaagaagccaatctgaaatgactacatattgtataattctaactgtatgacattctggaaaagggaaaactatggaggcagtaaaagatgaatggttgccgtgaaggagggagggatgaaaaggcagagcacagaggatttttagggcagtggaactactctgtgtgatatgtaatggtggatacatttgcccaaatccatagaaggtacaacacgaagaatgaactgtaaggtaaactatggacttttgtgtaataatgatgtgtgacttcaggttcatcagttttaacaaatgtaccactatagccaggatgttcatagtgggaagcttgtacatgtgaggggcagggagtatatgggagctctctgtactttctgctgagttttgctgtcaacctcatagagctctaaaaaataagttatattttaaaaagaatactcttatatagtctatatttctccccttttttggggggtgagagggtttacaaagattgagggctttatgaaataccatactaaaacttgaatgcctataacaaggtatcccttgctatacaggtctgacttagcttatcagcctgtgaaaccaagtaaaatattcttttagtgattttgtggcaaacctgattttcattgaacatttttctcaaattcccagtagcaaatggagattttgacaatggtactaaaaataggtgatattttcctgaaatcatttgataaaaatacctgtgaccatcttgctctggtgtagtcattttgtgcttcgtatagctgggcacgctgcagtacgttgtattctccactttccacgtggtagtctagtctgatgtaacaaattttcctcctcatctcttcacagcctgggactgagccacagtctggaggcaggtatgggagaaaatgatagataagatgaaaaagaggatggagggcatttaaaaaagcttctttgaaaaggtgttaagagaaagtgctagtattctgagcacttttaacttttacttcaggattctttgatgggactggaattaacctgtggtacttcctcttctgttgtttctgagaagtgatgcagttcataaatcagttctgttattaatattatattatatgctgaaacatttcataagtcagtgggaaatctttctaaaacgtattccatatttaccttcataattgaagtatattggatttatcctctcacagaactcgggaccaccatgatggtcattcagtattatatcttctgctaatatgtacacacattcaggagcttgtctatggataggaatttttttctctacacaaaatggccccagactgttagctgtatgtttaaaaaatatatttaatttgtttctttcataattcacctgccaggtattacttttgctatttatatgagtactctgctaggcttttgcccatttcctgatttgttaaatctaatttgctatggaattaaaaatcaaagtgtttagcttgttagtatttctaagtgttagtagacaattattagcatagatgttttctttaactcaaagaaggacaggtaaaaatctacagttagggaatataaaattaatttaggatttggacctctttctaatccttagttcagatgttggtggtcattgattatttttacagaaaaaccccaggtaaccctgttcttgagaaagggaatggatagatattattttattcttgtgttctagtcctaaatctcttctgtacttctctctaccctctgttcaccccctccaccacaaaaaaaataaagacagacaggaagaataatgtgtattaagtccttgttgctggccattattctattttttttttttttttttgagacggagtctcgctctatcacccatgctagagtgcagtggtgcaatttcgactctttgcaacctccgcttcccaggttcaagtgattcttgtgcctcagcctctcaagtagctggaattgcaggcgtccaccaccaggcccagctaatttttgtatttttartagagacggggtttcaccatgttggccagcctggtctcaaactgctgacttcaagtgatccaccctcctcggcctcccaaagtgctgggattataggcctgggccaccgcgcctggcctattccatttcttaaataacaaatgttttgtatggatcttataatgtatgttatagagacttggactttgaagaaagggaacacaatactttacccaacagcataaacagaccatcagccctctttggctgatgtggtttggtggtcaggctaatcagaatgggaccttgatatgctaataaaaatttacaccattcattataataatttggttcaggattattctctgttctcttacctactgaagtatctggcacttagcatgtgctcagtaaaaatgtgtttcaataaatagaaatgaaatgcaatttaggctgttctgatgaaaattaatttatatcacgtcaatatatgcagaagaggtatgatgccaatatttcatgtaagaaaaagatacagaagttaataggaattatatgcctgtaacatttagtaaaattaaatggcctgagaaattgctgtttagtaggatgttagaaataaatgctgtagatgtgatgatttgtaattatggaaattagtatttgaattttaagctttctagttaagtaagggggaggctaattttccatgggagtattttcaggaaaatcatctattaaaaatatacataggcctggcacagtggctcacgtctgtaatcccagcactttgggagtccaaggcaggcagatcacctgaggccaggagttcgagatgagcttggccaacatggtgaaaccccgtatctactaaaattataaaaactagctgggcgtggtggcgcgtgcctgttatcccagctacttgggagcctgaggcaggggaatcacttgaacccggaagttggaggttgcagtgatccgagatcgtgccacggcattccagtctgagtgacaaaacaagactctgactcaaaaaaaaagaaaaaaaaaaaagacatacgagcagatcagaagacactgtatgttttattgtgattcagctcttccttccacagaagaggtgataaactaagaggacttccttaaattgattccaagttgacatccacagtaagttttatttgaaaaaacattttttgaactatgggtaccactggaaatacaaagtatttataacaggacaaaaactgttgggaatgtgagatggggtatctgatgtttttattttcctgctgaacatgaatgggagagcatgcaggacttccagattcagtcagccacaggagtggagaggataagccagtacagggccaagagacacaggggaacaatgaggctgttcgtaaaattgctttagtttctcaattcaaccaagttttccttgtcactggagcttccttttctgcttttcacgtattttataggtaattgcttccttttctaatcccttctcttgtaggcagtacgtctattatttccacaatgtggtagggtgatggaaaaacaccctatcataatgtaaaataaaaaatctctcccaaatatgtgtatgtatttacatatgccatataaacataattattgaaataatcaaatgggatactttgtcgaagatttaactttaagaaacaaattttcctgtggtaagaaatggctttttctatttttgtgaggtttgacagttttgttacttttcctttatgtcttctcagtgtgttcactctgtgatagggaaagcacacacacacacacacacacacactctcacacagtgtcagattgctggagattaactgagttccttcaataccagtgaaagagagagtacacaaattattgcgaatggaaagttttaccatagcttcaaaaacttatttcagaatgatggttgtagtaaattaaggggaaacagcaggtgatgctagacttggataaatttatacatatcaagctgatttcccaacttcatttttaaaaaagaatatttaagtaaacttactaatcttattccaaaatatagtttaaatatcttttcatccagtgaaataaattggtaaaggagcacatatttctttgtggtttgagctttgacaacagtatgtatatcyggtactcatcctggtgtatctttccttcttatggygagtttagattaaaagggcagttaccatatagaggggtatgtgggagcatactgatgtgtggtgttcctaggttagaacccaygaataccatgttgatattccaataatggcttcactatatgtgtagtcttttgatttttaactttatgctactttttcatcttttatactccatgcctctgaagatttttcttgttccctgctaagtttagagtccaaagtataattttaatggtgtgcttaaaaaaaagatatttttaattttgcatttcattttgaatcatctactcacataaaaggacttgcagagatggagagcctcaattatgttcataagtaattatgcagcaacatttgcttcaaatcattacacatcttcagtgggggtagaaagtctttcttaattactggctggactgatttttttcccctcttgttgaatgtatgtggtctccctgatgagctatttgaaattctgtgtgacatgagtatgtagcagtcactcttgctaactgaagattggaatgtcctattggtaaacaaatctgtgagaacctttccagcccaatgcctggagccctatccatatttatgaaatattagtgtctgaaatttgttattgttttctctgaaaatttacttattagatcaacacattaaatcataaattttatgtatctattttttaaagcttgagtacattttagagagctctgatgctcttattttactgattggaaggtaatgaggataaatgatttgcaccaagtatttcttaaaattgctgttattttgacttgaatctggctccctataattttattatgtggagaaattgtaatatgggtaggtctaatataaataaatcatcataaggaatacaaggagtaagatgtacaacaaagacattgaaagttagctaactatgatatctgaattaagtaactatagtaagctggttttgttttgtgtagagttcaaaacctcaaaggtgcaatacctactttttccctctctcatgtaagtggaacaagagaaaagtaagtcacatcaaccaagcacctactccttgacaagcagttgaggaaaattggacttgaagaagttaaggaaatgacctgagttcatgcaattagtaggggcccaagctaagacaggactcattcttgccggcattcaagacttttattgttctttgcatcaaattattacggcttaagtggggaacatctctacaagttctgtgagtttgaataacccaggttaaattgtatcctagtatattgtgaaagagtagatcgaagatctagagttttaaagaagcttcttatgggccaggatcagctagtaatgatgtctgtgctcagtataaggatgaacatcttctttcttttttcttttcttttcttttctttcttttattttctttctttctttctctctttctttctttctcaggagctctgtctgctgcccaggctggaatgtggtggcatgatcagggctcactgcagcagccttgacctctcaggctcaagtgatcctcccacttcagcctcccaagttgttcggactatggatgcctgccaccatgtccagcttatttttttttctttttcttttttcgttttcttttttttttttcttttgagacagagtcttgctctgtcgcctgagctggagtgcagtggcacgatctcggctcactgcaacctccgcctccccggtttaaacaattctcctgtctccgcctcctgagtagctggaattacaggcatgcgccaccatgcccagctaatttttgtatttttagtagagactgggtttcacggtattggtcaggctgttctcgaattcctgacctcaggtgatccacccgccttggcctcccaatgtactgggattacaggagtgagctaccgtgcctggcccttttgctttttctttggcttttttttttttttttttttctgaggcagtctcactctgtcacccaggctggagtacagtggcgtgatctcggctcactgcaacctctgcctcctgggttcaagcaattatcctgcctcatccttccgattagctggaaccacatgcatgtaccaccattcccggctatgtagagatggggtttcgccaggtgggccagactggtcttgaactcctggcctcaagcgatctgcccacctcagtcccccaaagtgctgggattacaggcatgagccactgtactcagccaggatgaacatttgaaatgctcttagttctgtatggccttcatatactcttgaaagagatattctttgtaaaatagtcaaatagttaagcctttcatatgagtgatagactttgctaggttgtttagaggaaaagaaacatcataaaaggtttctgtccttaaaattttttaaattaattggggcatactgttagcactcatactgttagcacttggaccatacacatagtacccaaatattactaaattgggtcatgcacagcacagattataggtgtatgacttaaaggaaaaacctatttcaatattaatgtaataaaaggaaattcaggaactaattattttcaggggcaataacttggaaatttatgtattgcttaatatagtgattaaaatacaagcagaagtgttatttactgaaaagtagtagtgctcttagtacccttaaaacgaaaatggaaaaggtaatttgacactgttatagaactgaattataataatgtgagtattttgactaataaagtgtttaatgtgcagactgaaataactaatgatgtttttctagtaggtagcagcattgtccatgttaggcagtaagtcttaaaacacttttaatttcctgagtacactaaggttttatcagtcacctttagttttgttttgttttgtttacaagtgaggaatcagaaacataattgatttacaaagcttttcagagtcctcacaaaaatttataattggaactaaacctacttcctagtgcttgagttactttcatggtaacactgtagaaacacagagtactgaaatttgaagaggattcgaaatcagttgtccttacctctctataattttatagacaaagcaaggtcttttcttacacagcttgtgagtagcaaatccaggattatctgttaaggttttgtttgaatttttgtttttagagtggcttttcgttttcatttaaaagagaatttacaccatccaaattgttggtttttgtgaatatcttaaaaatatttacagtgaagagatcattgactttaagaaaagaggcatcaaagtaatcccacctctatgatagatactagtaccaataaacatgctattagctaattttggcaaatgtcacccttgattaatccatattactgtaaaaagttatatgtatacaatgtaatgctgtttatatatcatcattcttgctgtgataggtgctataagggtaaaccaaggagacctcatctactcataaatgtcagagggcttctgaagtcaacctgaagctaaactttgaaggaggagagagggagtcaactaggtgaaggtgggtggggttgataggcaaggattagctttagagggtttttacaaaggtacagagggaggtaagagctccttagccttgtggggaaagataaaagtcctgtgtggctggaggtttgatattatgggaaatgtagtctcagatatagccagaaaggtgagcagaggccagataatcctgaactatgtagagaatattaaaggttttcctttttgtcccaagagcaacgggatgcacttaaaaaccttttaaagaatggaattacaagatgagatttgccagtgccctgagaaagcaagcttacgtttttttttctttaaggggaatttgtttggattttaaatgttaaatgcaaaattggaaaatttgaaatggcattttcacaaattaaactgcattgtctcaaattgaattctattgtgtttttataattgtacctttgtgtttctgcccagcatagtagcccttaaaatgttaattgatcctcgaacaaatccttagtccttccttagcccactctcggtgtctctgcaatgcaggtgtagctgttttagggccccattggtgcacattgtatcttgctgtttagtgtgagaatagtttattggtgatactgacactagtttacagatagctagatacaatattagtagaacatcagatatcagtggagttttccctgcagagcaatatgtcctagaagcctttttttcttacaatgacaccttaccatgtcctaatggtatcttgaagatacactgtatgtcttcagttttaattgtttttctgtttagtgtatttggaagaccaagcaatagctgttagttttatgcgttaaaaatacatatgaagtaaaatattataaacaatctaaatgtcagggcaatggattatggaatcttcattcattggaatactctatagtagttaatgaaaaagttacataaatatagataaatcttagaaacctattgaataaaaatgcaagtttcagaatgctgcttagcttaagatatatttcagttaagttttaaatgtataccaaacaataccatatattttacatggaaaaatatttaagtagtaaaaatatgaaatcacagggtagatagtccatatcaacttcaagaaggtggtaacttctgcaagggaaggcgagggaatagatttagaggtaggttaaaacaatattctgtctcacttctaaaagagaaaacatggttgaaataagtaacaggaaaatggatatttgttctgggtgataggaggtgtatgagaaatatcaaataagtttaacaaaacccaggatattgccattgctttgactttgatggcaaatgacagctaaaaatggtttaaactataataaggttactatatatctagagaaaggtggccttctgccttctggtttgaccacctaaccatgataccatgagcttctcctgtgcatcagcagtttctctcctatttttaaggtggctgcaactgcaaacatcaaattctcaaagcaggtcacccaaaatgggaaggggaaagaatgagagcccttttttctgttattggtkggaaagtattttgcaaaagagtacattatgtctcattgatcagagcttcagagcatgggccaactctaattataacatacggcctggcagatcataagtagtaaataaatatttgttgaatgagtctgtctttagcaaaggggaatgggattgccatgattgttttgggaggtttcttcttgtgggtgatcttcatcttcaggccaaactctttgttgatgctgttgtatttttcctgaaattgtctctaatacttagggtggaaatcagattattggtggtggtggtggtggtgttttaaaaaagagctcagaaattattaatctcaatcctttaatttttcccatatgggaaagtagatgttcaaacaggtcgtggcactgctgacactggaactctgtccttgatttctgctccagggctggctctgtgtatgtacattccttttcaaagactacagaaaaatcaccaatgcagtgaatctccttcaggatcgtacgaagaacttttgatgaggccgaaaaatgtgctaagaaaaggttttgagtagtatagaagtcttctttgcattccttagcattatgtcgctgactaaaaccggactcatggctaggtcttgccttcacagttgatagaaagtgggttatacagaacgttttatctgtgaaatagccaaccattaccattttgaagtgatctgaagatctgtatgagcttctcaggctagacagccaggttaataaccatttcttttcacggactcaaacatgctaggtttctctgattattttcttttcctggccttctagctgaattcatttggctgtgaagttaaaaaaaaaatctttaaaatataactctgcaagctagtggttacatagtaagatttcttgctaaacttgcttcctcattctcccttcccttccacagctagactttatgtacaagttttttttttttttgacgcaaagttcctgtttttaattatgtgtgtaatttcttaaataaaaggaaacttatagtatacattttcagactgaataaatattatactattgtacactgtttcatcaagtaattatattgtaaatcagtatctgagtgaggagcatggggtacctctatattttgtcctgtgtaataatttgtcctgcattattgtctggagtgtatcttccataattcaaaaaaatttctttgcaaagcagtggtgacgttttattaaactcattaatttataaggcttagccaaaaaacaaacactgaaaggcacaaatcttcactacaaataaattatgtgccagtggcgactactaattcaaagcagcttttgaattttagcagaaagttctaaacttctctgaattatacccttaacttaatttgtcatcccaagaaatagcttttttaaaaggaggaaaaagggacggaagacaaagggaaatgtaaaatagattagtcttgggaagcaaatattttagatccagttttgcagtcccagttccctgttggtcccacttcccgtggaaatttaatgtaaaacttaggccatgcccatggaaggcaccatgcaagagatttagtactaccccagttctatccaagatggtgtcagactagcacaaaaatcagtctaattgtagttaggcatggctgctttctctcagtggagagtttctttctccctatgcatttttgtcgtcttttccaaaatgtcaataaactttatggagtagaacatctaatgttgccatatattctggagtgttttttaatgacaaagttgtttattttttaaggtagcaagatggaaaatattttgttttaccgtagcataataaaccaataaaaccagctggacaaacatttatcaactaaagtaggtgctaaagccaggcgagaatcccagtatgaagcttgatcaagtgttaagagccttattgcagtttatggcagaaattttcagaattacttgtgaggctacaaagaagtatcaactaaaactaagtcaaataaaaaaacttctatgttttaaaatttcagcagtttgggctctgacaagtctatgctcttgaggttctttcttgaagagattgtggaagaaaagcaattaaacatatctatttctttttctcaaaatgctttattcattcagttgattcatgctcacaaaatgtgtagtatattgccaaacaactctgcaaggaaaacaaaaatcctaaataaatctgccaaatatacagctgttaatctgttagctaattggaatattgacaaattcagtaatgcattcaagattttttagctcagctttaagaaactataatgctgaccagagctctgtcttgacactcaaggctgttatccattacatgaataattggtttccaaaacgtgaggcaaatatagccaagtaagtaggaggactggggaatgtttttccatggtcttctcttaaacaaaacaaataaacatagcaatacaagaactgtaccaacagatgataattacccagtagatctctttaaaatgattttcaaaacttagagatctgagaaaaaatatctaatttaaaaacttgtggactttggtaattaagaagttataactgtttaaagtgtggcatgtgtgctgttgattttaagggatgtacatgtaaccattttaatatttaagaattactactagaaatataattagcatgtcagattgcccatggatattattgctaagaacaaggcaaaacatattaacaataaggaagcaaaaatgagacaacttacaggaagacattaattagtaatacaattgttacatgaatgtggcagatatcatggacgttctatatggatgactagtatttgggaaacactggattgtgattatccgtcttagaggtgctgtcctacagagagagaaaaaggttgaatcttaagagttaagtgcccttgaaatttgtctattgtagcccttgtaactctataacctctgtttgtgaatatccagtaatggagaattcgctaagttccgacttggcagcctccatcatcagatatatctcacagctatagttccttcaacatctagcttttagtaattcccacatctcagtcttacctaatgataggcaatgataggtacagagtaatcgctctttgctggatggaattttagttatttaaagacatttatcatcctcctttttccaagtcaccgtttactggataaatgagcctctctccttcagtaattctcaaaatgacatgattccaaagtgtccgtgtcatcttggttgctattttgaatgcctccttattttaaggtatctttcccaacagttccctaatcttggatgatttacttaatcattctgcaaagaaggatagtaatttaattccacaaacactatgagatggtgaacttgagttcttctgttataaattatgtcacataagctgtaattcatagatatttatcatcattttattatttttttttttgagatgcaatcttgccctgtcgcccaggctggagtgcggtggtgctatctcggcccactgcaacctctgtctcccgagttcaaacaattttcctgcttcagcctcctgagtgtgcaccaccatgcccagctaatttttgtatttttagtagagctagggtgttgccatgtcacccaggctggtctcaaacccctgagctcagattgattccctcaccttggcctcccaaagtgcagggattacaggcatgagccaccacacctggcctattgtcatcattttaactcgtagctattatcactattagtcctgattattatgtgtgccaaatataatacataacaatactgagaaaatactttaagggtataatatctaattgtagacactatagctttttgattatctattgtatttgttttcattgatgtctaaatttgcactgtattttgttgttgttcttggtgacatctcactgactcattgactcttcctttctcctaaaatgtcccagtatttttccatgcaaatgctgctgactcacatcttcctatcctgtagctgctagatttggatccaattttaggtcttaggatttaatcctattcctattaaacttagctttgtttaacttcagttggtcatttaattctttcaggatctttttggatactggaccctgttaacctaatcattcctccctgcttagaatagaatcaacatttttttcttaaattaggcgttctttgcaatctgatttttatttacctgattatgaatgtgatgcatactccctatggaaattatcggtcacttgttggagttctattggagacacaatatttaggcagttcgcattgatatggacattgcagttggtaaatcgctgttgctccctgccccttgagacttccctcttccttgacccccttatgcccccacttgacgtcacataaacctccgcatggtccagcttatggaagtttaatgctgcacatagcagaggccctgtaaagcccttctccagtgctgtggccagtacccattctctactagttgttaatattttgaatatcacccctgggtataacattatatgagtaaaatacagtgtctgtggggctctaacaccatgtttcatgttttcctttgataatctagcaaaaaataagaaatagcagtaatttttatttacttatatgcatacataaaatagttgaaacttcgtaatgcctctggagaatggaatagcttgtatgcttgtatatgttagtcaggaaatgattttgataacccttttaatgggcttggttaagcctagctaagtgagacacttagtggccttccaaagatatccacatccttatcctcagcacctgtggatgtgctaacttacatgacaaaagcaacttacagatatgattgaattaagaaccttaaaattgaatattatcctggattatctggttggacccagtgcattcacaaagatccttataagggaaagaaggaggctggagagtcagggtcaaaggaggagatgggacaagggaagtcgtggttggaatgatgtaatcaatttctggcttttaagatggaaaaatgggccctgagtgaagggatgcatgtggcctctataagccggaaaaggcaaggaactagattctcccctagagcctccggaaggaatacagtcctgctgatgccttgattttagaccactgaaacccattttggacttatgacctccagaatagaaatataataaatttgtgtttgtttatcactaagtggatggtaattcattacagtaacaataggaaactaacacagatcaatatccattttggggattgtaatttagcccctttgctaataattaaaattatctagctttcattcttttaacaataactacaactaacaggatagaaaaaaaaaacaaaagacaatttgaccagccttcattccttcatcactgctgagacaggaaggtttaggactttgtgtagtaggttgttctttctcccaagcctactcaaaatattttactgctagtctgccatcacttttttccttttcatcctcgaattcatttagtttctaattagtaaagtatgtatattagtcatcagggacaaaataagaccatgttagattaaaaatggaagtccagttttcagaatgacattttgacaaaaactgaagcctattcttggagcctctcattgagatatgatttggacatatggtccactttgtcataacagcagcttttgttcttaacatgaattatactagaagctggcttagcatgggtttaaccatctactgcggaccagttgatgcaaaacaattactaaggctgaagttcaggaaataagattggatttacaaattaaatgatttgattcaataaatgtgtacaatggctgggcatggtgacgcacatctgtagtcccggatacttgggaggctgaggctggatgatccctggagcccaggcattcaaatctagcctgggtaacataatgagaccctgtctctaaaaacaaaacaaaaaaaaggttacgatgatgacctctcaggagacttaaaatattcaattaactgtctgtcatcccagagttgaattctgaatgtagaaaaattacaaagattaatttggcattattgtaattgtctgtttttgaagttgctatttaaagactgtaaaggcttttggtcgatagaaaagtcaataaatgcagactgctccatggtgaaatctcttccattccgacagctttccagtatgttgcactaattttgcatcatttaaaccttttaaatatcagtagctgccaaagaaatggaccaaggggaattgactaaaacaaagttgtgctgctttattgtgtattattcttttaggattatctattttattattttaaatcagtaaattatacatgggggcaaatggcttccctagtacagggatctcatgtttggagattatagagtaacagaagcagcactagaacagtagttcgaagatgcaattttttcataattttgctacttgctgtgaaatcttggttgaaaatctttatttacatcacaaaaagatgggagaaagcatttgtgagaacacataatgtatataaaaaatacttggaaatctagaaagttcttcacatacattaagtaatggtagttgtcctacaaacttccctatccttcttctcccctcccttagccatttttggggtccagatgggatcacaagataaggcaggctggtgcaaccagtgctcacttattgtggggacagcatcagtgtcatgtcatcaacaccctgtgacaactgtggctttgttattctgatgttgaattactctcctatcatttccctccctcaaaatgactaatgcaccataatcaatgtaaaaacagtgttagtcccagaatagttgtttgtgagcataatgaagataatgaaactcttgttttgcttgaaagttaggcttttagttgagtgcactccctaccatgatgatcgttttcagcatgtggagcccattaagcagtgttggagctggattcacagtttaatgtgctaacactgcatctgtttctaccctgatgataacccctggatcagtttataacttatgtagaagttcaagatgtggtgtagttaatttctaaaacaactgttgatctttatatgtgtgaaccccctggtcttttacattccagatgaatccattgccatttgaatatgtttatacctgtatgtgctttcagagtgggaagtaaaaacacatgtcccctctaggggctttattttcacttaaattcttctgcagggtgacagtgatgagcttattaatattttttcttgtttttttttttttttgagatgagtaggacgatggctttatggtgtacttttgtaacctttattaaatcttcatctaaaatgaattgctgatggatgatttccttcctgctttgtcaaaacacatgcatattctcagtccaagccatttatgatgccataagtaagttattgattcctcttgggagctgtgaaatgcctgggcattaaaaattaaagaaaggtgattctgttactgaggctgcatgccttatctctgtggctagctaaaagcagagtgccagttcactggagctttgaaaaatgacttttcccaatgacctgctgccttttaaagacagcagagtttggagttcctttttaaagtggtaaatgcgcttagagagttgtactacagttttattcccattagaaagattgaacttctccccaggatgccctcagaggggaaaccattagaagacaggaccactataacatttggtcatcctattctgttattctccccaaggcaacttttaatgtttttcaatgtgagaatctatctattctgagtagagtgaccatagtaaagtgcatgacattcccttttttccacaggtgatcagatttctgatcctagactcttctaggttgtattttaggccatcataaattatagccaatttactccccacctgtgtagggctgacttatatgaagggtgtaaagagggcactttcaagtattatgttgacctttatttttattaacaaagatacaagaggtttcacattgtcctgttgtttagaagtggccatctttaaaaacataataaagtgtgtaattggaaatgcctggctagttcttttcctaatttgtgcaagaaaaaataggcagaagacattatggttgttttattagaatcgattatctttagtcaagaagatgtacccaaggtcagcttctttggtagtgtgcaactgtcatccttctgatgagtctgcttcccaaaatatcttaattaggctgtgaacagtgatataagtcctgtaacttctttttattttatgctttttgatcacctcacttaaccttgctgtcatccatctttccagctgagtttggctgctgtgaacatcattcttgtgctcttagattggctattgggcttaatttatgattaatgcaagcaaaatttcacatgggtgcagcgtgggagagaggagcaaagtcctagagaatatgcaaagaggaaagataaatgataccagtaactgcatgctatatataggggtattgaccaacatttcaggaaaaagtgctcgcctacagcatccaggaaggcgaggcaggtgaatcactgtaactgaagcagtcatttgtgaagcccctactgtgcgtcatgcactgtgctttggagttaacctagttaccttatttactgttcaccataaacaacattttttagatgaaaacttgaatcctaacagctagtaagtccaagaggaatgatttcaatcaaaatttggcaaactctaaagtgtgtgtgtatgtgtgtttaacacagtgtggatttggggagttgcttcagataagagatgaatgtagacttttgttttcttcacatattggagtaaaaagttagattggttgttcttagatttctctgaataccatcttccattcttatgtttaaattttacttgttcattttatgccttgtgaatttatttaattagcacggttacttgtacatagaaaaaatattattttattggcagtggccagggtgacagaaattatgtttattgtgatggtcacgattgaataaaaatgatctcatggtcctggttttgggatttctagtctttgcagaggttatctgatgtagtagtcatagacatggagagctaaaaaggcactgcgcgtatacacctgttccaagtatatgaatttggggtcagcaaaaggctaaactataccatcacttgagattttacttttgttttgttccggtttgttttgtttttctttgaggtggagtcttgctctgtagcccaggctggagtacagtggcgtgatcttggctcacttcagcctccacattccaggttcaagcaattctcctgccttatcctcctgagtagccgggattacaggtgcctgccaccatgcctgactaatttttgtatttttagtagagacgggatttcactatgttggccaggctggtctcaaacacctgacctcaggtgatccacccacctcagcctcccaaaatgctaggattacaggtatgagccactacacctggccaagattttactgttcttaaagggacatgttagtgcttcataatttatctgttcataactgagatctgaaaaagctgatagttttcacataacatttatcatatatgtgtatatatcaagtgcctgctatgtgatttatttaaagggctacagaataaaacgtgttagagctccctgaaatctaatttatttcttgattattaaagtttggtcaagaaatgatataaagattagaaagtactacagtatatattaggatgtcagtaaattttaatgctagagttaatatctctctttctcccctcattcttggatgaaatatctcttgccttccatgacaaattagagttgctggtggtttgcagaccaaatgtttgggtactttgtgtaagctcatctgtgttatttttaaattagagtgttttcctccttgcctatctgtttttcatcagcgctcgcatatccgtgtgtccgaaaaaactctgatttagctgtgaggctgattttaatgtagggatgtctgtgtaccctgtcatcactggcagccctggtgaaacttcccatgtttcgcatgtgtgttgctacaatatgttcaaagtctgatctttctcagatgtatgtgtgtgtgtataactattttatagctgaaaagggatgcaggcagcaaagtctctgccagaatatgttttctatttaaattttgtaatatgaaattataggttagcgtttggctctcataaagctgccttttccacccgtcactgcaagacaagtaacaccttcttttgactcaagttttccaagattccttagtgttaaaagaagactttctttttgaaatgcagaaattaaaagaatatggtacaaaagtgttttttatagctttattgagtcttgagggcagatatatggattccagacaaaatgcaataatagactgggattttactttcaaatcgtcttgcaaacacttctcactggagatttattgtacatgtggaggaacacaggctgctttgaaggttaaatggagtagtttggagaacggtgttcaagtcctttctgcctcttattaagtgtatgcacttctttaattaacttaacccctccaacttcagttttctagtttgtagcattattgaagataaattgagataatatgtgtgctttgtaaactttgtcaatctcaatgtaaatatgatgtgacactagtgttttattgtgtctgtttagttagcattagtgccttgttgttgtattggccccattgagtgattcaaatttttttttcctctggtagagaatctagacaaattctgtcagaactgagaataagatacctcttaaaaccctatttacaatcacaaagcagttcaacgagtcatcaaaaacagcagcagacatagtatatattgtagaaatatggcttgtacgtgaaatgtagttttcctgaaactgaaagataaacagtatatagcatatgtaataatatggtactgtctctatggtatagtagggcttattatttttctagggctgccgtaacagaccaccacagactgggtagcataaacaatggaatcttatgttctcacagttctagactttagaaatcaagatcatggtgtcagcaggtttggtttctcctgtggcctcactccttggcttgcagatggccacattcttgctgtgtcctagcatggtctttcttttctcatgtgcatttctgatgtctctgtgtgtgtccaaattttttttcttggacaccagtcatgttggattaggacccacccgaaatgcctcattttaacttaaccacctctttaaagatcctatctacaaatacagtcacattctgaggtactggagattaggacttcaacatatgaatttgggggtggcaaggcaggacatggcacagtgtgtgtggcacataacagggagagcagtagacaaagagcagtgacaaagttaaattcttgtatgtgcagctctgatctttactgaccctaatagtctcgagtaggactcttaatttctttctttctttttttttgtctcgcagtagcacaatctcggctcactgcaatctctgcctcccgggttcaagcgattctcctgtctcagcttcccaagtagccaggattacaggtgcccgccaccacgcccagctaatttttctatttttagtagagacggggtttcaccatgttggccaggctggtctcgaactcctgacttcaagtgatctgcctgccctgacctcccaaagtgctgggattacaggcgtgagccaccatgcccagcaggactcttactttccagtgtccacatccatatccacttactcacagagtcatgatgaggcttgaagaagatcatgaacctgagtacattttgtaaaatgtaaaaaggtgatacaaatacaaggtagtattataacaggaatacctgtgagggatagattggcaacatgtagaatattttaagtatgaaagggtaaggattattgcaaacatttgtgtaaaataagcttcttggctattctgtatggctgcaggagttctgggtaaagaaaggtgatttgggccgggtgtggtggctcacacctgtaatcccagcactttgggagtccggggcgggtggatcacttgaggtctggagttcaagaccagtctggccaacatggtgaaaccccgtctctactaaaaatacaaaaattagacgggtctggtggcaggcgcctgcagtgccagctacttggtaggctgatgtacgagaatcacttgaacccaggaggcggaggatgcagtgagccatgatcacaccactgcactccagcctgggcgacagagtgagactcggtcttgggaggacaaaaaagttgatttggttaagactcaattcagagaagacaggagtattaggtgagcagataagctaaacatctggataatgcatcatgaatgtctttccactcccaagacttcgtttcctagagcctgttagtttctccctttaaaactttttccccttttactttcctggtctggtagttttcaggctgaggagtcagtggattcacaatcagtgttcatagccagagggtacttttcctatttaccctaggtgaagattatgaccccacaggatgtgaatttttttaaagtaatacttgaatagttagaggaaaattgccatgtactttatctgttctgaaatgtgtacagcacatgcgtaaaggcaagtattttaactgggtgtattcttagcttgccatgcctgcatccttagagagtatatttggataatcaaatccctaggcacaaagattataccttttgttctgcaaaagcacatagaccaagaccatgcacaaaataggtgttattggaatctgatggttatagttacgttctctcttttagaatctagtgttccagccgggcgcagtggctcaagcctgtaatcccagcactttgggtggccgaggcgagcagatcacgaagtcaggagatcgagaccatcctggctaacacagaggaaccccgtctctactaaaaaatacaaaaagttagctgcgcttggtggcgggcgcctgtagtcccagctgctcgggagactgaggcaggagaatggcgggaacccaggaggcggagcttgcagtgagccgagatcgcatcactgcactccagcctgggcgatagagtgagactccgtctcaaaaaaaaaaaagaatctagtgttccatagagctcattcatttttgaaagcatcgaacttcattaaaaaaagtataatctcgtattcattccatcccttgaagtcaaacagtaatcatgtttttaatatagaaaaactgtaaggggccgggtgcggtggctcacacctgtaatcccagcactttgggaggccgaggtgggcggatcacttgaggtcaggagttcaagaccagcctggccaacatggtgaaaccccatttctactaaaaatacaacaaattagctgggcgtagtggcgggcgcctgtaatcctagctacttgggaggctgagacaggagaatcgcttgaacctgggagacagaggttgcagtgagccgagatcgtgccactgctctccagcctgggtgacagagcgtgactgtctcaaaaaaaaaaaaaaaaaaaaaaawatatatatatatatatatatatattgaactagtcacacattgcaacataccacaaataccacaaatcctcaagaccttattgtaggggaaacatagtattagatgtaaaaattttgaaaatgaactttttaatgtagctatgagttgatgaaaacctacaaaatcaaaattcataaattatgtaaacaaatggactaaagtggttcatgtatagtacctgatttaacttttaggtgtgagaaagccttacagtatcccttctagttgtttctaatttcaaatctggaaaattagaaacaagttattttcattaagcttttaaattgaaactctgatacagtatagtacggtgagaaggaggtgaggtgtactgaattatgttaggatgttctgatatggatatagtgaccaactgattatgtgcaaaatatttatactgtttttcatcatgcaaattgcaagtctgtgaaaagtagctcaagttgtttcactcattattttaatcagtgaaagtgcttagagtgtggtatttctcatattttcatgttgtattagtttttgctttaattttgcaaaatgcttttcatataacatttaaaaacatctctaggtaactcaagttttaattatacgtgataaacattcttttaaatggtttattagttttcagggtcacagtgttttttgtgtttgttttttttttttttgatatttcctgtagaaattgtgaaaatgacagcattgctttatcgggggaactaaagatatttttaaaaatatttagccaacattctacttcctcattttctcctactaagaggaaagagtgccagtgccatggctcacgcctgtaatcccagcactttgggaggccgaggcaggcagatcacttgaggtcaggagttcgagaccagcctggccaacatggtgaaaccccatctctactaaaaatacaaaaattagccagcattgtggcgcacacgtatagtcccagctacttgggaggctgaggcaggagaatcgcttgaacccaggaggcggaggttgcagtgagctgagatcatgtgactgcactccagcctgggcaacagaacgagactctgtctttttttwaaaaaaaacgaaaaacaggaaagattgtctaggtaaacttcttgacttgagatgagaaggagcttcctcatcatccatggaagctctatgaaggcaaatctccaacatcttgggggctgagtttagctgcagctggggccatttttaatcacaagttgacttttcttttttcttaggggcctagggttagggaggtatatcttgctgtgcagatatagctcataaaattcctttattgcttatcggaaaaactcgtaaagggatggaagcgggatccactaagaatattcctgtagttggaagacttagcattcgtagaattttctcaaaaccagcagttattcggggtcgctgaccattgggtgtctgacaacaggctctttaataacttcctgtattctcttttcattcaacatatgtgtggtaacaatttattaagtgccagcatttattaatgcttacaaagttgtcatttttgtccatgaaagttttacaatctagtaggaagagatcaagataaaaacaagcaaatttggaaaagtgttaccagtgtaatgataaacgcttgtccaaagcgtagtgccttcctttaccctagggacctagaaacctaacactgcccctaacaacccagcaccccacactgtaatttatttgccctaccttaatttcatacaggaatctgaaatacagtgctcatccccaaagtaagatgagctttagatgcatagtatttctctcattctcttaccctattagccaagtatttgcatattaactggagctttctaaatataatggcttatccctaaagaggtactctaatgaagggattataggttaagtggcaaatgagtgccaaagacatgtggctaagccagttaacctggtggtttttcacagttaattatcattgagtgagtagaggttagtggcctgagtgaaccacttttagatgaaagtgataattccctacatacttaaaacaatctagaattttccaaaacggtaaatgcagtttatcagtaccaatcatctctaattagaatttaatttattaacccagcaatcccattactgggtatatacccaaaggattataaatcatgctgctataaagacacatgcacacgtatgtttattgtggcactattcacaatagcaaagacttggaaccaacccaaatgcccatcagtgataaactggattaagaaaatgtggcacatatacaccatggaatactatgcagccataacaaaggatgaattcatgtcctttgcagggacatggatgaagctggaaaccatcattctcagcaaactatcgcaaggacagaaaaccaaataccgcatgttcttactcataggtgggaattgaacaatgagatcacttggacacagggcagggaacattacacacgggggcctgtcagggggtgtgggacttgggggagggatagcattaggagaaatacctaatgtaaatgaggagttgatgggtgcagcaaaccaacatggcacatgtatacctatgtatcaagcctgcacgttgtgcacatgtaccctagaacttaaagtataataataattttaaaaaagaatttagtttattagatacatattgagtactatgtatgttaggctccaaaagataaataagatgccttttcaacttctaaggagttagcaatatattggggagatgaagtttcaagacaataaatgaatcaaacctgaagatcattgagagattcatgtccagccaaattcctgtccatcccatgaagaagaatcatacatgacagagtaatgccagttattcctgctgctccatccctcaagcttcattccatccatacttaactgtattttcagatatcagacttgccatgctctctcctgtcccagagtctttgaaaatattgactgttggcctggaagtatcgccacagtttcctttctccttcattgaactttttacatgtatgcagatatgctttcctcctggaaacttttgaccctctaagacattgggcatctgttttgtgttctcccataccagtcattatttgtattagatagtatttatcatactacagggaaactccttgtacatttatttgccttgtctacttggctgaatatttaatgtcaggggctctattttgctcatcattccattttcagtgttcttcacagtgccttgcttataaatgaatgaatgaataaaggaatgagtgagtgattttctctggacagacattccattttattgggcaatgattttcaatagagacagaagagggaatgttaagatcacctgtgtgctattttcaaagcatacatttcttcccactcctgaaatatctcccatatatcatcccatttaagatccctgatatttgtagcaagcagtcagtgttgttaatgggaatgtgtcaatactcaaagtcaaaagccagcatattctgccacaataactaggaaaggattgagaggacagtggctttgcaaatgagcattggtggttgaagcatatttggaaagatgtaatggtagaaggatagtaatccaggtagagggggaaaagaaatggtttgagcggcagcatagaggaagggaagtttggcttaaattagcatgcgtatggagaagtgatgggagattggccttgaggtcatcaagaggaaggctgtgaatgcgagctgtgaaggttgtttattatggtaagaaatagggcagaatgagggacctttgtggagaggagtgcwggtattagagttacattgcaggaagtttttctatccatagcatgcataatggatcaaagtgggaatgaaggcaggcagggatagctatttagttcagtttaacaatatttgttgcatgcctaagatgtgttggacactgggagaaaagacaattcctttccagaggtgacctatagcctaatgaaggaaagagaaaaaatgatcaggcagttttaataagcatgctaagcaatgcagtcagaaaataaagcaggcctgaatgagggtaagagaaaagggaaattagaggcagattcaagggaaacttctgaattgaattttctctgaggtcctgaacagctttaaaatgtccttaaccaatttaaaaatagatataggagcaaaaccataagaagctgtcatgtacaaccttaatttcagtaatggaagaatgatgatattcaatgatgagactgtatgaaaaagagatggtttgtggagaaaattagtttggattcagacttactaagcttaaggtactgaaactaccaatgttacatgggaattacacagtgccatactatttaatacacttttggttgcagatgtcagaatagcaactcaagctactttatgactaagaggcatttactggcttatttgacagtatagtactagcttcaggtatgattggatccggctacactaggaattgcctttatctccttgattttggttcttttattttggtttcaccctcaggctgaccctgtcttcaggcaattctcaagcagctctaggatttttaaaatttcattcttaaaagaagatgccttttcctagtacatagttggtaccatattgactcctgctgcccttgcttgaacctaagtcaattgtgtggccagtgatgggggtggggagatacagtacattaacctttcatctgggggtaagggcagtgtcatcctacccacgtggactgagaatagatgtgggctattcttaaaaagaaaaccaagacactgttactaaaaggagggggtctgcaaaaacatgtagtgtccagtgcgcaatgctatataaattccaagcattttaagttaacattgccttgtttgatttttaacatgacattttgtgaaaagcgtcattaacattatctgtaaaccataggtatggaaatggagctttagagaggctaattcgcaaaagcagcacatgtagtgttaatagaagaccctggattccattaatctttcttccattcaaatgtggatgtcaaatggacagttggaagtgtaggctcgtgagcaacccccaggctagagtgggtggagtcatataatggagaagtcatcccttgagttgcagttgttggatatgaccaccaaagaggtggaaattgcagagaaagagaaggtcaggcgatgggaccaggagagaaacagccacatttgggagggttagaacaaggtcctcaaaaagataggaagagaatgagaaaagtaatgagaagagtaatgtgctaaagactacagttatcacttcataaatgcttattgtctttttcaaagtatcaggaaagcttaaaggaatttttagtgaaatattcatgaccatgatccactgattttggaatgctataaacatgatgaaaataacacagtgggcagggcacagtggctcacgcctgtaatcccagcacttagggaggctgaggtgggcagatcatgaggtcaagagatggagaccatcctggccaacatggttaaaccccatctctactaaaaatacaaaaattagctgggcgtggtggcgtgctcctgtagtcccagctactcaggaggttgaggcaggagaatcacttgaacccgggaggcagaggttgcagtgagctgaaattgcacctctgcactccagcctgagtgacagagcgagactccatctcaaaaaaaagaaaacaacattgtgtttgcattgatggctagcatcagttgtttggtgttgatgatgataataatagctaacatgtaaccaggtgctgtgactcacgcctgtaatcccagcactttgggaggccgaggcaggcagatcacctgaggtcaggagttcgagaccagtctggccaacatggtgaaaccccatctctactaaaaatacaaaaattagccaggtgtggtggtgggcacctgtaatcccagctactggggaggctgaggcaggagaatcgcttgaacccagaaggtggagggatcatgccactgcactccagcctgggcgacagagtgagactctgtctccaaaacaacaacaaaaaattgctaacatatgttacctatgttacatactcacattatattgcatgtaatcatttactcttcacaatgatcctataaggcaagtatagtgctctctagtttacagttgaggaaactaaggtacagagaggtgaaataactgtgtctgctgtctcacaactttagtgtatccagttggctacacaatggattttcttaactgctgcattgcactgggcagcactgaagcagggcaggttaacaaaggccagtcttttttcttatctttcttgcaaagaacatttcaacctactgttatttatttattttttttaatttaagtttggcctttgcttactttcaagtagaacaattgaaagcatgtcagaacagcgccatttgatgttggaagaatctaagcgtcattcctgctctgaaggactactggtcattacttacatgggtgcttatgactgaaaaggtcacgagacaaaaaaaaaaaagctgtgagagaaagacacacaaggacagtttgggtggcagtgtcacatcattcatcagttttacaatagtgttggcctttgtcaacattttctaaaggaaaaatcataaggcaacaaaaacaaagagccacaaatgaacaaacctggacacaggctaagacttccttgaagacttcagaaactatctttttttttttttttttggagatggagtctcgctctgtcgcccaggctggagtgcagtggtgggatctcagctcagtgcaagctccgcctcccgggttcacaccattctcctgcctcagcctcccgagtagctggaactacaagcgcccgccaccacgcccggctaattttgtgtgtgtgtgtttttagtagagacagggttttactgtgttagccaggatggtctcgatctcctgacctcgtgatccatcgtcctcggcctcccaaagtgctgtgattacaggcgtgagccaccgcgcccggccagagactatctttttgcttcaaaaagacagtttctcagtcctgtgttctctagggaattctgccaacaattgtttttttcccatatctgctgctctgagttcctccacctttcctagagtggaaaatatcctgattccttagtgcctttctgaattttcaacaccatttcacggaagcaacctcaaaaattatatcagcatgaaattttgttttgagtcaaggtgtttcattagctgtgaaacagcagaagaggttttactatttctattttggactcatagaaggaaatgcaaatgaatcaaaatctattatgcttaggtttgaatgactccctttttcttattttgctggaggattactcagattctattaaggccctgttggtctgtatctttcttaataggatgttgaggtggtgtaatgcatcccttatcactgacctgcatgtgtgacatgacttgtatattaaattccagtacattttagtcttccatattttttatcataatattcattggttaaataaaatcctacttaagcagataacacacattggagaattttatcatactaatgtctcccttagtatagtatgtttttcacatggatgagatactcttttgctccttcatttttgttttattaactatgtttgtctttttttccatgtaaatttagggctgtgtttcaaagttttttttctttttttttttgagacggagtctcactctattgccaaggcaggagtgcagtggcgcgatctcggctcactgcaacctccacctcgagggttcaagcaattctcctgcctcaggctcttgaatagctgggattataggtgcctgccaccatgcctgcctaatttttgtatttttagtagagatggggtttcaccatgttggtcaggctggtctcaaactcctgaccacaggtgatccacttgcgtcagacttccaaagtgctgggattacaggcatgagccaccatgcccggcctcaaaggtttttttctcacggtaaaattatgagatgtgttaattgtgttctttgtgttgaaaccctttttggtggagggtctttggatgtagtatatctcgtggctgctgtaggctgctagatttattgctataaagataaattccagcagctttgaacagattttttaatgggtgaattttttatcaaaagcctttacatagttggtcatggcattgaactaatagcatgtagaaatccaggtttggaaaagatgattcttcattctttgggatctgccacagaaaggatggagtattactctaaacaaagcgtgcctcacagtttttctcactgccttgacaaagccttatcccagaatggtttgcctttgagctctccactgccctggccttgatggtatgagggtttctggattgatattagagatatttacatcaatatctaggttaatgtctagttgaagcctgggtttcattctctattgcttgaaataagctctttctggcaacactctttggcagtttggcagttgtttttttttttcatatttcttttaaattttaattataacccatcaagtcttaagcaattacttctgggtagactcttgatgaatgtcatagcagggtgttttaatttaatagatccagaataacatctggttctaatattttaaaagccaatttatatggaaatttatttaatacacagtcaatacatggagacttgtaaaaatcaaaatcaaaatggaaaatcaatctactgttytgtaataggtcttcttttaataaaggattttgctcatgactgggttcaactgttactagttaacactcaaaatatcagtttagaaaaggtagcaacttatttctcatactgaagaaataggaggtagttagcccagggtcactatggtcttttgtaacagggactgagtttccctcaatcttactgctctgctctctgcatgatttctattcctaaggacaccttgtgggccaagatggctgctggaactccaaccattacatatgtgctccactcagcaggaaggaggagggtaggggtggaggggaggggtgcaggggaagaaggctaagcttttccttttaaggacactttctggaagtagtagacaaaaattcatcatatgatcatatttagtatgaagggaagatagggaaataaatttttttctaaatgaccacatgcccaactaaaaattaaagttcatttgtatggaaaagagagagaatagatattgggtgatatccctgatatagtgaaccatcccggccacatggagtaattgaagattttcacagatcttttgcctttttattgaacatttagaaaagtcaactagttcttattagtagataatatatgtattattatatggattagcatggtatttggcacattgtatataatcatcaacttctgatcggcctattttaattctaaccccaaaatgcacctaatttcccaggttatgggtcaggaagactttaataagggacttttcatagattgtatcctagtctttatataataataacagcrcagctaacagggcagagagatcatttgcactagggtgtccagaacactcatgtatatgtaaagcactgttctctgcttctctatatagaagacaaatgaacaattatacatgtttattaaatgatttcaaggtaaaactattatcacagaaactgaagctcagaaaggttaattgggaagcaatctagagaagcagttgaaaactatcatgcctagtcatttgaactcaactagaatactaactcagttatttccactggtgagatcaccttagatgggtttcttaatctgctgagtctctgtgatagtttatttttgcagtcaggcagtgaatgaaagagttaggactcaggaacgttttccctgaatccagagtttttccaacctgcttttcggtaatactcatgtggaaatttctctgatcacacctgcctcacaagagaaggcagaactggtggagggcctagagttgaacatcattaagacagtctcccacaacatagtctttatccacacagatgcccacagctccttaaaaagccctgatatcagactaggcaagagttttatagttctggagttctcattcctgtgcccttactaactcatgtgtctcttatatgttctgtaaatacagagataggttcactagggatacaaaaagactccaaatgccactctgttctctgggaggatagtggcacagagccaggatgttccaaactgaataatttaatgccacattcaatgtttgtaccttatccacatatgtcagtacttttgagtctttaatccttttctttatattcactttttaattttcaacagctttattctgagccatagttaggaaatccagctttgatatggtaatgaaatttactttcaaataaccttaacatgaatataaccattacagtttttacaaagtgcagacatctttttacatgtccccagtagtagatggatcatattttgggaaacccagaatagtggaaagggaattagccatgaagctctgtgttactgctctcaacttgtgtgactctgggccagttattaattaatctttctgaaccacaaactttctcacttgagagatgtagagaataatatctacctcatcagtgttgctctaaagattaaatgagatgtagccaaggagaccagcatggtgtttggcagtgtatcaattgtttagcaattagtaggtccttccttcttgaagtctgtttgaaaatatcaggcatgcaaatggaaactatcctcaaaagcaagaatcagtgaagcaccatgaagatttctatagagggtagtaagtcccatgaaagctaagaagtgggaaaggctgaagtttattagaatgcagtaggaagggaaacactggataggtggagagccattcttcctagtctttccagttatctgggcccttaatactcaacatgtggtccaaggaccatcaacatcagcatcacctgagagctactggaatgtggactctctctctggcttctccccaggcctactgaatcagaacctgccttttaacagggttgtcaggtgatttgtatgtatgagaagcaccgggcactgatattccctgtaaaatttattaatttatttctagtaggaggctagtccttgcatcacctgggccttgcttcttaaaaatgcagattctcaggcccagcctcgatctggaatattcatttttagccagtatgtcacatgattttcagggcagttgtttggcagactgctacattaaggcttaaaccagttgaagaactttattcttcaaagatacttgcatttcaacaaggaaggaagcttttaaggaagagaaaaacaaccctcattgtggttttagtaagcattaaggggaggacatgaattcagcttatatgtgcctggaatcccatcacaaagctacatagtaacaaagcttctgagaaaggcagtatcttatcaatgtcatattttttctttctttctgtgttttacatttgattttttttaacgttttgttttttagccgtgctatcaagactaatcaggaccttctcccagaaactccatggacgcacattttctacaatgatttttgggggactcttctaacccacagtggcagccacaagtcctaccggccactctgcactctttcttttcgcctgaaccatgccattggagggttgaatccctggagctaccatcttgtcaatgtcctgttgcatgcagcagtcactggtctcttcacaagcttctccaagatcctccttggtgatggatactggacattcatggctggcttgatgtttgcttctcaccccattcacacggaggcagtggcaggaatcgtgggacgagccgatgtcggggccagtctcttctttctcctctccttgctctgctacattaaacactgttctacaagaggctactcagccagaacctggggctggttcctggggtcaggactgtgcgcaggatgcagcatgttgtggaaggaacaaggagtgactgttctcgcagtttcagcagtttatgatgtctttgtctttcacaggctgaaaataaaacagatattacctaccatttacaaagtaagtgattgttggctcttgagcattggattactgagtaatctacttgcttactcctttgccaccatttaaaaagcaaatttattcctctgcaagcggaatttaaaataagttcctttttgatcttcagtaagtggaagtgtccttttgacctttgtactaagcagggttttagtcactgattgttttatttctctggtttcttactttcatgatttcaagggtggtagaagaataattttgccttgtaaagaatatgcacctttattatttattgagttcttatttctatatttctgcacaaattgtctataatctgataaattgtctataacgtgtatttgtaaaaaataacacggctgataatagagctagatgctagactttacaggggaaatcctctgccatttgttaatattacttttcctgagttgactttggaaaacaatccttccctttagtgcactgggaagtcaaattcttaaacaatgaatcatactcacctttttctcgtgatagtgcataagaatagaaaagtcaaaacagaaaatggttattattgagtttctccctgtggccaattaagacctttgccttagggcatatttgttctcccgtattcccttagtggtatccagtacaaagttgtttgaaggccacagaagcattttaggatccccatacacttgaagagactgagcagttttctgctagagcattaaggagaggcattgagcggacggggcatcttgagaaattgtctgccttcccatctccccatcctccttcactcagaataaactcaccgttgctttgactttggcgtgaagacggaactgggccagggtttgccaactttggtcatgttttaggcaggctcccgcctatcttttggatacaagtgaggaattaaggttttggatactttgctatgaggaaactgtcaagttttcctagttttgactactttttcaccatcgatttctaattttatttaaaattgagaagaaatttaaaaacaaattgaggcaaatgctgttcgaaacatcaatttttttaaatgcccttttttttttttcctcttaagagtcagagtgatctctgctgtgctttttctctgctggaaacctaaccttttcacttagagtattaagggcttaatgaagttcttttgtgatttcaattaaatgctgaaactttaaaagaaactctggttagagtttgatgcttgaaaacaacakatggtttgaaagtcaagctcttaatttcaaatcaattttaattmtttcaaagagatttagagagagtaattgttttcatctaacccaatgtcatcgacaatagcaaactttgttttattagaagtacaactaggagaagtgtaattcctgctctttgtccttagggaggttatgatgtatttgaggatgcaggcttagtgctggctgtttcaggaccttgcattagtcgcctgtgaaatattgtgatttttttttttttttttttgacgcggagtctcacactgtcgccaggctggagtgcagtggcgccatctcggctcactgcaacctccgccccccaggttcaagcaattctcctgcctcagcctcccaagtagctgggactacaggcacatgccaccatgctcagctaatttttgtatttttagtagagatggggtttcaccatattggccaggatggtctcgatctcttgacctcgtgatctgcccgccttggcctcccaaagtgctgggattacaggtgtgagccaccgcacccggttgtgatttcttttacagaatttccatcttaccatctcataagttagggaattatttggctatgatgattcaggatttacttgcaggaccttacgaagttctctgagaaatttacagtcctctaagcatattttcaagggcagagttgcccactgcagtactccttcctagaaatatgttctatacaatatttgggacatacttataatagaaaattaatctttgtttctctgaaattgaaatttatctgggcatcctgtattttatttgtcaaccttattcatgtaacagctgcttcaaaaataagaaatgccactagcaaggaactcttgagactaaagagtgtgaagttccccatgttaagagaaaggacttaatactgttgaaggttcagtgtcctgagaagtttccagatggctctttgcccagactctcttggcgaccaccgcttgcagggctaggcaatggcagcagcaagggtagtggtcgggggcagcaagactttgtctgatatttgctattctatcgtagctctttctgtcattcttaggtttggggccaatgagcttaataagaacattggagataacacattttatagatttttgttgttgttgttgttgtttttgagaccgagtcttgccctgtcgcctaggctggagtgcagtggcacgatctcagctcactgcaacctctgcctcccgggttcaagcgactcttctgccccagcctcctgagtatctgggattacaggcatgcgtcaccaggcctggctaatttttgtatttttagtagaggccaggtttcaccatgttggccaggatggtcttgatctcctgaccttgtgatccgcccgcctcagcctcccaaagtgctgggattacaggcgtgaactaccacgtccagcccattttatagatttttaaggacctgtaggatcatctttgccactctcttcatttccatctggggtgtggagagccagagatgtgtaggtaacacagaaaatgatggaatcactaggactgaagcacacatctctgactatctggtgatatctttactacactctgatagtttgaggaacaaatataggtaaagtcaattgactgcccagtagaaaggaaactaatatggaatagaatcttaactcaacttgggctgattccatgatctgtttcttcatctggaaatgaaggcagctatagttctctcccagagttgtgaggcttatttgaaattgtgggggtgttcagtgtgagctgaagtgtccagtatttggatgatacctaatacatattagttgaagtgaaagaagaaatgtcgatggaaattttgattctttatcttttggcctctgccttcttaaggtgaactgccagtagtctctacacatagagttgtttgacagcatgtgaaataaggactgcttagtaattgaccaaagctgaagtaaacagatttaagcacaaactttcatttaaaatctcatgcttgtgaagcttgtaaacactgacatagaatccatatgaaagttatagaaaattccatattctgtctgtaaaatatatagatttctatgcctggggtgagttagaggagattctttctgaaggaagtagtctgaaaggctttagaagatccattcaaccttaaaaaataatcatcttaaatatcttgccaattaactctgcatcctagttatcatggtttgccagatgagataaacttccttgctctgttaaaacataacttatatacaaatggaaaactgcagtatacaaatgtttaaccctgttactcaaattagagaacaagctaagtaatgaaaacctaaaaatggtggcccacttaaagctggaaattattaaggccagaggggcaaggctcttggctgaatttggccagttttgattgcagtttacctttgtcttaggtgttgcttaagcttgattctacatccggatgtagtgatcagaccaaagctaacaaccccatacttccaaaccatttacggaatttgtcttgagaatgatttctgagaatgggagtttatattctgttaaagaattttggttaatcaccaaaaatgttacaagactcatgcaaatgatgtgcatgtcatcagacttttgcagttttgcaaaggaaatatgaaagttatatttttatttgataaaatatatgggaaatagtaagttcttggcatgtagtagatattttatttagtatttaatgaacagtgtttatatctgccaagcactattcttagtgtgctaaagatgttaacttatttagcttatgtaacaaatgctcgttgagataagtaatatgacttacaaaataatatggttgaatgctgwcaaactataattttgtcagtagttaattttgtcagaaaacattaagtataaaatcttcagaagtatgaataaaaatcagtgttttagagtagtcttagttcttagcttcaggatttagtttaatatatttcttacattatccttgtccttcaccatacatctggcttatagtaggaacttagtaaattattgaattcacacttaatatttacctttttaaaatatgtggctgaaatgttaaagtgaactcctgtactctcccctttatacaatgagaatttcattcctgagttagtggggtctggaaggtagggttggaagacatgtatgtcagaaaataaattttcttgacctctcactaaatgattgttttagcattacttagattactttcactcacttagttttatgtggtcaaaaaataaggggggaaaagyccttgaaatacacttagccttgcaaatacatactagacttttatctgcccacaaaattttttacaagcctctcatgaccccaggaagtacatgggtaataaaatcagtaaaagcaacatttttcttgcccaacgtcagtcattgcttgcctagtggccattttctgtgcttatttaacatctgttaactgttttaatgtggaaacatctctttcccctttattagcctcataaccacttattcagttacaggtggaaaattttaaaaatctgaaagtcaatgtagcaatactaatactaacacaagatagtttagaaaaatgaagcccttttagtttgatgtttttaaaatttctctaaagatgattaccttggttttgctaaagtttatgtagttggttccaagatgtgcattatctaggtaatctctttttcttaaaattaaattttgtgactctgtttcaataaataatattgttatatgggaaaattggagacattgagattttccagtcatctctttctagaaataattttcttgttttaatgctaagcagaaagtgaatgatggaggttgcccatgggcaatgaagtttacctttgtcttatgtgttgcttaacttgattctacatccagataatagtgttcagatcaaaactaacaaccccatatttccaaaccatttatagtagggtttatcttgagaataatttctgagggtgggagtttatattctattaaagatttttggttcatcactgtctgaacactaaaggtattgaatgtagtgtttctgtacttctgactattttgtgtggctttctctatagagaagagcatgcgaatagagatgcatagcctgcaggtgtttgcatattgaatccacatgtgctttttccgttasttgctggggatggctttgatggaatctgttatcatttatggcattgtcccttttgtttctagactaggttgtggttttgcctaagttgtgacccccccscaatatcaattgcattgaatgaaatatgatatatttaccgtttrtgattttccatactcaacacctgtgccactctcctccaagtagtattcccacttttatgaccccctttcctttcatttgccttacacttgactttgcgagaatccagatgtagcaagatgctctgattctgatcacaatatttcttagctttattgaaactgtagggctgtttgttaggcccttacgaatgaatttggatttcctcccagtaaacttgtggcatttaatattcatgacctgtagtactataaaactttgaacagctgccaacactgctaaccagataataccacaaataaagtcaatgttcaaaaatattttacgattcaaaaagtcaaagattaataagatattgtattcctgcaggctggctcccttgttcagctgatttaaggtgattctgtattccagttgcagtttaagttcaagttaagtaatttaaatttgggagtctgactaccattgcaagcatctataatgcctgcattacactgttaatacttggaacaacgatctattcacaaattatcattaaaaaaattcatctttgtgccaagcgctatagtaggcgatgtggggattcaaagaggaatcaaaaggaacatgccaatatgccaggactttatagagtagtatgaagtcgagaatagtgcatgtaaatatagaattgaaattcaagctgggaagtggtgagggttataagggagccattgagaatggtgggggagttgagaggaaggggaggttacttttggttgaggggatcaagaaatgccttctggagcagagacatttgagtagaaccttgcagggtaaagatacaggcatttgtaactggagaggtgaggaagagtaaagggtacagcatgagcattacacagaggaaaactcacagaaaattactgggtaccatggagcagttgttttggcagatacacagaggacatgggtgatagaggaaaatgagtcaggtagggtagattgagaccacctggtatgtatagtgatatcggggccttctgtgctatattgtggctcccaaaatgttgggaaacaatgcatggtttcaaaatgtgctcctacttttgcttgtccatggaaggagcctagggatacgcaggtcagctccgtgtagccactcgggagtcgggggtgaggggaggggggaactatcccatctgtctcctaaatctgagggagggttcctttggtgatgaactgaaaatcctcctgaaagctagagttgaagttttatatctcattcatatcagtgtatgtcacattcttttttttttttttttttttttgagagacggagtctctgtctgtcgccacgctggagtgcagtggcgcaatcttggctcactgcaacctccgcctcccgggttccagcgattcacctacctcagcctcccgagtagctgggactacaggcacacaccaccatgcccagctaattttttgtatttttagtagagatggggcttcaccatgttggccaggatggtcttgatctcttgaccttgtgatccgcccgccttggcctcccaacatgctgggattacaggcgtgagccaccgcgcccggcctacattttttatcattaaataaaaaacgtttatttttggaagactaatgttattgtactttttactgaataatatttggcatattattctacagtcctcataagaaaaatggaggtctttaaaagctttctcagctgggtgcagtggctcacgcctgtaatcccagcactttgagaggccagggcaggcagatcacgagatcaggagtttgagaccagcctgtccaacatggtgaaatcctgtctctactaaaaatacaaaaaaaaaaaaaaaaatagctgggcaaggtggaggggtgcctgtaatcccagctactcgggaggctgaggcaggagaatcgcttggacccaggaaggcagaggtggcagtgagctgagatcgcgtcgctgcactccagtctggacaacaagagcaagactccgataaagagtcaagacccatcactgtgctgtattcaggaaacccatgtcacgtgcagagacacacataggctcagaataaagggatggaggaagatctaccargcaaatggaaaacaaaaaatgacaggggttgcaatcctagtctctgataaaacaggctttaaaccaacaaagatcaaaagagacaaagaaggccattacataatggtaaagggatcaattcaacaagaagagctaactatcctaaatatatatgtacccaatacaggagcacccaaattcataaagcaagtccttagagacctacaaagagacttagactcccacacaataataatgggagactttaacaccccactgtcaacattagacagatcaacgagacaggaaattaacaaggttatccaggaattgaactcagctctgcaccaagcggacctaatagacatctacagaactcttcaccccaaatcaacagaatatacattcttcccagcaccacaccgcacttattccaaaattgaccacatagttggaagtaaagcactcctcagcaaatgtaaaagaacagaaattataacaaactgtctctcagaccacagtgcaatcaaactagaactcaggattaagaaactcactcaaaaccactcaactacatggaaacagaacaacctgctcctgaatgactactgggtacataacgaaatgaaggcagaaataaagatgttctttgaaaccaatgagaacaaagacacagcataccagaatctctgggacacatttaaagcagtgtgtagagggaaatttatagcackaaatgccctcaagagaaagcaggaaagatctaaaattgacaccctaacatcacaattaaaagaactagagaagcaagagccaacacattcaaaagctagcagaaggcaagaaataactaagatcagagcagaactgaaggagatagagacacaaaaaaaacccttgaaaaaatcaatgaatccaggagctggttttttgaaaagatcaaaaaaaaaaaaaaaaaaacaaaaaactttctttctcctgtgtcccttctcccaaccttgatgaacaatgttcagatattactgtgaatggctacaagtacaaaatacctctttgttttggactgtttcatacaggaagatagaaaaaacattttttaaagggtcctttttacagtacagcatgaaatattctatcagcactgaatttcaaccagttaactcaatactccgtcagtgaaaatgacacgcaaattggatcttgtgatgaataaataatgagtctcattgaaatcttctatgctattctcataacactgtgtctgggatgcatattacatcactcagctcaattttcgatacctgctgcctgggggaatcaaattgactgagggggatccgatggatatcaggttactcatactcaagccagtattttcaattcacagaaaatgatgtggtttgcacaaatttgaaatccattgtcattacctagaagttcagttcctatcttaaatgcttagaatggtggaaatgataacttattgttgatttatcgaatgaaattttatagaaagccagattccatgagtacattagagattccttaaaaggcatgaatggggtggtgtagaaaaaactgacttatgtcaaatgcattgatggttcaaatacatttgaaaggtgatactatggtaaggttgcataggattataagttttattttattttaaacaatcagattttgtacttaatggtcatagtatttctttcttcaaaaaggataataagaaaccaaaagggaagaatagcatcttcgaagtcagtgatgatttggtggtaggaaggtcagtgtgcccttgttctctgggtttgtctttacaatgctgcagtacccagatggctcctgtatgctctgttggtctgattataactcttgcatcaagagaaatagcatgaattccgaatttaatacatgtttcttcagtaattatggtcttgattagtgaagtcagtttccgttccaaaggacaatttctttctttctctatgtgttgattcacttaatttcaggaatcaaataaaatgcagagatcatagtatttctctttgttgtgatgggggatctgtgttgtctgtgttttggtatgtggttgtcaattttgcttatgattactgtaaattaaagaaaacagtacagataacatggggaaaatgaagaacacctaaaaaataaatgacttagttcctacttaagggagcacatggaaaatatatcctgaattcccatcaaactgttgctaaatataaagtacaaataagtacttttaatatagagaccttgattatatgcaatatcagttgtggatatttaaacataattcaattttgtgtatttaagaactgaaaaaaagattataccaaggtttcacatgaatgatttcagtacatttccataacttttataaaatggaaaactcaaagttacatgaaaaccttatttctcctaatttcaagattcaagtaaaaatttgcccatttatatgatccactatatgtagtctcttcttaagctctcatgacatattgtaataaaagctaaatatatttaatattgtgaaaagaactgctgtttactttgaataactatttggtatttggctaatcttttcacgcagagatgcttataagtctatcggggaaaggccattggactggtgcctgcagatttagatttaaatagaaactcggtcattttctagctgtgtgaccttggggaaatttctaaacttctttgaacatcagttaaatgccctgtaaaatcagggatataatatcttcgctgttttgtgttaagtatgaatatagtaaatgtgtactcttttgccacgtccctgtcttatagcaggtatcatcattgtcagcattctatggcatttttgtagcattttcagtaatggtgatctttttatctgtcattttatggagcactcaattagcatggctgcggctattctagaaccatatagagtagttaatggaatgcatgctgaactgtcaatcagcaaagaatggaatgcttgctatcctgttcaccagtgctgataattgaaagaaagctgaggaaaagcctttttcaaggttaattcttctgaacaacatgatttgataatttatcttttgtttgattgagattgataacaagtacatatgccagttttcctccattggtaatatcttgccatcatcatcatctcatactttcagagcctgctttcttttcccctttgggctcaggagggtgctgttrsttatatatctgaaaatggaggggagacaggtttttctgtttttctccccaaaccaccctgtttcccatatattttcttttagcaaggtttattgtagggagcagtagttcagtaactgcaatagcttgcaggttcaagtctctctctttttttttttttttgaaaaaaaaagggaggcactattatcatctaaaggttattcttccccaacctggcaggcaatgttgttgcagctgatcccaraatctctatataataaaccttttcagggaaacgttgagtctggctttgttgttgttgttgttgttcagtggtttattttctcacctcctggagcgacaacaggaggcagaaaattttgtctttaaagcaatacggttttctggctgccaaaaatatttcatgaactattttggacaacttaataacactcagaccaaattatttttacagaatcctatatcttggtaactttggcttactgagacaaatctatagataaaattggttttggatttcagaaaattcaatacataaaaatatgatttacttgacagatgatagatacatgrggcgagtggcaggggtgaccatttactttaagaaaacttgaggattcgtcatgagttttctttgagtacaccaaacttggatgatcatcagctgctcatggggaaattattttagactagagatgacagcacaaaactggaagctaccgaataagaattttttggtctacttacttttgtttgtttttaaggacttgaggggagaatttctggaggtggcaggagggagacatttttaaaaagctcttccagtgattttgatgaatagctaggtttggaacccactgatgtacattgagaatctgattccctcctataatgacattaaatattataaaaatttcacaaaaacaccaatatttttatagctggaatggtatactagaaaccatttgtccatctccacaacaccaccctcttaaaagaatttgaggccgggcatggtgactcacacttgtaatgccagcgctttgggaggccgaggtgggtggatcgtgtgagccaggagttcgagaccagcctgagcaacatggtgagaccccatctttacaataaatacaaaaattagcagcatgcagtggtgtgcacctgtaattccagctacttgaaaggctgaggcaggaggatcacttcagtccaggaagtggaggccgcagtgagccatgattgcaccactgtactccaaccttggttacagagtgagaccctgtctcaaaaaaaaaaataaataaaaaataaaaataaaaaaaataagaaaagaatttgaggcccacaaaaattaggcccacgattagttgagaggagagacaacggtatattmtagcctctcccaaccaggttgaatgcttttgtcactgtaaacatatttctcttttaatgcttaaaaaattagtttatggacattttcagttggccatttgcacttcagttagactggagactagtattggaattccatgtacctgtcactcaaattcatcattaattaattacaattctaatttttatttcaccctgggttcttttttcctttgttaataattccaagcttcctcgtgaaattgagctgttggtagttgttttttgttcccttcctcccaggttcctccttccctcccacctcaaatagcttcagataggktctccttatttgcattttgtcatcctagtgctccagcttgatttcagctcacattcaaatggaatgtttgcttctgcarataacacaagcttaacgcaaagagactaaaatcacagtgtatttttctttctaatttggttatttcctttactaacatggtgttactgtttgaaatagtttatccctcagtagaggtctcttctctttcatgccaaacttaagatgggtttagaagtggagaattaaaagtagggcagctcaatctccaccttctttcaattctacacagcaccactgcacaaactcaggagcaaaattttagtcattagcactgggcacatcatctgtgtgtgtagcattcatcctgttacttgtaactccagaaatgcggtgggatttttaaaaaggccaccgctagagtcttaaagtttctttgaccacagaatatcactttagcttcttgctgtcttgtgaatacttgaattgctggcaaccctaatgtaaaagtgaaaatgactccaaaactgagcatatttcagaggtaaaatagcaagaaaggagaaaatgtggggatgccaattgaaaaatgggctggctgagtgagaaaagggctgaatttaagttgtcaaagcagcagcctgaagtttctggttcttggacaggataatttgtagtctttgattctctttcattctgcagtataatcttctccctggctgctctgacttccatattgttcaagaggaagagaaataacccatctgaattcactagctttcatttgcatatacacacagctggtggtaatgagaaccaccatttatcaaggcttagtgtgtgctagcaatgtgtcttctgtgcaatattttgttccattctatgaaagcattaacctcatttacagatgagatacagataagataaactgaggcttatcaagtgaaataatttgcctgaggattcatagatagtatgcagcagagagagaatctcatctcaaatatctgactccaaagctcatggtcttcctgttatactgtttttgtgcaattttagtgaaaatgaaagatccaagtagtattacaaaagaaacaatgattttttttttttttcacattacttggctttgggaccaatgctcattatctacagtagctttgaatacaaataatctgtacttgcaggtgcaaaagctaattttatgagtgctaaaaatacaatgatggatattttctctctgcccctagcaagtagcagacatgtatacaataactgtataactctgtgctaagtgctaatataattccttatgaaatgctggagaagcacaagtgtcaaaaaaattaatttagcctggttagggaagagtcaagagagtgacagaaagtagtggtgtctaagtagctctgctcatctgtgtgtgtgtgtgtgtgtgtgtgtgtgtgtgtgtgtgttttaagaccatttcatgcttgtgcatttcatttaggtttagagtcggtgtccatttttttttctcctcaatgctgctcatgtgaggagaaatttgttaaattcatatttatttattaatacatatgtactgttttctaagtactaatctagatgttgagggtaaagtagtgaagaaaatagacaaacacctgctctctcaggatttacattcgtgtggtaaccattctccagataatttgtgcattcattatttttactccatattacaaaaaagttgaacaacacccccccccccgcccacaccccgcagttgcctagtatgcagtaagactgagtttcaaagtaaaaaaatagccagataattagaatattagaggagtgatactgatggatgtgtgagtgtgtctaggctctaattggtttggaagcctccctgagaccagagactggatagtctttttctttggcatgcctctgtcccagaagggaaatgggcattgagatcttggtattctgagcttgaacatcacattggcctgcaggggcatatcatttcaactgtggccttgcgctacatttaacagacttaaaggagaggctttgtgcatataccctggaggttggtcttgactaagtttgcctcttgtgtgcctatgcatttcacctactctacatggtgtttctcaaaagcatgcaagcaagaattattcggattcaattgacattgaaacatttggtttgtttctgaatttcatattgctgcatcattgctaatcaaccatattatttatgtgttcttgacaggcattgctaatacaggaaaatatttcccgcattgctttatatgggaaataatgagtctgcattacagaggctccttgtaattcagataaatttttttcctgcaaatttcataaaaaatacaaaattgcttagactaattagcaatattttaatgtccaggagtgtccatgtgtctaatggtgtcctaaattgtgcagactctcttgtgtgggttgtaaagatcataaagactttcgatatctgagctttcctctatttatacaaaaaaggcctacatgttcccttattcaatatccaaaaccatgaggccagtgacgtatgattttgatttttttaaaaattactattcaaagacaaagtgcataaaccctgcattaaataacactcccaacatggcaacacttcacaataagaaagacttagtatttctgcaggaaaatatatgaatatttacagtaactggaataaataaaaactataaattgcctcatgtcagttcaggtcaggcttttagtttttaatacttttattgagatgtaattcacatatcataaaattgactcatttaaagaatgcagtgtattgattttgagtgtattcaaagaacttttaactatcaccatcaatcttaattttatattttggaatggaattaaggatagggattttggccctgtttcaaagatgttgtgtgtgtgtgtgtgtgtgtgtgtgtgtgtgtgtgtaattttccaagtttaacaggatctgtagtgaaaagttttgacttcgaaccatgtgggtcagtaaacctggttaaagtcttgtgaagcccctgttttttcacttgtgcctttagtctgcttagctgtctattctactgtataacaaattggcactgaagtttgagtaatcaggatatcttctttggggttgtgtatgggtcagtatggttggattcttaatttgttttttcaaaactatgataaattgtaggtccctacataattgcaattttctggagtaatagtcttacattagcatttgattgctttcttggctgtgtgtttggtacatgcagcccttgatttctgagtaacagtggtttacagtataaatatgaatctgggtgcttctttttctttcccatttacttgcctaagtgatgttttacaaatgtcttacatatgcaacaggaattaggttgtatttaaaatataaaattgtcttgtttttagctttgatggggagttttatcgaattataaaggtgactgtaaaatttggggtaaacccagtttccattctgttacctatttgaaaaaggaatcattttcagacaaaccaaacatttaaagcagggaatgaatttggaatttttttatccctttaaataaatggccatcctaaaatatgcccagcttattgcttcctagaggcaaattcactactgaacaattttaaaagagcaatcacataaagttaattatgggggaacgattctataaaaatttaatatgctattaagacagttgctgatttacatcagatttatataaaagttgtttgaacctgcacctttgcgtccagctggtagcctttttctagattaattaagtgaaagcctctgaaaaatgttagacatttgagagaagttgtgatttcgtagataaagggaacatgctgtgaaaagtgtggccatatggcataatgacataaaccctgcagttctaatcaggaggcctgagttctcacacaggttttgccactacctagttgtgtaattgtgaacaactcatttaacctctccaggagattttcctaatatgggcatttctgaggatgcttcaggaccaaattgcatgctacttgaatcataatttaaaatataattttactgctaagccatttttgggtaaaatcataatttcgtctctttgaaataatctgattggaaagatgggcttcttgtgcagatattatgtttttcactcatttctatgaacaaaagattaagttccaaagtgcttatgtttttttgaaggccaggtaatttattgcaaactgtactgggctatacattttgtgtttcagctttcagaagaatctatttacatttaaaataatacccccttttctcccttttatcatgaagttatcttttccattatcttttaaacttaaatacagttaatacttgattatctaaaatggagccttttatgagtcaatcccactttctaattcttaacaaatatggaataaaatagggaattatgccatttttacattacctgtataatcattttatgcatataattagaamttgactctgattcattgttccatgcaagaaaaataatgctttttaaatactgaaattaatttgacaaataatttgaaattaatttttttaattatagagaaattaaaagaaaacctaaaaaaaaatcgttaagtgccatgcttgatcctcaatctcaggggtctgacactttctctgtaaaggccagatagtcaatgttttttgctgtgagggccatatggagtttactacaattactcagctctgctgtttatactgcagacaaagagtgtggttgtgtgttctgggctgtagtttgctgactcctgatctttctaagaacttacttgctaaactcatatgtatgagtaattcaggctctccaaagagattatgtttaggrcaatatatttgtagtaatatgaatcattccatttcatacaagttgcatgcattttacaagggacttttatgttcatttttacttttatctgacactttaactcttctgtcatgaggatattaatcttactttaaaaattattaaattaaatcatatatgtgtgyatatatatatatgttttacagctgaggaagcaaatccttagagcagtatgatttgtccaggctgagcctgagcgtgcaagacctttactcatttttcctactccatattgtatcaggtatactagtgagctcattgagcaagtatctttgatcccactttgtgtcagtgaaactcctttaccctaaaattttgaaaatgagctaagtcagaatttagcattacggctattctctggatactgaattcattcaaaataatcagacaaagtaaactttggtaacaattaccccataaaggaagcccaagtaagcagaaggtgatttccaagaataaccacctctagaagttcacagcagctgtaaaaatatatcttcagttgaaatttagcttgtggtgttagggcacttgattttttttaatcctcttttttccccaccaaattatttagatatattgaacagatttattcattgctcttagtataaaagttaagcacttctatcatgaaggagagctcacgcttaaaaaaaaaaaaaaaaaaaaagaaagaaaactgagcagtaaatgttgtagcagtttagtatcttttttcttgaccagagttgttgttggtggtgttggtattggtaatggtaatggtagtagtggtggcggtggtggtggtggtggtggtggtggtggtggtggtggtgrtgatgrtgatggtgattagtattcataatkgtggtggtggtggtggtggtggtattagtaatggtggtggtggtggtggtggtggtagtggtggtagtgttgttgatcgggtggtagtgtgtttctcacagtgtttaccttccaggtggatatgaagtgattgactttggcaggtggtagtgatgttgatgggatggtagtgtgtttctcacagtgtttaccttccaggtagatatgaagtgattgactttggcagtgagttctgtgttttgttttaagtcttggtgaggagtgcattggtggttgtgacatatttcagctgagagataatagaaagtttaatgatgttaatatctctcttcatgtctctctaaaaatgggccgtgttttttccatccaaatgaagaacacatagggtggttgaataccattggatttattggttcagaattaagaaaaggctgggtaatgaaatctgaaaagctcaatgtgaatttgacattttctccctgttttttaaactcatcaggccaaaatcttaaatcctaaatattccataaatacattctaataagtattgtttaattagtctttttaagtataactttataattgacgtttttcaaggttatttcaggtttttttcatttcgttttgttttttgcaacgatttgtaatatttacttctttatcttgatcaggctgctggctctatgaggcagtataatgcctgctgctttaatagcagtgcgacctgggaatcctcattttacctctttgtttccccaatgtccacatctcatatctagagttttctgaagattaaatgcattaatacatagacatctctaagtgcccaacagtgctcagttaatgtgagcctttttaaatttttatctattttaagaatgctttccttctctccaaattggctaatttaaaaatatgtcataaagatcatatgtttggctgtacctgtggttactaattttttttttaaatatcaaagttcattagagaarttgtaatgaaagtgaatactgtaatactgttgtgtaacattgcaaagatatattagtccatttttgcattgatcaaagttaaattttgttatttactacaacrgtaaactaggaagtggctggattcttgagagatatttaaaaattagattaaaaataactttctctctgaaaccgcattcttaagtcacagatttctatgcgattatataggagtttctcaaatcctacaattgcatcctttccaaattactgacagttgctgtttcaggaatatcctgtctctcatatcagtaacccctttgtttacaaattatcctaacacttcagcttacctcctaaagaccccagaagtgaagtagatattttaagacctttcatttagagctggagatgcccagaggaattatgtaattttattactgtcttcttgttgtggggaacatgcaagtctaacaattcaaaatctagtcttcctgtctcctctttctccctctctcatttcctccccttacctgtccctctttttcttctctccttccttataacactatattcttctcctgttcttcattgattaaaaagtgacttaaggataaggaacttgacttggcttcatagttcatgtatatttaaaatatatttgaaattatttctacagtaaaggatggtccttacttgccaaaggagctttaaatgttttcccattgttttaatgccccaattaatacagtacccagtagaagaaaaaacaaaatcaaactgttaaagaaacgagggacaccgacatgaaatgtgtaagttaaagaaatggagagctacaatatcacctagacatgtatacttttaaaaatcccagagtaaagaacccccactctatattgttttgtataagtacacagacacacagatgagattgggctatttgagctacgtattaagattctggtgtatctaaaattgcccccagcctgttctcttggttcattgttcttttgttcattcattcagtcatttgctcaatcattcatgtacccattcacccatatgacatgatgtgtytcttctgtgccaggtgctggtctagttgctatggatagtaagtcagtgaacaaaacatagataaatccttgccctttcagagctggtattcttgtgggagcagtgaaactcacttctgtaagtgtgagataataagattaagattgtatgcttagtgtcactttgggcctcaacaacttcagatttgacctttacagtagttgatatctttcatatgtgatacaagttatgagattggtgaactttgagaaagcagggattaatgtaacctggagaaactgaattgttgttgcaagtcttgcagaaaaaatagaacttaggctggaggtaaagaacatttaaaattgtgacaataatgggtggatggatgggagtttggtttacaaatagaatgatacagggggcagtaccacgaggggactttgaaacagtaaagatatcaatgtaatttagggaaatttgaagtttagatagtaaagatgggccagattttggacagttttgaacacccagctgaggacattggaatctaaatgttcttgctttagagaattatcatagattgttgaagaagagtagtaattaaaaatataaatgaatgagccaggtgcggtgccatgttcttatggtcccagttactcgggaggctgaaggaggaggatctcttgagcacaggagttcaaggccagtctgggtaacatagcaaggccctgtctctaaaaataaataaatagataatgaaaaattagaaacaaatgaacaaagtgccattccatgagcacaaaggaagatggaatttctagtcctagctgtgattgagtcgctgtctcttggtgaacacttccaacacatatagacatcaatttcctcactgcaaaataaacattgaggagatgttctccaatgttctggattttatagatacaaatttttgacctctttgtctcctagcattgaccaatctgtggctgtatgaacttttccagtgggagttaattgtctcttatatcagttaccaccttgaagtcagggtgagagtactttgatgaacagaggtctgttgaagaactggacttggtgggtatgaagtgggtattgtagggkttagtgtggtttatagccgtggtccccaacctttttggccggtttcatggaagacaatttttccatggactgggtggtgatagttgccagatgaaactgttccaccttaaatcatcaggcattagattcgcataaggagcacacaacctagatccctcgcatgtgcagttcacaatagggttccagctcctgtgagaatctaatgctgctccttatctgacaggaggcagaactcaggtggtaatgcctgctcaccgctcacctcctgctgtgtggctcagttcctaacaggccatggagcaggaccggttcgtggcycaggatttggagaccgcaggtttacagcatagaaccctggatttataatcaaaggacatagcttttgagtcctaattcttctacccattgggtggtgagattctcagtaacaacctagcctttctgaattctacctgcttttttgtaaaacacgaattcacaaagtttacaaacatcatgatgttttagaaagggctacttgagataatacatgtaagrcactctgtaaaatgtttaataaacattcataattagcgttgccactaataaaccattttctccacatcacatcccaaactgagatataataatagaacagaatgttttctgggcactgctgtccttactggatgccgggacttcatctgggaggaataaagtgatgtaacaggtgtttaaattcattaggcaattatacacagccttctttcctcataatatctggtctctcacagaaaaatataacggaacttaatatatcatttggatgacctgcatttgtttagattgttgaaggagcaagacacatgggttgatttgggatatggttcagaatagaacaaaactggatttattaagaaatatgatccttactgtaaaatttctggtgtgtttcatttaggagttattacagaaacctattcaagagtggaatttcctgatattacttaaaaggtaatgtttgagttagaagctaaataaagcstctagtacmtcctgtaatttttattactatctggtaatcaacatttatagcacaatgttaagactttttatcctttacttttattaaggtttgactggcccatggcatgaagytgcatgtgttttctgcacttctgaatgttgctggagttcactgttgcactgaatgtgcctagcaggrcaccatacaaggggacaaagacagccagtgcatttgaacgagggcatgtttaagtagggagtaagaagccrgagattccagtcagttaaccggtcccttccacttcttattcccctttgcttaatccgaatttactgagtgccagacatgcacctggcaaaaactttttgcttgtctccctgcagggttccaagggccctgagccagtcaraaaatgatcgacagttcagttagggagagttcactaaactacaactgttaaagcagacagaattcccattagaagaatgctttttggacctaatccaatgaaaataatctattaaaacaagttgtctaatcttatgagttaacatgaaaararaagtggatgcagggtgaattgcaaaatgtttgcacgtgtaagttcagtttatttaattttaaataattagggcatggcaatgattagtgctaattggagctatgtcaggctgaaagaattatccaagtgtgttttgaagactcatgagagatttttacagtaaatcttatttaactctggagtttgttttattgataatgctaaaactcaaagatacacatcttaatgaaaaaaatacgagattttaacacaacctgaaataatttaaaagatagtactataatgatagctacaaaggctaggcatgctttaaaagattaatggggagtgttttaatggccatcaaaataggtattcagtaaatgtaaaattctgttttaamtgatttgaagtaagatcaaacttttgggttgtattgaagtcttattcaaatggagaatgaatactgcaatgattatatgggtttcatagtttgagtacttttctgtttcaaaatcttaccgtgaatttgtgtattaactttccgacatcgtaatttccattcatgattttaaaagtcagtatatgatcaaaatttaatttcaaatttcacattaaaagagggaaagaaataaattagagcgattacaattacacaaagatttcatctatttagattggtcaccacctacaggctccaaaaattgcatattttcaagttgcttttggcaagaagacgtttttggagagttatcagaatagaacctgaatgaattgaaaaacttcttaatattttcctttgttcccaaacatctgatggattgccacttcacagccacgttaataatttctatgtcaacataacatgaaatactccactagcttattactgtaaagttagtataatttgaaagtcacacttttgatgattaattccaactaataaagtgtgcatttaagaaatgcttatttgattgtaccaatattaatttgtgctttcagcaaagttattccatttatttataacaagtattgtttctaagcttactattttacttttcaagaagatattaaccatcagagyaataagatacataggtctgaaaaatgacwctttgtgaaaactcagattatatttttcaccttttcccacgttacccatccccagactcaatttttgttkttaagatttttttttttttttttttttttgagacggagtctckctctgtcgcccaggctggagtgcagtggcgggatctcggctcactgcaagctccgcctcccgggttcacgccattctcctgcctcagcctcccaagtagctgggactacaggcgccsgccactacgcccrgctaattttttgtatttttagtagagacggggtttcaccgttttagccgggatggtctcgatctcctgacctcgtgatccgcccgcctcggcctcccmaagtgctgggattacaggcgtgagccaccgcgcccggccaagatgtttttaaataactagccttcgggtactgttgatatcagtactttaccccttctcacatatctttctatatcaaagggagcaaactaaatagtacgtaccaagaaagatttgggattagagttgttttttctataattctactaaccataactcgatctgttactctgatgtatctgaaaatttataatggcctttcgcttattctgttttctttcatgtgggggtgaggggaagaggatgaccctcttgcttgcttagtaaacccagaatgttcaactcagcggccttttaaggattccaattctgcttggttttgctctgaattactaatagttacgaagcccaagtaagtgccacaatgctgtctggaaattgctgaatagtttaaaatcactggatgttgaaataagaattatgaaactgatggatgctttcctatgtgaaaactttagtttaaaaactatagtctagggtgcgtgcagtggcaatcccaaagtaatcccagcactttgggaggccgaggcaggcagatcacaaggtcaggagttcgagaccagcctgatcaacatcgtgaaaccctgtctctactagaagtacaaaaattagctgggcgtggtggcgtgtgcctatgatcccagctacttaggaggctgaagcaggagaattgcttgaacctgggaggcggaggttgcaatgagccaagatcgcgtcagtgcactccagactgggcaacagaatgaaacttggtctcaaaaaaaaaaacaaccaaaaccttatagtcggcctcagttgcccagtcaagcaaatgagcattttctgaatcagtgtggcattctgagaaaaaagacagtgtatgtgagttatgcccagataaatggccgcatttttacctgtgagaaacagtaaataataatttgtccatttgacaytgaatttactatttaaattctgtagaagacatagcgtaattatagagttggagtatatttccatataacaacattaagcattgaaattatatgcttattaatgaacatctataaggcatgtatgtttattaagttctatttgtatatataatataaaatcttctttttcttgctggtgtcttttgtgttttcatagaaaaactcccacactcattaaatagctgtctattatgrtatctttgagagaaggcggctgtatcttagcctccccactgagtgaagtctcattataatttgtctctttatgtttccaaaatgctgggctcacatgcttaactcattaatgagactggaacgcatctcataatagctggtttgtcgcactaaagccacacagagtttaaagaatgttgcagtttaatccattggtgcaggaaatgcatttgcaatgtagttggccaattggggcaagattgataaaagaaagttccttttctaaattctgttaattttgagctcacttaattttacttctcctcccattagttgtcttcttcttaaagaacagggaaaggagtttaataaaaaacaaagtgttttcatagtcaagagaagtatcttctttactttcgtttaaaactttttttgttgttgtttctcaggtcacaaaggatattttcttcacatattttcttcataaaggctggattgttttgtggctaccctgatttgaccatagcgcactgcctggtgggaagggttaaacctctcattctaagctaaacaagattactctgaaggctggcattcaggggcttgtttttagtgtaatgggttaggggctrtggcacaccccttgcagttccactaattgaactctttgggtacttcagtttctaatagttagctctagaaggggcttgccatgggtacgcaagaaattgctcactgcttgatttccccacgttagtttaatgaggaagaatgggtcaccatgccaaccaaaacaccatagcaatgggtttagaggcatcctttcttgatacttgcttcccatttaggggtttctaatatactacaaacgctatagagtgtcagacaaaaaccaaataggatttgaaatcaatgtgtcctctcgtacaatacatgtaagtgactatgttgagttatcctgaattttacttcgttgtgtattcagacttttttgattaatttagaaggtagcaaggcacttaatgttggtcttatttttcagttgttaatttttctttgctagcagttttcagctattgatctatcaaagctcatctacatttaatttcatttggtttctaagagcttttattctactgtagtaacaaccatttaaaaatttattttttagaacagttttaggtttatataaaaattaagaaaataaggcaaagttcccatacacccagtttcccctattattagcatcctgcattagtgttgtgcatttgttgcaattaatgacccagagctgatacattattatatcaatagtttattcagattttttagtttttacctaatgtcatttttcagttccatggtgtcagctgggatggcacatttatttgtcatgtctccttagactcttgcatgtgagtttttcagactttttttgtttattttctgattgagacagggtctagctctgttacccacacaggagtgtagttgcacaatcacrgctcacagcagcctcaacctcccagactcacgcaatcctccttcctcagcctctcttgtagctgggactacaagcacaagccaccacacctggctgatttttgtacttttttttttttttgtaragatgggctcttactttgttgcccagggtggtctcgaactcctgaactcaagtaatcctcccaccttggcatcccaaagtgctgggattgcaggtgtgagctaccacacccagccagactttgtttttgatgactgacagttttgaggattcccaattatatatttagcagtatgtctttccattggaatttgtcggatttttgtttaaatgattaatctgggaataagttttttttaattttgttatctgttttctttttttagtttttttttctaattttcttaagtttttgtttgtttttgagacagagacactctgtcacccatgcttgagtgcagtggctaatcagagctcacygtagtcttgatttcctgggctcaagcaatcctcctacctcagcctcctgagtagctgggaatacaggtgtatgccaccatgtctggctaattttttttttttctatagagataggattttattatgttgcccaagtgggtcctgaacttttggccttgagtgattccccccacctttgcctcttaaagtgctgagattacaggtgtgagccattgctcctggctgggtatataggttttgagaggaagaacatacatgtaaaataacattttcatcacatcataacaagggtacatactgtcaacacaacttaccactataaagttgaccttcatcacctgccagtgayagtgtttttcaggtttctccaccgtaaagttactttctccccacatcttcccacccaaccagttcatactgtgccttttggaaggaagtcactatgcacagaccacatctaaggaatgggaattatgctccccttttttgaggttggagaatatatataagttatttggaattcttctgcaaagaagatttgtttcttctctcatttatttattttttgtatcacttatcaatatggactcatgaatatttattttatactttgggttataatccactgccactttactttttttgatgctcaaattcttccagctttggccattgggagctctttaagtgggttcctgtgtctctttcacacttggacatatctgtatcagtgtactttcacgtgtgttttgagcactttctccctttctggcactacaagttgctttaagctcattttgtatattttstgttccagtcctaaaatcaatccatttatccaaggagccctgatacactttattggaaaatggtaacaaccattgaaggaataaatacaaaaaaatttaagtaaaattcaggaaaatatctttcaagtatgattaaatgagagactagatgatcatcttaagctgttatgtgtttagctggagatgtactaatgctttctgatggatgcttgaactcagtgggaaacatgatggtgtactatgggtttaagtgaacaaaagaactcattataatccgaaatactgaatatcttaagatacttttttatgccccttaatctttaaattttttcctcacaaagtctggatatgcccactcattgaacctcttttaatattttttgcgataccaaacattataaaactctttaatcttgtctgttagttggtgtgggggagaaaacaaatgtttctaatcttacagacaggatgatcattaataaggaaacccatttttcttttaaagggaaacagaacaactatgacaacttgattatgatgaaactttgattaatcacatggatatgttctagaaacaattcctaaccatactttcagccatgcattccttcttgtcacatgttcagaaattatgcctttgaggggagtatccagtggtaactattttgggaaggaggagagctaagagaaatcctattttactgacataagaaaagtgatggatggtgaatataaaatagaaggtgctagatttttgttatgtctggatagccttttctctgtcttataactttcagaaactgatttttatctactttattattacaactactatcattgccaagggcttaatttggaattaaatgagccttatgcttaagtaatttattctcgttagtttgccaaaatgtaggtctcatgatggttttaatattcaacagcaggatgtttacatttttcgttcattgagactaaaatattccttttcagtttcatttatgtcccagaaaatctgagatcagaagacaatattgaagctgctattattaatgacagttttctttcataatagagaggggagctgttatagttgaattttacttcactcttatttttatgtatttagtcaaagacccccatagaagggaataattcaccacagggcttctgtagaggtatcaccactaactaatatggcagagtcttctcattggcttctccctcatatttcaggtgatatgtggggaagattttgatgttttctgataaatttcacattattcattcattaagctatagttatatactttcattccattagtgtgtcaaaaaactaagttgtcaaccaggaaccttatattggctgactttaattctatgattttctatgtatggcagtttcaggaaaaactctctaaaattttataattagaaatatctatttttgtttatcagaaaagtggggattagagctgatttccttttttatgttaaataactttaaaaatgaacatatttgaacatcttaaaaattagactttcggccagatgtggtggctcatgcctgtagtcccagcactttgggaggctgaggcgggcagatcacctgaggttgggagttcgagaccagcctgaccaacatggagaaactccgtctctactaaaaatacaaaattagcctggcgtggtggcacatgcctgtaattccacctactcaggaggctgaactaggagaattgcttgatcccaggaggcggaggttgcagtgagccgaaatcgcgccattgcattccagcctgggtaacaagagcgaaactctatctcaaaaaaataaaataaaataataaaataaaattaaaaaattacactttcataaggcagacctataatgttttgtgaacaattaggtgaattaaaacatgaagaaaccctgtccatactggtgtgaaatgtatctgtaaattttttgtttgtacagatgcagtaattttcccatttatatttctacttttacaacaaagttgtagttaggaaaatgttcctccagaacatatgctactactttaatgtgtgcttttcatggagagagggaaacaggcagaaaacatttgatgacataaaggtgaaaaggtcaagtttctgtatgtggtgacaacaaactgcttgaaaatggtgacttggagttgtgtggaagacttttgactttgtttttttaagagatgaggtctcgctatgttgtcaaggctgatcttgaactcttgggctcagggcatcttcctacctcagcctcctgagtagttgggactacaggctactgtgcacagcyaattctgttgacttatgagcctttgygtgggatattgggagctaggagttagcataatggtataaaatgtgtgagagaaagatagaaactgacttttaaaagtttgagggtcagacttagtttaagaatcatttatttgaattcctacaaatgtcagactctgtgttaccctcttgggagagatgtgtcagttatagcttagctctagaagagagtgttttgatattgtatatcccactgctgtgcattttgcttttatattattttccattgaacttaagagatgttctcataaaattaaggtaacaatmgcaagataagtatattagaacatggaaaatatttttaattttgagamacttaattataaaataatagcttcaataaataacaaatatagaaaagtgtaggaactggccatgcacggtggctcacaygtgtaatcccagaactttgggaggctgaggcgggcagatcataagttcaggagttcaagacragcctgaccaacatggtgaaacccggtctctactaaaaatacaaaaattagccaggcgtggtggcacacatctgtaatcccagctactcgagaggctgaggcaggagaatcacttgaatgtgggaggcagaggctgcagtgagcygagatcgtaccattgcactccagcctgggagacagagtctccaaaaaaaaaaaaaamagtgtaggaaatgacacatcagttatctacttgcctataaccaaaatttagatttgttaatatattaattgcatattttttaaatctagtcagtgtaagtctaggtatgtcaagttgtcaaaccttttagttttttcaaataagcttttcgaataaaggggagccacacacagatggggagccacacacagatttgaagccatcttttctgttattcatgtactcatctccctacactagaggtttcctcgtctcatgtttggtataaatacttctacacttaaataaaaaataaaaggcctttcgtacatacgtaagcatttgtgaaaaatatttttcacaaaaatatttttcacaaataaggtagtatttttctgaatgaactttatgattctgtagcatgcatattttgcaacatgatttttcaccagtcatgctgttatagaatgatttggttcactgctacataatattatgttgatatttatgcatatatataaacatttatctctctttgtattgtatgtagtttatttcttttatttgccatatggattcagacatatggctrtaccatgatttttttattaccatattgaaatttatatctatttctgttttttcttttataaacaatgctaagtatccttgtatttagatcttagaggttttgttagaatgtaggtaactaactagagatttccaagtcatacatgatacaaactattaattttattgtgtactttcattttcacaactgtacaatttatatttccccaacaatgtatgagtctacctgttctagaacagtatctgtgaagtctatctctttagttttgcactttatttaacttacatttgtttcactttaatcttaattggtattaactcatgagattgagtatcttttcagatctttatggttatttgtcttttctctgaatttcctggctatattattaattcatttttttttctgttgggttttttgcctttggtggctcatatttaagamattttttcycctaatattctgggaacaaatcttatcttctgcatgttgcagcaatacttgaatattttaaccttgggttctaacctcctttgtagtctggcctttgtgatactcttattgtactaagaattcaatttgtcccagagcctgagaaggataattatttatgttttgttatggtttgcttgtttacagtgaggcaaatataccttaaaactttgtgaaacaagagtccaacaacatttttaatatcagtactaagaattagagttgtacaaatatgcagtgaccctcaactttggctgcattagaatcacctatgagattttacttggactggggcattagtttttctaaaagctcataattgataatgatggacctttaagtttgaaaactatcctttaagccattatgactcttctctcaaagtggttttctggacagagtagtagaatgtgtgaagctccaagaacacacagagtctctcttttttttatgagaagttcatatccagcgtatagaagagtgcctgcaaccttaatgataagttgaatgaactaattgttttagctactaaattgcaatccttttctaatgctccctatcaaagattgtacttaactaatgtttaaatatcccacactttgaagtcttattttctttatatgaatttttgctagttttagcttgcaaggagattcatgccttatctatacttgcatctgagaaatacaagtgttaggtcagtttgttacaccaaactgcggatacagaaatgctaaggtaaattgtagggtcacctgactcctactcctagtagtagctcagtaaaaatttgctaatttgatttaatccataaaccatagcatagggactaaattagaaatgaaaaccatttccatgctttcttttatcttgttttaaggccatctccacaagaacagttgagatgttttattaaaaattggatttgaagagagatttgtttttttatcagaagctcatttatatagttgattttttttgagaagaagtttggctcttgttgcccaggctggagtgcaatgacggggcctcggctcactgcaacctccgcctcctgggttcaagcgattctgctgcctcagccttctgagtagctgggattacaggcatgcgccaccacgcctggctaattttgtatttttagtagagacggggtttctccatgttggtcaggctggtccagagctcccgacctcaggtgacccgcctgcctcagcctccgaaattgctgggattacaggtgtgagccaccacgcccagcctagttgataatttttaataaaattttatgagaaagcatcagagacacttgaaaattgcagtttcatactttggcttatactttttttaatttttatttttattttaagttcctgggtacatgtgcaggatatacaggtttgttacataggtgaacgtgtgttttggccgatactttaaaagccatagcaaatcacaacactttagaaactcttctactttaaacattttaaaatcrgctttacctgttggtttagtttccctttaagagtgtcactcaccagcctgggtaacatggcaaaacaccatcttcaaaaaaatacacacgcacacacctgtggtctcagctattccagaggctgaggtrggaggattgcttgaacccaagaggttgaggctgcagtaagccatgattgtaccactgcactccagcctgggtgagagagcaagaccctgtcttaaaaataaataaatagaaagagtgagtcatttatttcgtccttacagaactcaccattaagttagaataagtatgtgaaagcatttcacttcagaaccgtagtatcttttgatcttagtgactgttagttgttcaaatgagggattatatatgaagatactttaaatgtgaartaatacataaattaatgtttgttagcattttattacttatgttttcttgtttttatgtcattttcattttctcagtacttagacatataatatttaacattcaatagttttcattattcatatctttatagcccattgtatttaaattttctttttagcataataaatgcaataatatgaccacatctggaatctcaattttatttcgataattattaagatataacaaattattagagatacgtctatgaaaaattaaagaataaagtagttttgccttgttatgacatttctgtctttagaaataaaatagaattacatcattgttaaggctaactacttctggagtttaatgactagcaaagaaatctgaccatgtttcctccttcgtrtggctctcctgtcccttggcttctcttcttgcctgattacagctgtttttgtaatgctttctctcttcctctctacatccccgatcacttccaccacaagatattgtaatagaatgttcttaggcacattttaaaaatgggcttttggtacaaattcagaattcagttgtctttcaagatcagtcttctttatccatgatatcttgtctcctttatctttgccaaatggtgtttctcacttgtataatctaagagtactcaattatgtgattgatccgatcatgttattacaagctcttaagcatggttttgtggtatttttctttctaaaatcaagaaattttagaattattattgctgggtagaatttcagaggaacaatggaatggtttgcaaaagttattcttagatgataatgaggctttgaagtatttcggcagtttaaaagttagattggtgggccagtcacggtggctcacgcctgtaatcccagcactttgggaggctgaggcaggtggatcacgaggtcaagagatcaagaccatcctggccaacatggtgcaaccccgtctctactaaaaatacgaaaaattagctgggcatggtggcacgtgcctgtagtcccagctacttgcaaagctgaggcaggaggattgcttgaacctgggaggtagaggttacagtgagctgagatcatgccactgcacttcagcctggcgacagagcaagactctatctcaaaaaaaaaaaaaaagaaaagaaaagaaaagaaaaaagttagattggtgaggcagaatgtgatatttctccttctactattaaaaattccatacagcattatgtgaattaatcttaatccaacatttgacaaggatgtttttaaaacaagttaatgctgtgaatttggcactattgtatctgatattaatgaataattccaccgcttaaaattgtctaatttccatctggttgctgtttctcattttccttattttacatgtttaacttctaaccacctattcttttgcttctcttattttatactcagaattacccccttttagattaaaaaaaaaactttcatacttttgaaatgtaaaaatggacatatcaccawaaagtgagaagggaaccctaaatgaattacaaactttttgttttgttagagatagaaaaacttctaagatcttaaaagtaagatctgagtttaaaattagggaataaaataagttgtgttaagaaggacagggtcaccagttaggaggagattattgtaggaatcccagtgttggcacttgggactagtgatgacagaggagatggagagaaaaaggacagattcaggatatatttggacgtgaaagttgtgaagacttgataatgagtggaatgtggagggaaggaaagaggctatgaagaagaaactggttacgtactgttactatttcctgatggtgacgatgattggaggaggaactgttttatttccgttggggaagtatgaagtcaggagttctattttgggtatttagaatttgaggtatctaagtgaatatgcccagtaggcaactgaataattgcctatggaggtgagggagggtgaaggtacagtcattagtgtacattaaggacgtttaaaatcatgaaccttgttgaggatcattaggttgaaggtagagtggaaaagagcattcataattagttctgtggcttccagcaatcagagttggtgtggaggagaagtctgaggagcagagtccagtgtggcagttgtatacaatacatagacattgttttcatagaagttgtatatgcttaaggtatattgctctttgtgggttgtttttaaaattaaatatttggtgtatcctttgtaagattctaaacccccttctgaatgtcattgagtaagacaattctatacaacgccaggatgtttgctgtaaagaatggctttaccattgaaccattaaggttgggatatggtgcccattttaacccttcctggtctgcctctttacgacttagatttttagatgtcacctaagtttcttgctgggggagaaggactttgccagaaaattagccttaacatgatgtcctttgaccctcctcacaattttttgtcattctcttgaaataagttagttcattattaaagaagtcattttattttattttttatttgagtcggagtctcactctgttgcccaggctggagtgcagtggtgcaatctcagctcactgcaacatgtttctcctaggttcaagctatggtcctgcctcagcctcctgagtagctgggactacaggtgcacaccaccatgcctggcaatttttttttttttttttttttttagtagagatggggagatggggtttcaccacgtttgccagactggtttcaaactcctggtctcaaatgatccacccacctcagcctcccaaagttctgggattacaggggtgagccactgtgcccggcctaaagtaattttatttttaaaagctgtcatcaacatgaaaaatttgggattcatgaggagtgtttttgagtgttggatgccactgatatcagtgacaatatggggcagcagataaaagcctggtttataaattctgcaaggacggaactctttaagacaatgaaatggggactggcttagacatagctgcgtgcctttactccattagagacaagcacaagagtcctgccataccacatattttttgacatgactactttttgtttttcttcaaaatctaaactacrataaaatgaaagacaacagttattaggtgcctttatcttatgcagagtgctaagtactgtacattgtggtccccttgtgacccaacatgaattctgaaagggaaataaatatattgaacctactttgtagaggtcacaaaattgaagctatgattattggtattttagagagaaaaaaataagaaaagataatcaaaaaatatatacaaactacgatttcagattcaggtttttttggagattaaaatttctctaggcgtgcttgaaaggtgatggacatgaagtcatgttttggagacatcatgctgtgtttttaacggtccatttaaaaatgtattttatctctaagtgttaagtgttcccatgctgyactgataataatcttaatttttcccttctctcttttggtttcagaggaagaacttgtcgcttttcctaagcattagtttgttaattttctggggttcctcccttttgggtgcccggttatactggatgggaaacaaaccaccaagcttttccaactcggacaaccccgctgctgattcggacagcctcctcacccgcactctcaccttcttctacttgccaaccaagaacctctggctgttgctatgtccagataccctcagttttgattggtcaatggatgctgtgcctctgctcaaaacagtttgtgactggagaaacctacacactgtgrccttctatactggactccttctccttgcctactatggtttgaagagcccgagcgtagacagagaatgcaatgggaaaactgtaacaaatggcaagcagaatgcaaatggacatagctgcctttcagatgtggagtaccagaactcagagactaagtccagctttgcatccaaagtagaaaatggcattaaaaacgatrtatcacagagaacccagcttccttctacggagaacattgttgttctgtctttatctttgttaatcataccctttgttcctgccacgaacctgtttttctatgtcggctttgtaattgcagagcgagtattatatattcctagtatgggcttctgcctactgattacagtgggtgctagagccctttatgtcaaagtccaaaagcggttcctcaagagcttgattttttatgctacagctacactaattgttttttatggactcaagactgcgatcaggaatggagactggcagaatgaggaaatgctttatagatcagggataaaagtaaacccagctaaaggtaatcttttattttatgcttttgtctggatagtttacactttcagcctctttatatctttgcttcttgtcttaaaacacagtattaaggaggaagaggtccttttatgcagtacctgtatctttcattctttttatttttttaaagagatatgccatataaccaatttagagacatatccaatattccttacttggaataagaaaatatttttctgtgtttctgactatgtttgtccagaagaattagagctcctgttgtgtaaacaatattgactattccaagaatttagaaaagagcttggttttcacattttaaaatactgataggtacagctcttttatcatataataaaagttaggctatcccactgaagtatacttcagctcttctattttccaagcatcgcctgaggaaatacaagactttcattgaaacctttaaaagatttggagatttcactgcctctgaatcctgaaagtatgtctctagatgtcagtgtgtacacattcaggtatgagtcacctttggctgcgcagaggctgaattatctgagtgttgccaagcagttagcaagtttttacttgagttcttaagtcacttagaaaaacacacttctcactacataatgagagttttgattataccattcatgattgctttagatttagaaaattacttgagcaaatctcagaatcgatagagtagaaagtagtttcctttaaaataaaaaagtcaaaagctatgacaatggatgactctagtttaggcaattaaatgtattggaagctagaggacaattacataaaaatagatgtaaatttttagtgcagaaatatatcatagtaaatagtactaaagagtcttgttcttcataagccatttttattcttttttgagaccgggtcttgctctgtcgcccaggcyggagtgcaatggcatgatctcgacttactgcaacctccacctcctgggttcaagcgattctcctcctccagactccagaggcactgagattacaggcgcccaccaccacacctggctaatttttgtatttttagtagagatggggtttcaccacgttagccaggccggtctcaactcctgaccttaggtgatctgcctgccttggcctcctaaagtgctaggattacaggtgtgagccaccacacctggcctatttttattctttaaattatgtttgctgatatagcatttgaactggcatttttctactctttccaacacaattctatatcaggattaaaagaaggtgtaaaactgttccagaatatgaaaatggcctgctaataggtgtatatatatatatataaagacctagatactccaaaagctactttggcatgcttgtctgatgagcacaaattaagtcaagaattcagtgagcaactacacatttctttaaggaactaattgcttgtacttaacactgtttaataaattgcagggattttaatgggaagttgaagcattaaagttgagctactgcatagcatgtaatttctcaattctctgtgaaaaatcattaccatgtgacttttcctaggtggcgagtacttcacagtttattgaatgcctggacccaaatcttgtaaaaatcattacaattagtttttgcagaataattatcagctagtttttctgcactggtagatgtaaggttatagaataaggctatgttgccaatttattttcctgctgtttaaaacatatagggaattgaaaaaattcttggcatattatttgcatcacagtgttgttctgagggtttattaaatttattaagtttcaggctaagctgctgttacaaaaagccaagacaaaagtggcttaagtaagatagaagctttattctttcatgtgacaatctaagtatgtgcaaacacagagctgataagatggcgccatgggttctcagaatccaagctatttctcttttattcccttgccatctcagtggtgtcaccctgtccttatggtccaagatggctcattatcacattagcacttcagctgacaggaagagagggagaaagggcaaatggtgggtgtacccratcttagagcatattgcagaaattgcacacaccatgcttgttcacagaccactgggcacacctacctaaaaggaaggctgggaaatgttatcttcattctgggaagccaagtacccagccaaattttattacactgcaaaaaggagagggcaaatactcagatgctagggtataagtagcagtcagtcagaataagtgaaaacgttttgtaacgcttaggtattttccagcattagctggtatttttgctgaaagttacgattctaaataagatattttggtacacagttagaatgtttgatcatttctttatttttccattcactaagtaaaacaattattaaacatttccttggtttccaacattttcaggtgtccatcctaatacttaggaagtgctgcagaatttaggcactccaaaatattattagctaaataaatgtacagctgaccactaccatgataagttctttcagacatcaaacactgaattcctgaaacaccccaccccactcatggcccagtcaactgccttacttgcaggctttaccatctcagttgatggaatctccatttccccagcagctctggccragaattctgaagtcatccctgcctcctcttttcccttcacagttgacctcctcttttcccttcatagctgacatccattccatcagcagatcctctctgctctgtttgtaaaaatacatccagagcttggccactttttaccaccatcactgttggcatcatggcctgggtgaccaccatcttttatctggaatatatatataggaatatatatatgtgtggaatatatatatataagaatatatatatatgtggaatatatatatataagaatatatatatgtggaatatatatatataagaatatatatatgtggaatatatatatataagaatatatatataagaatatatatgtggaatatatatatataagaaaatatatatatgtggaatatatatataagaatatatatatgtggaatatatatatataagaatatatatgtggaatatatatataagaatacatatataggaatatatatatatccggaatatagatataggaatatatatacatatccggaatatagatatgtaggaatatatatacatatccggaatatagatatgtaggaatgtatatacatatccggaatatagatatgtaggaatgtatatacatatccggaatatagatctgtaggaatgtatatacatatccggaatatagatctgtaggaatgtatatacatatccggaatatagatatgtaggaatgtatatacatatccggaatatagatctgtaggaatgtatatacatatccggaatatagatctgtaggaatgtatatacatatccggaatatagatctgtaggaatgtatatacatatccggaatatagatctgtaggaatgtatatacatatccggaatatagatatgtaggaatgtatatacatatccggaatatagatatgtaggaatgtatatacatatccggaatatagatatgtaggaatgtatatacatatccggaatatagatatgtaggaatgtatatacatatccggaatatagatatgtaggaatgtatatacatatccggaatatagatatgtaggaatgtatatacatatccggaatatagatatgtaggaatgtatatacatatccggaatatagatatgtaggaatgtatatacatatccggaatatagatatgtaggaatgtatatacatatccggaatatagatatgtaggaatatatataggaatatatatagagaggaatatatataggaatatatatctctggaatatatatataggaatatatatctctggaatatatatataggaatatatatctctggaatatatatatataggaatatatatctctggaatatatatataggaatatatatagagaggtatatatataggaatatatatacctggaatatatatatataggaatatatatacctggaatatatatatataggaatatatatacctggaatatatatatataggaatatatatacctggaatatatatataggaatatatatatatctggaatatatatataggaatatatatatatctggaatatatatataggaatatatatatatctggaatatatatataggaatatatatatatctggaatatatatataggaatatatatatatctggaatatatatataggaatatatatatatctggaatatatatataggaatatatatatatctggaatatatatataggaatatatatatatctggaatatatatataggaatatatatatatctggaatatatatataggaatatatatacctggaatatatatataggaatatatatatatctggaatatatatatagagagagtaatatatatatatatatwtttttttttcttttttttttttgagacagattctcgctctgttgcccaggctggcatgcagtggtgcgatcttggctcaccacgacctccgacttctgggttcaagcaattcaccggccacagcctcccaagtagctaggactacaggcatgcaccaccaagcccagctaatttttgtatttttagtagagacgggtttcactatcttggccaggttggtctcaaactcctgacctcgtgatccacccgcctcggcctcccaaagtgctgggattacaggccttatctgtaatattagtaaaagactctcacctcacctcccagcttgtatttcttgccttttagcatgtcttgtacttttttctttygactcagacatgatgtattgggtaataagaaatgaggtgaacaggctttattgtgagattttatgtaaatytggttaggagttggactgtattttgctatagccgtgggtgccagagatgccacattcctctggtggccttgtttttggtcttcccagttgtctgtgggctttcccacagactcagtttgctttgcatctatttcagctgtaatcaactattattatactgcagctctgttggtatgggggaggaaaaatgttctattattttatgactaaatcttcgcctctctgggctactaccttcaccaagtgtttcttctctttccttatgtcccactccagttaagacagaaaggctagagggggctgagttgagaggaatggttttcccccacggctctgggacaaggctgagatctttcccttacggagttagtggtcttttgtcatgacagatgctctgggtatatttcataaggtttattcctctcctactgccagagccaggagaacatctttcttggctcttcccgatgacactctgttggggtcccgggaaggaaaacccccaaaagtttgggagtcccctaagactgccaccctcaggagtttctgattctaaaactagtttatgcttagcctccagcagcttgtcaaaatgagtagtcaattgtttctaacagtttctgtctccagcagcttctgctccaggtaagctctcctgtgctgtgtctctggatttgtctttctctagatttcagggtggtggttggccctgtgaccccagttcactgatggttccaagacaagttattgattttcagtctgtttagctttttctttttgtaatgatgtgagtgacaacttcacattctttaatgtctcagctgaactcctgcttctattcaccttcaaagtctatgcttaaccagcagccatggtgaccttttggaaacacaagtcagggcatggtgttccactgtccccaattattctctggctgccagtttctctctaattgaaggcacataacagtggcggggagggagggagagagtcaagggttcaaaaactatttattgagtactatgctcgcttcttgggtgataggttcagttgtgctccaggactcagcctcatgtaatatgcctttgtaacaaacctgcacatatagccttggaatctaaaataaaagctgaaaaaataaaaataaataaaattagaacagttctgtactttaaaaactctagctagctagatagattatagatatgatagatatagatgcacacagtctcaggaccctgtgtatactcaccagcctttccttcccttactccacaccagccctgctggcctctttgatgtgccttttatatgctaggtaagctcctgccgcagagcttttaccttcgtcattgcttcttcctgcaatgtgttctcctggttattctcactggggtctcccttacctcctttaagtctctgaccaattgttgcattatcagtaaggtgctttatgtaaaattgactgccctgctataaattacagccacccctccacctctgtcttactgagcattccctatcctctttccatgcttcatttttatcttagcacttatcactatttgacatactatattttctataattatgtgttcattgtatgaacgtgttgtcagcatacactagaatgtacaacacaagaaggtagagtttttttgtttttgttttgtttttgttttgtttttttgagacagagtctcgctctgtcgcccaggctggagtgcagtggcgcgatctcgcctcactgcaagcgccgcctcccaggttcacgccattctcctgcctcagcctcccgagtagctgggactacaggcgcccgccaccacgcccagctaattttttttgtatttttagtagagacggggtttcaccgtgttggacaggatggtctcgatctcctgacctcgtgattcaccctcctcggcctcccaaagtgccgggattacaggcgtgagccaccgcgccccgccgatatttttacattttaaaaaatggcatagatgctgcaacgaggactgtgcctggtaaagcaaaggcattcagtaatggatatgttcagtattattacagtcatagtccttctctttaaggagttcatgatctgtttacagatataatgtacatgcatgaaataaggcaaaagtgtgaaatattatgcctttgatatgccaggtagtgagggatgctttatcatgagagggttagaatcgggagtagagttagtttcggattgtgtgactgcatctgtgtgtgacatatgcttccattttgatacaaggcaaaactcttccaatccaggtttcttatatttttttctgtttataagatgttaataataattctggctgtagttacttccttagcaattatgagactgtcagtaatcttccttaaggcagattttcttagtctaatacattatttgaacctaagtaaaacattagaaaccctataaagccagtcttatgtatgtatggttttctgagattacagatggagttaggattttttttcttcctttgaaagcctttgcaaattctggaatacttcagtctaccatgtgctttaatggaatatgattttaagcctcatgaaacagtatgcattaaaactgctgccttcagtaatgggtcctgtagacagctgccagtcattaactgattggatgcaaatgacgatgagtaaaccctgtcatagtgactgtgctgctaatttatggtttaaatctggatagtggagaaatgatagctgatttggactatgtaaaccacaagtcctgtctcattatgtggtttataatatcaggaaaatactagacatagttgattactgtagtttgctgatttcacaatgactctttgcatttctgtgcttaggaaaaagcaaattttctctgatgacgccttaatgagcaagccacattatatctgaaagtgtttcccccgttcgcctttaaagcaactcatttttaaagccatattgattcgtatttgcttaaagaaagaatttcttgattcattacaaagcagttaaatgtgtgatcaccctttttgctgtggcctcctctaaatccccatgtggctctagtctctgtagaatttggcaccattgatctctgttaccatagcttttaagccactgcttggttttgactatctttctccaatttccgacagctttctctcttctatgatttttgcttcctccctaaactaatccattcttcaagttttttgtttcttttttttttttttttcctaaaacctgcctttattttcccttccctacagtatctagaacatttcttggtatatagtaggggtcaataaatatacaattgaatttctaagttatgttctttgtgaccgcctatctatgaggaacttttccacctgggtgatctgccgggatctcaaactggtcacctctcttccctgaaatcaacttcttgcaaacttccttattaattaacatcataatcccaggccaacaaagttatagataagcagatcagtgagcacataaacataaaataattgtagtatatatggcagcacatctggcttgctaaaggcattttaaaattaggttatagattcaaaatcaaataggttctgagaatggtttgttaactctatgtcaatttgatttaaaaaaatatgactatggtggttaattgtttgaaagcaatttcttaaatagttaagaacaattaagagtgaatctgaggaaaacttaagtgctaaaggttgtttttaatgcccatttttaatgtaaatatgtgaaatgataaatacaaaagatatatgtaaaatttcatacatatttggaactttcaaggtgattatcctagcagtctgcattcactcccccagtgcaaatgacaaacattacctttttagatatagaaaaacacagttggccaggcgccatggctcacgcctgtaatcccagcactttgggaggccgaggcgggcggatcacctgaggtcaggagttcaagaccattctggtcaacatggtgaaagcctgtctctactaaaaatacaaaaattagccgggcatggtggcgggcgcctgtattcccagctactcgggaggctgaggcaggagaatcgcttgaacccaggaggcagaggttgcagtgagccgagatcgcgtcattgcaccccagcctgggcaacaagagcgaaactctgtctcaaaaaaaaaaaaaaagaraaaggaaaaagagagagtcaaaattgtttcaattttgcagcgtctgacaatttttttccttcatagattcctgcaaaattggtggttctatttcaatttaacatggcatcaaattttaagaaacaagtatgttgtaggaatatcatttaggaaataactcacaatttaagtgaaactcaagcctctaagccatgtaaaaattgactatttccttgtggattttatagtctaagcttttgtttacctcgaattgagtgtctttaactatgatgagttgtaattaaccagctagctttgaaatggtgtaacaaattctattattatatttcaccaataatttgtcatgatatgtccaagggaagataaaaatttttcaacagaagttcagatttttataaaacatgaaatttaccatttaaggccagacacggtggctcaagtctgtaatcccagcactttgggaggccaaggcaggcagatcacatgaggtcaggagtttgagaccagcctggcccacatggtgaaaccccatctctactaaaaatacaaaaattagccgggtttggtggcgggcgcctcaaacccgcctgaggcaggcgcctcctgcctcagctactcgggaggctgaggcaggagtattgcttgaacccaggaggcggaggctgcagtgagccgagatcgtgccattgcactccagcctgggggacaagagcaagactttgtctcaaaaaacaaacaaacaaacaaaacaagaaaaaagaaatttactagttaaatcaaggaggaaaaccactatagtattttgttgaaactgactggcctgagttgtgctgtaaaacacagcttttcatttttaccagagagccttggtaagagaaactagctaaaagcatcccaccaataaaggctgattgagagacaaatagcaggaagttaaatctggtttccataaggaaattatgtgttttgtcttctcagtccatatcttctctattgagtagaaaaaaatagataaacaacagggctggcaagaataaaaggaaggtatctcattggctgaactagactgaaatattttttaaaagcagatttacatttactaaattgttaaattaaggcccattttaaatatttgattcttgaagaaatcaagtatggttgttttccatttgggatgggggagttgcagaagttcagacgcctttaagaatgaattggggccgggcgtggtggctcatgcctataataccagcactttgggaggccaagtcgggtgaatcatgaggtcaggagttcgagaccagcctggctagcatggtgaaaccctgtatctactaaaaatacaaaaaattagctgggcgtggtggtgcgcgcctatagtcccaactactcaggaggctcaggcaggataattgcctgagccgggcaggtggaggttgcagttagttgagattgtgccactgcactccagcctgggtgacagagtgagactccttctcaactccatctcaaaaaaaaaaaaagaatgaattgacacagaaatgttttcctgttgtctgactctaatgatttcaagtacagttttgtggggcaggaaaaaaaatccagaccacaacagactcagtgcaagtggtcctgtgatgtattatagatgaagtgggtgccatattgctgactcttaaaattacccacaacaaaacttttagaatctttatgggcttttgaaaccttcaaaccttaaaattagagttactttagattatatttatcacggtttatatgctaaaatacttgagactagcatatgattaagcatgaaggtaaatttttctgatttccatatttttgtgtttcttaaaaatgtcctaggccaggcgcggtggctcatgcctgtaatcccagcactctaggaggccgaggtgggcagatcatgaggtcaggagttcgagaccagcctggccaatatggtgaaatcccatctgtactaaaaatacaaaaattagctgggcatggtggcaggcacctgtagtcccagctactcaggagcctgaggcagaagaattgcttgcacccagggggcggaggttgcagtgagccgagactgtaccgagggcaacagagcgagattccctctcaaaacaaaacaaaacagaacaaaaacaaaagccctaacatttctttacttttattaaatatatatgaaatatatcattcatagtcatataagtatgcatatacatcatatttgtatagtttaaggaatactactgaaatatctattctgtagcttattaaaggaatattaccagtgtctttgaggacctttccctatacttctccttatttcttgtttaaaaaatggtttttgattttttcaccattgattttatgtacttacagttttttctgtaggtaacttttatcagtagagttttcctcatttctagtttaagaactattttatgaattaatattgatgatgataggttttcctcacttagtctctttgatgaattatattaatagattttctaatgttgaacctgttttgcattcctagattaagcccaggaattgattataatgtattatcattcccattttcttctacatttgtttttcatctgtatttctgagtgattgtcagtttctctcttgtggtgtcatattctggttttaaaatcaatgatcttaaccttatagaatcaggttaggagcattacttctttttcattccctcaaagattttatgtaaaattagaattatttttttcttctatattaggtagaatttacctgcaaaactagctaggcataatgttttggttatagatgactctttttttttcctgttgatttaatttctttcatagttttggaaagagccaaatttgcttttgggtcagttttagtaacttttttctctgtgttttgttcaattggtacaatgttacacataatattcttgtaatatctttctaaaaatctctgctacaattgtagttttaaaagtgtttttgcttggatactcttcaggcaacagatgtagtattgccccaaactttgtgaaggtggacctacgcataagaattcccaaggaatatttttgcctattttctgtttgtccaaataggccaaacagtcacccatcttttcattctctaagtttttkaaatttttttgttgctagttaagtgatgaagtctgtttcctttcaggcagatcacagtttatgtggcttctgcagtgtgacctcctgcatgaagttcattaaagcctaaacctaggtttatctgtttgacagatctagtgtatgcaaggtgaataccatcttcacagctagtttacttttctggagtcctgcattcatgaaggtttttgtttgtttgtttttgagatggagtctcactctgtcgcccaggctggggtatagtggtgcgatctcggatcactgcaacctccacctcccaggttcaagtgattctcctccttcagcctcccaagtagctgggattacaggcacgtgccaccacaccctgccaatttttttgtatttttagtagagatggggtttcaccatgttagccaggacagtctcattctcctgaccttgtgatccacccgcctcagcctcccaaagtgctgggattacaggcatgagccaccgtgcctggcctcatgaagtttttagacttcaggtttgcccttactttccaaccaattaatacattcatttgcaaatatttttatttttaatgtagcatttttattggttctgtacaaggtgtgattctctgaacatagagtttcactatactgtcagaaaatgagacctatgaaatatcttcaaatctgacacctattaaggaatgattagctatgttagaagttctatttgagaatagagttaagatcagagctactatttttgaaatatttaattctctttcagcaaaagaaaacttaaaagaagctaaaaatatgtgtaaaaacactatcaaattacaggtatttgaaccctctaaagcagggtaaaatatgttccttcctttctgtaatataratacaattgctgatattgttaaagagcagattttcgagaggacaaacacctgtcttagttttagccttatcacgcactggtgcctatttctggtgatcatggattttgaagagaattccagataagtctcaagaagttatggaaaaaattgagatattcaagtcatataattattgtaaaaggatttgatgtagaggaagtgtgagccgtattttaatttttatgyatgtgggcattaaattagaaatcttactgaaatgggaaaatttcccctgtccccctcacagcgcgtgtgaagagggtgtggctcacttcttctgatcaaacctctaggggaacatacggacaggcaggctccaaccccaggctccaaccccacggcagtgcctagggggtgaatgtttacagctactgaagccccagtgggcatgttacagtatgctcctttagtttagccctctataggcggcttgtgttagctcaattagacccccttccttatcacaaggacagagggatttctgtatcccagggtttcttaccttggtgtatcagaagaatcggattacatgtgggcttggagaatgagtggaaggtttgattaagaagtagctcttagcagacggagggccagaagggagatggatttcccatggagtccggctgctccccagcctgggctctcctctgattgctccggccaaactctgcctcatttggctggtggatgtccttctggtatgcccctgtctgtgtccagcctcttgtcattttctgcagatgtgttcctcttgccatccagcagcagcttctgtgtgtctgcctgctagggtctctgggttgtttttttcttttttttttttttagagacagaggcagagtctcgctctgtcgcccaggctggagtgcagtggtgtgatcttggctcactgcaacctccaccacccggtttcacgccattctcctgcctcagcctcccgagtagctgggactacaggcgtccgccaccatgcccggctaattttttgtatttttagtagagacagagtttcaccgtgttagccaggatggtctctatctcctgaccttgtgagccacccacctcagcctcccaaagtgttgggattgcaggtgtgagccactgcgcccggcgggtctcgggtttttacagccccagggtttgggtgtgggggggccagggtggtcttggaaaatgcaacatttgggcaggaaggcaggagtgcctgtcctcccctaggtctgttgggtggagccctagcaaggaaccatgccctcctctacccagcccttcccccacccccgcccacctccagcctctgtgtcatttaaagggaccactctcttcccttcccagcactctgttatcatcatcacttgaccatggcttctcagtgtaaatttctttgcagttttaacattatcatccaaggggatctaggagggacataaatatcatgtgcttgctcaaaatgaaataatgatcaaacatattagacgttcttttttaaagaatgataatattgttttctaagtataagccgtattcttatttatttttttcttttctttttttgagatggcgtcttgctctgttgcccaggctggagtacagtggcacgatcttggctcactgcaacctctgcctcccggtgcaagtgattcgtgtgcctcagcctccccagtagctggaattacaggtgtgcgcctgtaattaaccatgcctggctaagttttgtatttttagtagagatggggttttgccatgtttgctaggctggtctcaaactcctgtcctcaagtgatctgaccgcataggcctcccaaagtgctgggactacaggtgtgaaccacctcgtccagcccatactcggatttggttagacagtacctagaaggaaatttagaacaacaaaaacatcatcttgagagcagaactgtattggaggttttattttgtcttgtatttaaggattctaattcccaataataccagctgcctctcagcccattctttcagtgatcttaaacagcataattcagttcctttttgcaaaacacataagatattaaaatatcagcattaatatcttttttggaagcactttaaacatatgttttaattatgaaaaatttctctgtagacattttaagtgtagaaagaaggaactgggttagaaatgtaatatatcagctcagagtcaagttttgacaagaacagattacccaggtgtcaaagcatggcrttttcttcttaagatgcctggaatagcagaggaaacttacagtcgtttaatrtttggggctctgtgtaggaacttggaagtcatatcataaagaaatgtgattttttttctgctcttcttacctctccttgcttaggataagagagtaaatatctcaacttgtatttcatgagactaccagcaaagaccacaaggtctaagatattttgaaatgttttcctttttcaccaagtcagttgacttaatctctttgagatttgcaaacaagttttgatggtttgcagtactggtgttgagtaatctgaatattttccaaagatgatggcatcatgttaccttcacaattgtggttaagaatgaatggtggttgggtgcagtggttctcgcctataattctagcactttaggaggcagagatgggtggatcacttgagcccaggagtttgagacctgcctgggcaacatggdgaaaccctgtctccacaaaaaattcaaaaaatagctgagtgtggtggtgcatacctgtagttgcagctacttggggggctgaggtgggaggatcacctgatcctggggaggtcgaagctgcagtacgctatggtcacgccactgcactccagcctgggtgacagagttgagaccttgtctgaaaaaaaaaaaaaaaagaatgggtggtaatattcatattcatgtaaatatttacaataattttaagttagaaaggagtttctgtgcttgcataatgaaaacattagtatattacgattactgtacaaacccatgtattctgcatttttcttatctctaatcacagtgataaatttaaaattactttttgttcttgaaatgctattatttggaagcaacagtacagaattttaaaatttcttttgccattacactttagcacaatgattttgagatagtttttgagggcagttgatgaagtcactaaagtcctaatgccatgcttctgttctctgtggtaccattccagaagcaagaggctgtgcactgctttgggcagaggaccatcatactttggttttggcttttgctggttctcagctcattctcacattgagcctggagcagacatttacttttgaggttttaagttaaaaattagggtttaaagaagtatatcctaagacccagttctgattatttgaaaggaaaatgtggcttctctatgagttttaatcatcctgacatgtcaataatctgacaagattatttaaaactcatgaatagaatatatggctttatatctaagaccacacatctagtcatattttttaattggtaatattcattaatcactggttttgacatatttcctgatttttcctctatcttacttaaccctctgggtactagcttctttttaatacatggaagtataactttctgaattgtagtttcaagacttttatatgtataacagcattctctatttcaatatcatgtttttcagttcatacaaaaatggctcatactcaagtaccgttgtcccttgatatatgtggaggattggttccaagaccacacacttaaaaacaaatccctgcatactcaattcccacagttggccctgcagaaccagaatataggaaaagtcagtactctttatacgtgggtttcaaatcccacaaatactgtattttcagtctgtgtttggttgaaaaaaaaaatccacatataagtagaaccaggcagttcaaacctatgttgttcaagggtgacatgtatttgcacagtcttcagaattcttgtctgcttgtcctgtaccagcaaagaaggcaaagaaaattaacttcccattcttttctgttgttaaatcaactgaaagtacagaagaaatgctttaaaatgatacgtgcccaagatttttgcatatagcaaagataattgatattttattttagagatctcagttatttacaaataattgtcctcattagcacatgtaaatatttttctactcacataaatattttatttgcattttttactcatcatttcttttttttaaaaaaattctcttttctctagtatttacttttgccctgttcaacactagctactggattgatcacagtgaatgccaaaaattaacatatagaagttaacacatggaatattctccctgatgtactatatttgagaggtactatatttataacttataagcagatttttaaaataagatgcaatctttaggattttcattattttttaaatcttaaaattgacctttagagtattcaatattgcctttagttatgtttttsttgccctggatttggttggcaatgcgattctcagtagcatgagcatagataatgaatagggcagatttactataaaagtgtatatcgaattggttatgcttttagtatataataatccattaatgaaatataccatctccataataatgtgctttccaaggagttacacatctatgttaatttaatatgtgactcagagtttagtttaggcaagcatcattacaactcacttatttttttttttttttttttttttttgagacggagtttcgctcttgttgcccaggctggagtgcaatagtgcgatcttggctcactgcaacctctgcctcccaggttcaagtgattctccttcctcagcctcctgagtaggtgggattacaggcatgcaccaccacgcccggctaattttgtatttttagtatagatggtgtttctccatgttggtcaggctggtytcgaactcctgacctcaggtggtctgcccacctcagcctcccaaagtgctgggattacaggcatgagccactgtgctcggccttacaattcttttacagatgagaaactaagagaggcaggatgcttaaggagcatggttaaagattccaaactttgcagtaaggtagatgtgggtattgattataactcatttatagtggttattgttcctccttattagtgttatcatctatagagtgagtatagcaataccatcttgtggttatgcatagcatacctagcccagggtttgtcccacattacatatttactaaattattgcttttactatgaaataggaagtagaagagttaagtaatttacttggttgtacccaaatctaactggtaacagggctagtactacaacgtagatttcggacattttgttttatgtttctgtatcaaagttcctttagtgacttatagtaggaaactaacctcgggcctcgggccattaggtggcaggaacatacctgatggctggatccactgtgagataaaacagatgtggtttgggcgataaaattaaaaagggaatttaagggagaaaatggattctttttgttccccctgaagttgtttggaaatcgtaattctgtacaagtcgtctaagaactcttggtctttctaagggttcttcatcttttatacctgaaccaaactcaaatgatcccaattgtgttagaagcaagctgtaagggctgcttggagacaattctattcctgatacaaactcagaggcaacttgtactctttgggatttaccataaatcaaaaggaactggtattttaatggaagacaaaatctatcattgttaataatcaagactgcgtacagcaactcaacgtctgtcatccctgctctttgggaggccaaggcaggaggattgtttgaggccagaagttccagaccagcttgatcaacatagaaagacccagtatttatggagaaaaaatttaaaacagaaaaataataattaaaaaaggtactggttggatgactgcatgggctatgcgatcagccatatatgaggaatttctaaaaagcctttactgaattggtatagttgttacataaacaggaccactatttatgacattctagtatatatattccccaagtgttccattaactacttttgacagtgtgataggcaaaataggtttgttgcctgtgatttgaggagagcctcaaggcttgttgctcccaaattctctccctttggccagtcattatatttgaaaatgcagttatattaattgtctttactataataccatgtgctagtttgtcagaaactgtgtagagcacattgttattagggacatagggcaaaattgagaagccatgggaaaaattttgcatagagaagaaatggatggaagacaagtgcatgcaaaccccaaaataaaaatcgaacactatgagtggtactggcagcagacctgagccatggatgtgaggatggctcatagtcaaattcaggaatatggtagagattgcagatggtaaaatgccaaggaacaaccgtagatacactaaaacaaaacgaacatgggtgctggattatacatgtggatattacagtatgcacatagatgttatagtgacaaataatgctgtctagactaacagtgttaatatattattgaagtactaaatttttatgtttacattaaaatttttttcttattgggaatacgtttagtttcagatctatctgaaataactacagataggggaaagagaaataattgtatcttgtagaattcctgtaattagaattacatataagtacataggatatgtgttgtgataacatatgaatcatgatctttaaatcatagccacttcttctacttaatattttaactatatctgttttatttacctacttactattatgttcttttctgtaataatccgaggtataatttcttcagaaaaaataaattcctgtaggcttacaaaggctcttatttccctggagtcacatgaagtgactatcatacaattagtaaaatgctcagtctacaagtgttgaccccgccccatagtctttgctaatagatggagtgggaagacagtctactttaaaaaacagcaacaacacattcatgctcgttttcagttccatgcagttaaatggctctttttctcctccctttgttttctttttttcctttttttctctctccattgacattagaaagtttaacataattaacatttatattttaaaataatatttatttaaattgtagctggtaagaccattcatggggcacatccaaagtccaagacttccattatggttaaaggcaaggactttggaaccagacagacacatctttttgttctcttatctttttgagtgtcacttctgtaaggcatggtttcttcttctattaatagtacaaactggatgataatgtaagctcatttgttatgaggattaggagagatcacatatgcatacacaagtctagcttaaaattggcttttattttatttatttatttatttatttatttagagacagagtctcactctgtcacccaggctggagtgcagtggtaccatttcgtctcactgcaagctccgcctccagggttcatgccattctcctgcctcagcctccccagtagctgggactacaggcccctgccaccaggcccggctaatttttttgtatttttagtagagacagggtttcaccgtgttagccaggatggtcttgatctcctgacctcgtgatccrcccgccttggcctcccaagtgctgggattacaggcgtgagccactgckcccggccagcttttatttttttgagacagggtctcactctgtcacccaggctagagtgcagtggtgccatcacaaatcactgtagcmttaacctcccaggctgaaggcattctcccacmtcagccttgacctcctaggctctagcgattccctcaccccagcctacagcatgcatcaccatgtctggmtaagttttgtatttattggggttttaccctgttgcccaggctggtcttgaactcctggactcaagcaatccgcccagcttggcctcccaaagtactagattataggtatgagccactgcgcctggccaaaattggcttttaatctgaataaaaacaattcttagtagmtatattaagcactactatattaagtgcaaataagttattttcttttgcagacggtttgtgatagatgactggcaagattgcaatttttacctcctcatggaagtaacactttgatttcaaacaagtaactcagcgttggtggaagcaaaatttaggatttatcccctttttaatgcagttaagtacttcaattttggcagattcttacatagaactcaagattttcatatagggacaaagacatatgttaaatttgtaaggtttaaaatgaattatagctgaagcacgaaacaagaatgagagtccttaccacatttagtgactgtgcagtgtattagtaaaatgaaaatgctgagatgataacccaaagaggagtgattacttatgcagacctgaatgttaaataggtaaaaattaaatattaagaaattcatttatctttttattttatcttttttcttttcttctctctctctctctctctctttctctccctctctctctctctctctccctctctttgagacagagtcttgctctgttgctcaggctggagtgcagtggtgcgatctcggctcactgcaacctccacctcccaggttcaagtgattcttctgcctcagcctcctgagtagctgggactacaggtgcctgccaccacgcctggctaatttttgtattttcagtagagatggggtttcaccatgttggccaggctggtcttgagctcctgaccttgtgatccgacagccttggcttcccagagtgctgggattacaggcrtaagccaccacacccagcctcttttttaacaaamcaaaacaacacaaagacatgtatttggctcacagttttagagactgggaagtccaagagtattgtgctggcatctggcaagggttgaactgtaacagaaggcaaaagagaaagagagcacatatgagagaaaaagcatgaggggctgggcttgcttttataacagttcactctagtgaaaactgacccactcatgtattaacattaatgcatccatgagggcttcacccttgtgacccagtcacttcttattaggacctacctcccaatgcagttacaytgggaattaagtttacagcatgctgagttttcagggcacatgcaaaccatacattttgtaccaggcacccaaaatttatgtccttcttataatgcaaaaatacattcatttcatccccaaagtcccaaaagccttaacttgtttccatcaactcaaaaatccaaagtccagagtcgtatctaaatgagatatgggtgatgctcaaggcatgatctgtatagaggcaaattccttccagatgtgagcctgtaacatcaaagcaagttatctacttcaaaaatacaacagtgaaacaggcatagggtaggcattctcgttctaaaagggagaaagaggaaagaagaaaagagtaactagtccctactaaatccataacccagtagggaaaacaatacgaagtcttaaaactggagaataatctcctttgtttccatgtcccatatcctgagcacactgatataggggttgggctctcaagacactgagaactgccacgcccatggctttgctgggctcagcccacatttccgctctctcagamtggcatcgtacactggtagctctacagttctgtggtcttctgagccctcccatggcaatataggctttttctagcctgattctccaaatttccaacctccacccgttatgcagttccaaagctgcttccatattttcaggtgttgttatagcaacaaccctgctctaagtatcaattttctatattagtctgttttctgctcttctagctattttttcaaagagcagtgtatgccaaattatgaaaaactcattataacttcttttataattaatgaatatatataatttcttcaaattactaacataagaaaaaatcttaaaaaactttctcaaatctccctgtattgattttgtgaagtatatcagagatatgaaattgcaatagttacttcagagtaagtttgaatttactctataaacttaaaactaccatgtatttgaaattggaactttgaaaaaatttagaggtatttattgtagcagatcacagcatttctagagggacctcacatttgattttctctttagaacaacttcagcaagatgggaatatttaattgttcttctgcctttcaaagaacatcaaaccatggcagactgtggactaagtacaagagaagctttcattgtgaattaacatcaagtttcttagtaaatggataccttttagaggtagtttagtttaatatcaatgtgaagggcccttgagatataagagttattcctacttcttcacttcttgattttttttagcagaagaatttctttttatttttgaatataaaataactccacagatcatattttctagagcttatccagtgatatttagaagtgtctgtttgccttctcttaatatactaattatatatgcttagtcttaggattgaagttgcttacttattaaacaatgcttattaaatctctgtcacatgtaaagtatcttcagggcactaagaagaatggataaatataccaaagttcccagccggcatctttgagcaacaaccatttgtttacgtaggcaggatatgttcagttccaatatgttaacaggaaaatatgacatataaaattatattcccaaagaaatgtaaaacatttgatatactacttggcattaatttttctctggtctgaaaaatatattatgaaatatggatacyagatagttttrttttgttactactgagggtttttttttccccctagcagttctgagaggataactcatttggataattttgttttcatatttatgctatagtccctaaattaaaattattaaaacatattaagtaccatcttatgatattctaccttctattcaaactcaatattgagagggtgaaatagccttgcctctgaccacatttggatgcctggaaacatatctgaatcttccttgttattacatctgctacttaggaggcttaacctcagttttctcatctgtgaaatgaggatagtaatactatagaccccaaatgtttgtattagtttaaatgaattgaggagactaccaaggatgtagtaattgttaaataaatgtaaatactattattgttgttatttttattataatttttaaaatttcttcttcatctccttctccccttcccattctttcgctctctttaggctgtcacagtgctgcaatgcaggcccttgagatggagcagtagcccttccaagttagagcagtttcatatgaagtttattttgtttaaaacaggaatgaaatgaatactctgaatatttggaaacttcattgggaaaaaacttttcaaaattagattgggattttggaacaacaattatattttttgaacttcagataaatgctttattatattatatccagggttgaaagtgtgatttgcattcatctatagacatactctgttaaaatgtggacttttaggctgggtgcagtgactcattcctgtaatcccagcactttgcaagatcaaggtgggaggatcgcttgagttcaggagtttttgaccagcctgggcaacatagtgagacccacctctacaaaaattaaaattaaaaaaaaaaaaaggccagtcatggtggtgcacatttgtagtctcagctactcgggaggctgaggtgggaggattgcttaagcccaagaggttgaggctgcactgagccatgatcatgccactgcactccagcctgggcaacaggaaaaaataaatgtggacttttaaagcatttgtaactgttatttacacttcatcacacttcactgaaagaacttggagaattttatttcaataaaattgcacttttaaaagattatatgaaatgaatacaccaataaaatatacaggcttaaacatgtaaaaaatgcacattatattaaatgttaatgaaaatacaaagtctttgagtggtccaaagaataagtaccaaagtgaaaatttgaagataatcccaaacatctgttttgaattatctttctaaaaaaaaggttaagtgtatgttaaaaccttttattccttaagtaggatatagcataactgcatctctattttaaaagaagatgatgtgtgaccttaattttattttgtttcctttcttttcctaccttccttttccttctctttctctttttttttcccttcactgcagtttcaggttaatccctgtaagcttcctctattttattcatgtattaatccccttttatctgtattcttaacttcgttttctctttgcagcatagacagctgatctaacatatttgatttgtatgtaatgtatttgatttaaaatatacctttgatttaattgtaatatacactatgttaaatacacagtgatattttgggcatgaatcaatttttaatatttatcattgttatgacaatgcattccttttttttaaattctctgtaggctgttatggtccattcatgtaacagtatttacatggtattaattgttcctaatgctgcataggagtgtgtaaagtgaatgacccacattgtactcccatgatggacatattgttcctacccactatcagccaacactaagacacttgaatttaaacattctcttacrtgctttctaaggtgagaatttatgtgggagtgggattgctagacagaggtccattttgacttagtcacttacatttgttcatttgactgagtactgtcagatggcataacagaatgtctgccccgggccacactgycaccagctgtgcacaggattcttccccaacatccctaccagtagttgaccttatccatttttctattttcttgccagtctaggtataaaagatatcttgttgttataattttcatttcaggggggttactaagaaatttgagtattagtttaaatgcttggtatttattttggktttcctttttgtagaatcctattcatgtsctttgcctatttttcctctattggatttcttatttttttattgttgctttgcaggagttccttctagtttccaagcacagacacttctttgtttagatgtttgaaatatcttctcccagtatattatacatttaacttgttcataatgtkcttcactaaatagaagtcctttttgaagtacccaaatccattaattttttttttacatttcaaatgatatttggggctctttttaagaagttcttttccattccacagatatattcttctacatattcttctgttagctttactttttcacatttaactttttaagctatctggggtttatctttgtttttcatgaatatggtataaaaatcagttctcattgttctcatatattatggctaaaatatagtttttgagtttcttaataaatgatgctaaaatattgattgtatttacatagaattcatagattaatttggggagaactgacatctttataatgttaaattgccccatccatgagccttggaatattcctccatttcttttaggatttggtttgcatacttccaggtagtcagaaaggtcagatttcaaaattgacatgatattaaaaagttgattgggttaatatgatcaaatttcttaaagaattaactcatagaatcaactatgaagagttatggcagctcttcaaaaacctaaaatctattttgataaacacagcattgtggagcaataatttaaggaagataggatttgagaaggaattgtttttatatttgaggataatgaaatcctctgtcaatgcccttcagccaaagaccactagggccacacctgaagtaaaagttggcttaactacttcttgcgctgagagagaacagctacaccatggagaactctgaggcatctcattatatgacctattataggattttgactttggttgggtgatttggaagagagtctaaggaagtgagggttttattttgattggataccaggataattctatgtctggataaaaaatcattcatatagcaagagaggaggatgtttggtagtttgtgggttatacagtgacgttttcctttttttgtgtttatacaaaattatgaggtggtctttatttgttttgctttatcatgatctcagagtaaccttgtctgaagctggtaattgtgtataattgtgtgtgtacaacaggaaaacaagatttttgcaggcatctagggcaattacttaatcataagaaataggagagattttcatttggataaaaagcaggaaacctagtttcagattgtgactttgcctcagttaaccttgttgatgatttttaatttctaagttgttttctcactttgaaatagccatctctgctgctcatctgtcctgttggaaaccactgtaattttgccatctagattaccgcagttgccttccagctggtccccctgttgctcctttagttcgcttgcagtgagtaccttctctgcagaggagtcaagagtgacatttcgaaaatgaaagtcaaatcacaaaatccctcactgaatatttccccccaaatatcrcacataaaataacccccagacttcttatcgtggcacatgaaaccctatgtgattggacccttgcctatctctgtgacttcatcttgactttccctctcattttgcagccactcaactgactggtgttgttcctggaaacatcaagttcatttttgccttagatcctttgctgtgttttccttatgtggcatcagcagtccttgccaggcttgctccttatcctttagctcgtagagatcatacctattttcctaaatctgtgatatccatacctaaattatcctcatccataccatgttactttattttacattatttataacacttatcactatctgaagttaattcatttattttattgtatagatcccaccctccctccactatctccagcataagctcacatgggtgggaattgactattttgaacagtactaagtgtccagctcctaatgaagttcctggcacaataggtgcttaacaaatatctaataaattaataaatatttaatacattaatagatggataaatgaacaatcaaccaaataagtggacatgtattctaggtatagcgacaggcataccttattttcttgtattttacttttttgtgcttctcagatattgcatatgtttttttaacaaattgaatgtggcaactgcataaaccaagctggtcagtgccgtttttccaacagcaagtgctgacttcatgtctctgtcatattttggcaattctcacaatatattaattttttaattattatatctgttatggtaatctgtgatgtctgatgttaacattgtgactatgcccatataaaatggtaaacttaacagatgttgcgcatgttctgtttcaytgatcagcccttccccaatttctctccctttccatgggcaaccctattccttgagacaaaaaaaatattgaaattaggctaattttccaatggccttgaagtgaaaggaagagtggcatgtctctcactttacatcaaaatttagaaatgattaaacttagtgaggaacacatttcaaatacacgaatgataagaaagtggaacagacttattgctgatatggagaaaattgtttttttttttkktttttttttgacagagtctcactctgtcgccaggctagagtgcagtggtgcgatctcggctcactgcaaccactgcctcccgggttcaagcgattcccctgcctcgcctcccaagtagctgggactacaggcgtgtgccaacacacccagctaattttttgtattttagtagagatggggtttcaccatgttggccaggatgatctcgatttcctgacctcgtgatccgcctgcctcagcctcccaaagtgctgggattacaggcattagccactgcgcccggccacgggaaagttttattggcccggataaaacatcaaaccagccataacattccattaggscaaaacctaacccagaacaagttccttaactctcttcaattctatgaaggctgagagaagtgaggaagctgtggaagaaaagtttgaagctaacagagattgcttcattaggttgaaggaaagaagccagctctgtaacatattaagtacagggtgaagcagtaagtactgatggagaagctgcagtaaattatgtacaaaatatagctaagataattgattaatgtggctacaactaaacaatgggttttcagtgtatacaaaacagatttctattggaagaagataccatataagactttcaaagctagagaggtgttagtgcctggcttcatattttcaaaggacaggctgactgttatttttatgggctaatacaactggtaaccttcagtagaagccattggtcaattaacattcaaaaaatcctagggyccttaagaataatgctaaatctactctgtttatgctctgtaagtggaactgkatttccgagatgacaacacatctgtttacagcatggcttactgaatatattaagcttaatgttgagtcctactgctcagaaagaaattgttttcaaaagattatcattgccagtgcacctygtcaccgaagaactctgacagaaatgcacaaggagattaatgctgttttcatgcatagtaacacagtatttgttctgtagcccatggatcgatcaaggaattattttgactttcaagtcttctaatttaagaagtaactttttgtaaggatgtagcttccatagacagtgattccctggattagtctgggtaaagtaaatggaaaacttttggaaagaatttgccattctagatgccattcagaacatttgtgattcatggaatgaagtcagaatatcaacattagcaggaatttggaagaagttgattccaatccttatggatacctttgaggggctcaagactgcagtggaggaacaaactgcagaggtcgtggagagagcaagagaactagaattagaagtgggcctaaagatgtgactgaattgctgtaatctcatgataacgtatttacagatgaggagttgcttcttatggatgagcaaagaaagtggtttcttgaggtgcagtctactcctggtgaccatgctgtgaacattgctgaaatgacaacaaagcactagaatgttatatgatcttagttgataaagcagttgcagggtttgaaaggattgagactaattctgaaagagttctattatggataaaatgctatcaaataacatcacctgttacagacaagtatttcgtgaaaggaagagttaattgatatggcagactttatgttgtcttattttaagaaattgtcacagccactccaaccttcagcaaccatcacccttaccagtcagcagccatcagcgttgaggcaagaccctccaccagcacaaagattaagactcaccaagggctcagatgattgttagcattttttagcaacaaagtattttttaattaaggtataccattattttttagacatcatgctattgcaaacttattagacaacattattgtgtaaatataacttttatacacactagaaaaccaaaaaaaaattatgtgactgacttcattgtgatattcactttattgtggttgtctgggcctaaacccacaacatctccaaggttttcctttatatgtctgttgccaacaagagaagcacttattagtttattatttatttgagatataagtatcaaagaaatcaatttatttcattggaaataatgccttaaaatattcaaaggtatgtctttgctattagttttttttttaatcatctatattctaagactactatcaaaatgggataccattataatgaggatttcctggtgcttaaattaacatttgaatgcatttctcagagagattccaatgtaaatatattctcatttagtmatcacacaatcagagcagaactttgggaggaataggggtttaaaaattgcrtaattattagaaatttccatagagggatatcttattaatttgtggtagatatagaatacctatgatatcacgcctattatgtttgaagataattataatttattttactagtagttttattttactggtagttttagtagtttaatttgacaatattttacactgttttgtcttttaatttaaaggatacaattttctatggactcataatgccaaggcctatgtgaatgttggtttgcagtgaaagatgaaatgtggtatgaaaatgttaggcagaggggagaaaaagtttggaaacagccagtgtcggattagagtttttgctgtaacayttcagtattaactttacaaattctttagtgcctctgtctcctcatctggggaatgggcacttatgtrtggaactgtgttgagagcttggtgagatgatatatgtcaagtgtgtggcatggtacatggcactattagctgttgcataattgtgagttcaatgcctttcctctgttttccattggaagcaaagaaggtatatgactttgcaaacgtgaaggatttgtgttctctgtagataacataagggcataaagtgtattgtatttaatgttatttttgtaagaaatgcttaactattgtaaattgtaaagagtatcaaacacaataatattaatgataatagcaatatttattgagggtttaccatgtttcaggcactgtgtttgtttttttgttttgttttgttttatttttttgagagagggcctcactctgtcgcccaggcttgagtgcggtggcgtgatcatggctcactgtagcctcgactctatgggctcaactctgtgggctcaagcgatcatgacatctaacacgccaagctaatttttgtatttttttgttgagacgaggtttcaccatgttgcccaggctggtctcaaactcctcttgagctcaaacagtccactcgcctcatcagcctcccaaagtgctagtacaggtgcaagccattgtgcccagcctcagacactgtcttaaacagcttgtttatattaacacacttcatcatgaaacagatgagacactattttcccactttacagataaagtaaactgaagcacaggagttttaaatttcttagaggcacacaggcaaatctgagattgaaagattctgtgctctttttttgcattaaaattgataactcaaaaccctttcatttttcagrtacagtcagtagtcacccaactaaatatatctcaacacacatgacccttcttctcatcctcatcatttgctgggggactctgctttcaggactcaataccccatctccttgtaggaagtaagaaggcaagaaaagaagccaaggttgagggcaaggttcactggagagccgtactatgggggcaattattggtgctgtgccttttgttatttttaatattgaaaaattactattatttggggagaacaaagggtacacagaaaatatatttaattttcaacatgattaagtgtagaaacagcgattttcagggaagtgagctcataagcagaaacagtataaaagaacattatatctataatgttttattgatgtattctgatgcctggcaagcttctttatagctttgatcttgtttagtttttttgcttttcatctccagatcttctatgccatttatcagttttttcatacttgaatgaaatatttgtttattttaagatcatttcttgcagtttctggcccagtaagtatacaataatttcagaccatgaagacccctactgaaatctggaagagcatgaagcctttgtaggtgatcttaagataacattgttcttggccttatgatgaactgtatatgtatatctgctttgagacataataattactttaattttttaaggctttgattatatttaatctcctggcttgatgaaatgttagagtataaaggaaatacattttccttcttaaaaatgttttatgatggttttctctccctgtggtacttcctgatggcctgatattatgtcatrtataattggattgatgctcagtctgaaaatttctttttcttcttggcagcatggggtaaccttggaaatgttctgaagagtcagagcaaaatttctgaagctgaaagcgcctatagaaatgctttgtactaccgcagcaacatggctgacatgctttataatttgtgagtatgccttgcttctctggtttggttcgtctttgaaacctgcagtgagagggactattgatttaactgctggaaatggagatgatgatagctattgtcctgaaatagtctttttgttaatcatgcctytgagactattaggtggatggtgtttgtgatttctttgtttcgkgccacatcatcaatattcatgtgtacttatatgttatgcctgaattttttggaagtagtatgccatgtaacataaatattggtttaaatattttttagttcttaaaatgtttgttccattaatacttagatgagttcataaaataagcctgttatgtatgagagttatgcaaatcatgtgttgattattagcattattatttttttgagacagtatctcactctgcggcctaggctagagtgcagagacgctgtcatagcttgctgcagcctcaaactcctgagctcaagcaatccttctgcctcagcctcccaaatagctaagactgcaggtgcctgtcaccatgcctggctaatttttaaatttttttgtagagatgkggactcactatattgcccagactggtgcctaactcctggcctgaagcaattctcttgcctcacactgcaaagtgctgggattataggtgtgaaccactgtgcccagccttgattattaatgatagattttgtcttccattaaaaaaaaaattgctgtatcaaagtatatatagaatatgtgctataccagaaaagtgagcgagtaaggttatggttcttttttgttttccttttcataggcactgatgattatcagtgaggttgggatagtttagaatgttcttgtatgttgggttagaaaaatccctaggggaaaaactggttttgttctttgagtggacagtcctagctggtacaacgagatgtgagtagataaatgcaaaccaaactcaaatctcttctttgtctcttatatttatgagaacattttgtttataagtaacagaaatccagtttaagcttgcttgaacacaccagagaatgtataaactcccctaactggaaattcctgggttgactagatgcaggcctagttagatctagtgcctgattgtgtttcaggaatgtttctccattttgtggctctggtttcttctgggtttgctccattttctgtggtactctataacaatgggaaagatgattcctgtrtctttataaacatagatagcatccttactcttctcaatttcagaaggaaagagaactgttttgtctcagtgtctgtattaatcccggaaaaagttgttrgactgaccctcctgcagttctgtgccgtctcttgkttgaaacactgagtgatgtgggaggggcaacgagtcacttccattgacagcacctccagagttggaatggaatggaggcaaaacagttctctataggaagatgactgatcctaggtaaaataaggtgcttgcggcttgtgtttaatgaatgctgtgtgatactgacagtattaaactaatctgtaaacttttaaaatgtgtatttatgctctggttagctgaatcttttgtattggctaagtctaaaggcacagatacttaaaaaaataactaaaaataaacagaaaaaatctagatatttaagggaaagcagacaggatgagctcagtttaattttttgttcatacgttgacttcgtgtttaacctcgtaggctttaacactgggatctcaatctagcggcctgtggtctgaattaggtcagcagatatgttttgtgtcggctttcacagtgtgtaatttttttctttgtcacctggaattctttcacatgaagcacacctgctccagcacactgttccttctacttactcctcttctgtgtcctgcttcaccatgtatcttaccatcatctttgctgaactaatttgaatttgtatctttttcttttcttgaatgaaaatacatatctaggtactcctacaaaggctcaagtcctcttcatctaaatagtgttatattactatattttttattatttttattttatgaaaaagaatcttatgagtttaatgtattcacacatatgttctttacactttttgcatctgaaagtgatgtcaaagggggcctcttgccttgcagtatgggatattacttttctggttccgatccttcatacatttttggaagaaaaggaaactgaacaatgaacacctcttcattgaaatgtttctctctgtcttatccaatagtccctggttaaaacgttgcccacctctttgtgatacctgttggacaaggattcagagtgtttatccaggcttattctttactgagaagagaaatgtattcaattagaaaatttcacttgacatgtaattttaaaattacatcttaggactgtctgtctgtggatgcatatataagtcatgacagcataggaattgaccttcccaattcctagcraaaaatctgtactggaaragtggttattgacaagatcagtttttccccgtaattgttggaaataggttatgtcgtaagtgcccaatatagttccacgatattttttactaatatgatgggtctttaaaccacacttatctgtcaccctaaacggagaagcttaaattccacaagaaatattggcaatgattggaaagtattggctttgacagaattctgatatcaataattctattttaaaataggtaaatttttcagtcattttaaatcaaatattttaaaaatacaccaagatagatcctttgcaatatataatattataaatatgtttggtatcatatttataggaacattttttctacttatttgcataggtagamaaaagaaaagttttctcatagaaagttcagagactgttaaatagtaaattttagttttgagatgtacctaatttkctctggtgtacagaagttagtccttgttctatcttaactcctaaaagagaaggaaattgctttgctcagtctttctaggacacataacgtgataatacccctttgagataatagcatgcattaatcacttgtcctatcatcagttacagttatgtctcttaaagatgtttatgacagaggcctagaacaaacctagttgtattaattggcgtggaatacctacatttgttcatgcattttagaagctttagggaatcgtaagcttctgttaggccctcaacataacttctacatctaagtagcacataggaatattgttataggtaaagacagaggaaaaatagaaatgatcttggaaaatataaagtaagcaatagtatgagtgatgtagatttatatctgaaatttaaggaacattaccttataagatcataaatatttgaggacagcttttttcaggaatgaaatcaaattatatccaagaggtatatacaaagagttatattccatgtttgtaaaatgatgggataattttaattttttttctttagtagcagtagcttcarttacctctgtgtgctaaatgttcttcttagttctttacatatgttatcatagcttttcttcaaaggaaatctataacacraggaagctgagactcagaggtaatgtgtctaaggtcacacagaaaataaatagaggagccaatatatgaacctaagacattctgattgtgtatctgtgcaacacttgtatttcttttttaatttttaaaattatactttaagttctgggatacatgtgcaaaacgtgcaggtttgttacataggtatacacatgccatggtggtttgctgcacccatcaacccgtcatctacattagttatttctcctaatgctatccctcccctagccccccaccccttgacaggccccagtgtgtgatattcccctccctgcgtccatgtgttctcatagttcaactcccacttatgagtgagaacatgtggtgtttggttttctgttcctgtgttggtttgctataattatggtttccagcatcatccatgtccctgcaaaggacatgaactcatccttttttatggctgtgtagtattctgtagtgtatatgtgccacattttctttatccagtctatcattgatgggcatttgggattgttccaagtctttgctattgtgaacactgctgcaataaacgtatttgtgcatgtgtctttatagtagaatgatttataatcctttgggtatatacctagattgctgggtcaaatggtatttctggttctagatccttgaggaatcgccacactgtcttccacagtgtttgaactaatttagactccaccagcagtgtaaaagcgttgctatgtctccatatcctttccagcatctgttgtttcctgactttttaatgatcgtcattgtaactggcgtgagatggtatctcattgtggtatttctttaggcagaaataaaccaaagttttgggaaaaaagcctcaatatatatgtttcaaatttagaaaaaaataacctttatatgtagaaataaaatatttagaattaaatctattagagaatataaggttttagtaactgttagtgagtttactgaactcatggtatagaattttggtaaaaaaaatatcattgggtttgcatacctgtgctaagagctgccttcaagaagaaagtgctacctaaggcatttttaattctaaatctattaattataatatcatttgatatcatttgaatccgtgcttacagacaatagttatataatatgaaatttaaacagcacttaattctattcttaataacaatagatatcatgcatttattgtacagccttgtatttagccttttattcatgttgtcaaatttactaaaatctgatatttcatacaagaaattattaagaccaggtttaacagatttgcattatgatgttgatttgtcttttcatgtataatacattttcagagacaaagcagatgaatcgtggctcagtgatttacacagtcagattttataagtatagagttcactttcaacctcttcgctacaccactcactgcaatgtgaaatgtaattgatttttagactaagaaakagtcaatgtccttttgttgttgttatggatttgtttcggtctgttccaaatgatatttaaaaaggtaattcaatagagcattaaatattgtattaggaattagatttcaaaatgcagatgaatttaacatgctataatcaattcttgattatcttacctaatggaagaattatgtctgttgatgatagagattttgctactataagttaattgtcattttgttctgtgttgtaagaatcttagtaaatatccaatctgagaagctaagaaatgagcaagaaaataaactaaaaatttaagagtagagaaaatataaataaatcagaatgcagagaaacaataggaagtaatgcataatctaagatcttgttctctggaagatcagcagctttgggtaagggtaacgtagggcaaaataaaaaatgtcaaatatacaattttaagactgagaaaagttataactggatatatgcttaaaataataaaacactaataatatatatgaaaatcatacgaatatatatatacttcttcttggaaaatattaatggtcaatattggcccaagaaaagatgggcaatctcaatcaaaaaccttggaaaactttggaaacaatattaaggaattatctcgacaaggaactaagtcaggcgtttcacaagtgagttctgtcaaatcttcgatgaagtgatatttcatgcaataattagacttcttatgtattttttatgaagctagataaaactgattgcaatgtatctgactaaatttaacacacacacacaaggacaacaacaacaacaaaacagaacaaaaagcaaataaacaagaaccatacaacccacaaaaggccagttacacaacaaatataaatgtatatacatgtcttaaaattaatataatggatgtagcacatattaaagatttaaacaccattatcagataggctttagtctaagatttgtggtgggatatttaatattacaattaaattactatactctttcaatttaagaagtcagaggatgaaaaaaatatcatctctagaaatgccaagaaggcatttgaccagcagctgccttggaaagcaaacttataaataaactaggaataaataaataattctatatcataataaatatctgtcaaaagttagtagtaattactacatttaatgttgaagcatagtggtcatttccattaatattcagcttcttggggtagtgacattttcttattcattaytgtatcccccatccctagagaatttccaattgcactgatttttttaaataagttatgaaatccatatcagagtagaaaatatcctatttttcaataagtgataagactagtaatgagtattaggataaccacattctttgaactatgtaagtatattttgatcattatcactgtatctggcttattataaagagctttcttgaattggacatttgttgtttcattttcttgcagtttcagaaacaaacacatttatattagggttgactcctgtatttgttgtttcctaggactgctataataaaaatactacaaggtacatagcttaagatagaaatttatcatttcacagatctgaaaactagaaattcgaagtcaaggtgttggcagggccatgctccctctgaaacctgtaaaagaatccttccttgcctttttttttgtggtttcttggcaatctttagcatttcttggcttgcagctgcataattccaatctctgacttcattgtcacatgatgttgtcctgtgtatttctatcttcacatsgccatcttcttaaaaggacatcagtcatatgggattggggcctacccataataatgaattacatctgtaatgatcctgtttccaaataaggtcacattctgaaatagtggaggttaggacttcaacatatcttttgagggggtgagggggacataattcaacccatcacatttccttacctccctgttagtagcttcagtgtaaaagagatagggcccagccggtcatttttaatggggagagtgaaagagtgggacaggtaagactcctttaaaaagctaacattttgaacaaatgtcaatggtgtgtgtgtgtgtgtgtgtgtgtgtgtgtgtgtgtggatgtgtgtgtgtgtatatatatatatataaaatgatgccaagaaatctcttaggaagaggtagtttaggttgagacagcaatgaaagaaagatgtggtgaagaattgacaccatagattcaaaccttttttttttttattttttttttttttgagacagtcttaacgctgtcgcccagggtggagtgcagtggcgtgatctcagctcactgcaacctccacatcccaggttcaagcgattttcctgcctcagcctyctgagtagctgggatacagatacccaccaccacacccggctaatttttgtatttttagtagagacggggtttcgccatgttggccaggctggtctcgaactcctgacctgaggtgatccacccacctcagcctcccaaagtactgggattacaggcatgagtcactgtgcccgacctttttagattcaatcctaataagggtatgagagatgttcttgaaaattcagggccaggttttgagaatatttgagaggttacaatggtcagagattgcagaatacaattggtgagactacttgacgtagagtttaaaaacagtttggcctgtgagaagtgaggactggtggaaatgtgaggaaaagtaatacttcaggacagggtttcctaccaagctccatagtagggatatgtgttggggatagagggacgtgtttagttgatgccaggtaagcygattggtctcctaaaatagataatttcagagagattatcaagcaggagtgcccagaagtgttgggcatgtctgacagagcraatgagactgagagattttgttataatgctgttggcttgaggtcaccagtgctcttggtgtacaactcagccggccctttactaattcctggaatgaagtggggcagcttgcaggtacctgtgttttcatgtggcaagagcaaggcctaatgcctagtatataacgttcattttgtcttaattggtaaatatcaattaatacacaaatatactcttgtgaaacattcaaataataatactgaagaatatggagtaaaacatagaagtccctattattgcattcctcatgtccttttcctcctctagtatagatcttactacgtttttggtaagcatttatacatgtggttatgtatacacttttaagttttttcccctgcatatatgaatcattattaatttttgacttttttacgtgtgtgcagatacgtcagaattcgtataatcgtcttcattttaagttgtttatattggaggtgttaagatcaacaacattaatgaatgctcagtgggatgatttcaaaactatattgcttcattttccatttttctaattacaagtgcagttgagtaatttttcttatgttaattggctctttgtaattttcctggggatttactgtttatatttcttgtctaattttctattgtgtaggcttttttctttttcttactgagtcgtagggttgaaaacttatgtgtaagcacacaaacctattttgcatatattttcaactaatttttaacatatcacttttacttatagcatttagtgtaactttaatttctatatagaaaaaaatccctaagttctctaatttaagccctctgtattttgtgtctctctgaaaatgaccatttgcagcctaatatgcttttaaatttgatatttttggggttttaaagttatttttgcttctttgtttagatcatcagtctactctggattcattatttttttgtattaaggtataattttttccaatgaaaactaaaattcccattataatttattggatacttacctatcatctagaataaatttacctaaagtggatatgtttacctatccaattattggatagctacctatcacttagaataaatccctatataaacacagttcattgctatggactctattctgttctgttggtaacccctgtcaagatcaagttgtttcacctactatgatatgtaggaaatttatattttaaaaggcaaacctctcatccttgttatttgtttcccacacttcttgattattcctgtgtgttttatcttcaatgtgaacttgacccatagacttcttaagttaactggaagtccagttagggttttcatcggttttgcagtgattgtatattaaagtaaggagagctgacattgttatactcttgaattttctcttccagatacatgtatttctttttctttctttaccttttttttttttttttttttttgagacggagtttcgctcttgttgcccaggctagagtgcagtggcgcgatctcggctcacagcaacctccgcctcccgcgttcaagccattctgcctcagcctccggagtagctgggattataggcatgcgccaccaagcctggctaattttgtatttttagtagagatggagtttctccatgttagtcaggttggtctcgaactccggacctcaggtgatccgcccaccttggcctcccaaagtgctgggattacaggcgtgaaccaccgcgcccggccagatacatgtatttctacatttctttcaattttcaagatttattaaaattttgtatttggttctcaaaggtctcacatatttgaggttaatttattcttagttttttakaaattatttttaataatgagaattasattttttatcttttattctattttaaattggtcattcctggttatttacattttttcctagatatgcgtaatttcaattttttgctgttgtttctgtatcataaatcttactttcattagaaggttctttcttggagttttcccaaatatgttttgctttttttttttcctctggtggggcctctgcacatactatttgtgctgcctgcaacattctctctctttccttccccttctgacctctttccaccccttatgacatctttctatcctacccccaccttttttgcataatacctatacatcctttttttttctcagcttaagcaacactttctggggaggtttctggwtacctctcccactttcagatgtgaaagcctcctaggtctcacaaagccactaatacttggctctttttaatctggattatgttaacatttgtgatagtatgtgcctctttatataaaggaacatagtatcacaaatgttaacatgacccagattataaagagccaagtatttatggtatttgtgataccatgtcctataccatataaaggaacaaggtatcacaaaataccataacggagaatacataaatacgatataaagggaacatgatatcatatatataaaggggaacatggtgtcacaaatgttaatatccagattaaaaagagccaagtgttagttgcattgtgatatttaggagggagatctatctttcttatattttttttaaaagatgggatctcactgtgttgccaggctagatttgaactgctgggctcaagtgatcttcctgcctcagcctccccagtagctgggactataggcacatgacaccacacctggctcagtgcccatgtaccattttcccctagcactgagcacaatatcaggcacataggcttcaaactgtgtatatgttaataaactaatgaatgaattaataagctaatgagttaaatcatgcatatgttgattaataacctaatggactaattaatgagataataaactaatgagtaatctaataactggatataaatcaacagagttcaagtttgctgaccccttgtcctgtccttgcaacctgtctgacccacttcttttctagcttgcattactggccatgtgttcttatctgattctgaatgttgattgattccacaacttttatctattatatatgtctttgaaacaatcattgtccacaaagcataaaagcagtaaaattccctccctgagaccattgttattgtatacctactgatgtgggataatgattttttgttgttgtttttgttttgttttgttttttgagatggagtcacactctgttgcccaggctggagtgcagtgtcacgatcttggctcactgcaacctctgcctcccaggttcaagcgattctcctgagtagccrggattacagatgtgcgacaccatgccygactagttttgtatttttagtaaagatgggttttcaccatgttggccaggctggccttgaactcctgacttcaagtgatccgcctgcctcaatctagtgctgggattacaggcatgagccaccgcacctggctgggataatgattttgaaatatagtcttacaaactctattgtaaaggattaagttctcttttctttcttcctaccaaaccttggatatattttctttattgaatacacattgaaaacatattttaattcagaattgataagagaatataatgaatatgttacttaaatggataaccagccaagggatatttcagcaaaatacacttcaatagctccatttgttaatcagaaaaaattaaatagtaaatagtgaagtatatacttgtattctgatttattattaataggataagatgtttcctggttcttaaaatatcagtctgtcctttaaagggctacttgggktataagtggctatgtaactgacttttgttcatagaaacatgttgtttaaatttgtcttttagtttttcaattataatttgtagagttactatcatatttttctgtaggaaaaacataagaatataaatagccttttgaaaaaaattttgaaagtaaaaagtaattatttgaaactagggcaaattgacaatgtttaatgatttcatcaaccagctatacatttgtgaatgtaaattcttgaatataytttaacattaaattatccattcttgagttttggccaagacatactatattcaagatatttagctaagtcgttcttgtcaagatgccagacatggattaagacaagaattactacatgatgacctggacgtctgcagaatggtaaaggagaagtcagaaaggattttatggagaagctagagttaaaatacatctagcttaatttttttatttagaaaaaaaaacaaaagatgaaacattttctttctattgcaggttttatgctgtttagaatcatgtgtgattattagttaaaattataaattgtatataacataaaattttatcttgcagcattcattggtttcagtaagttgctgcaagtggtcttaggaaagaagctgatctgttcaggtgcctggtgcttggttgcctggggtgattagtcctggagagagctrcttatataaacaaagcatgctgaaggctaagaaagtccctctgtgtcagtgtttttaagagatttcrttcattatattgtcataggtactagaatgactcaatctgagcaagtctatatgggaatcacaagtttgtttgacaagcttgtctctcaatgtgttgaaaacatttaatttgtaacagcgtcaatccaagtagtattggatgaataaatttataatgacattcatctaagacagcctgatgctatgaaacctcttggctgcagctcctcctttcctggaaagtgctgagacaattgctattggcatttgactctaaatttacttttccagagctttcaaagtttcatcacctcctgctccctacacacttttacattttgtactcagttgttgcactaatatggtcagttacactgcatccctgctagttttggaggtatcttttttgtccacagttgattttgcactcctgttctctgattcactgtgattgattttacagtttagctctcaaggtgaaatttatcttcctgccactcaaaatcctcaattcttatagcacctatttcaracatcactagttttcacataattctgagaaagaatgagcaattctaaagttcagtcaagactgattatgtcttttgagtwtatttataaatatgaatttacattttggaaataaggatcyattaatttattcaacaaatactgagtaccttcagagtgatagacatcatattaaaagatgggaataagctgacaaagtgtagtttctactctcaagtaacttgaagtctggatgtaaaaatagaatgttatgtaataaagtgacatcttttctgagtgatatgcttatattatcgtgacaaggtatacaaagaaatgtaaatcagcctgaaggaaagagaaatgaaaaagaaaagaatagaggagtcatactagaaagacaggtaagtaaggtggtttgggggaattacttttcagtgttggctaagtttgaggtgactattgaacatccagtgggcaactggaatgtgtttccatagttcatgagagcattttgagctaaagggtatagattttggtgtcatarttatgtaaattaaaactgaaaataaataatgtgtatgtgaataatatgcataagaataaatggaagaaccatgggtggaatcctagggaataccgatatttaaggagatcgatagaaaaaatagaaccctggctgggcatggtggctcacacctgtaatcccagcactttgggaggccaaggtgggcggaccacgaggtcaggagatcgagaacatcctggctaacacggtgaaacccyatctctactaaaaatacaaaaaattagctgggtgtggtggcgggcaccagtagtcccagcgactcccaggcaggagaaaggcgtgaacccgggagrtggcgcttgcagtgagccgagattgcaccactgcactccagcctgggtgacagtctcaaaaaaaaaaaaaaaaaggaaaagaaaaagaaaaagtagaaacctaaagttggcttaaggagtacagtaaaagactaagttgtgtgatgtcattgaagctgttggttaggacagtaagatgggagaaaatggccaaaaccatgtactatagagaagttaaatatttctatggacttttttgtgtccccatgggaaaaaaagatagtgacatcagtcctaggtgtagaaacttaaacatgttattcacttctcctccacgtggtattcagagaacagcatgttgctatcacaaaactacagggtatcattcagagagtgaatttatcttatgaaatatatggacacaaagaccaaagaactgagattcacactaggaggtctttgatggctggagatgtaaattaatatgtatttgtttctatcacatagtgaggtcttcagtacctccttagttcttaaatgctttcaaatcraattgaatcaaacaactgatttcacactcattcctcttatagcaatggaaattggtgtctagaattgcctgctgaactaactattaagccttgcactccccactctaccccaaagcagaattgggggaaatcagaatccttttagaaattggagcctggcaaaagaaagattcactcattcctatgctcatttgtattaaaggttttctcttacaaacgtagctgcaaaattgtattatgtagaaatattcattcaagagtgtagagtgagttaaactattttccatgttggaaaatggtgaaagacatttttctgcaatctcattaaaaggcctttaattttattgtcrttttcatmcaggacactgtaggtaaatttgagggcatatattagaaaacccataaaagaggtttataaagaagttcataatcacatcctgttttaatgccttttgtttggtttaactttaaaactgattgaaagttacttaaatggccagaagctttctgttgttcctaaaattacgctaacatggaaagtgcaggctgatgtgcagcagaatttcaagtaaattaatttcaattttctcagaaggaggttttgcattatgaaaaaagtttcttatttctctgctcctgaagaaaaatgaacagatgtaaatttatttgtgtagttccaatcagtcctctgcagatttccaattactgtgagttaagaattatttcctagacacaccaggaaatatagtaatattgtctttcacttaatttactttctttcttgtacaaaacctaactgtggtttcccctatatgatggaaaagttacttaaagtgtaattgaagtttgaaggacatctggatatttagatgatagtgaatttaaaaaatgaatgtgtcatctgctgcttattttttcttacatattatttctactaaataatacattatttctatagctaaattatatcactcatttctttcaattctttgcttcaatgttactctctgaatgaggcctcctagccaattctatttaaattagcaacccatctgcctctctcagacttctgttcccctatactttattctttaaaacattgcatgtattaccttytagtgaactatataatttactacctataatgacaaataatgatattaaaattaatgtaaacctagtttactttgtatattgctaaaatgtaagcttcaccaaagcattgtttttrtatrtattcttagtgtctgcaatagtgcttagcatatgtgttcaataaatawtagttgcatgcacattgatttaggtacatatgttttccttaaattcctcatgtgtgaagggtgtacatagattactttagaatctttccttctctctttctcccttcttctctcccatttacccctgcagaattaaagaatacctaaggatgccctttttgcttcacatctccattgcttttaatcattgtgcctctcatttcattttgcacttagcgaccctattgttacagatgataagctgagggtgtttcatggcacagggtttgggtaaaagtgatgccatcttgctattctgataataaggaggacagtgtgaggaaatgtccamcagccatctagcaatagagagacagatggagccttgttctagaaaccacatgtcatcatcagactcagagagtaggcatgcacttttcttttcttttttttttttttgagacagagtcttgctctgtcgcccagggtgragtgcagtggcgccatctcggctcactgcaagctccacctcccgggttcacgccattctcctgcctcagcctcccaagtagctgggactacaggcgcccgccaccaccccgggctaattttgtgtattttttagtaragacggggtttcgcagtgttagccaagatggtctcgatctcctgacctcgtaatctgccctcctcggcctcccaaagtgctgggattacagacgtgagccaccgcacccggcccaggcatgcactttctttaacaacagaaatttctggttagaacaatccaagttgtcttaagtctacagggtgactgggttttaactscactgttattctaaggacagcctttaaaagatggtattgtgtttgagtgtgtcccctgtacatttgcctgtttgaaataaaatttctttagaaaaaaatctctaaatcttcaaagaccaactttagtgttaggtgcaaacctgggctgcaaagtgtgtactcagtctcctgaaactgggtgttggagcagagtgcaatttttttttctttttttttcttttttttttttttgagacggagtctcgctcttgtcgcccaggctggagtgcagtggcgcgatctcggctcactgcaagctccgccttccgggttcacgccattctcctgcctcagcctcccgagtagctgggactacaggcgcccgccaccatgcccggctaattttttgtatttttagtagagacggggtttcaccgtggtctcgatctcctgacctggtgatccgcctgcctcggcctcccaaagtgctgggattacaggcgtgagccaccgtgcccagcctcagagtgcaatttttaatcaaaagcaacaatcgatggcttggaaaaataagcaagttggccatttcttacgccctgtttttttgttgttgttttgttttgttttaaagaaaagtcaagggaaataagaccagtagccttattaaatataagggtagaatgaatagaaaagagaatagaagcaagtgctgctgagtgtatttgccagttttctcttaatttggcatcttgatccccagacctccatcattctgtcaacgtctctcagccctttttctccattcytcagccttgtctaccaatttggctcctgcttccatgactgaagccgctaaatgatgcctatggcaatgaattgctcctcattctctatgaccacwgagttcagtgaagggggccattccttttctgcaccaaaattaaatcaacaaatgcaactttagaaagattgttacaggccaagctcagtggctcacatctgtaatccagcactttgggaggccaaggcacgagggtcacttgagcccagaagttcaagaccagcctgggcaatatagtgagaccttgtttctatttaaaaagcaaaaatagccaggcctggtggcaaatgccgatagtcccagctacttaggaggctgatgtgggagaattccttaagcccaagagactcaggctgcagtgagccatgcttataccactgcactccagcctggacaacagagggaaaccctaccttaatttaaacaaamaaaaaaaaaagattgttatgaatagtgtttttcttctaattctgaagtattcaggataaaccttcaagtgaattgttgctaagttgaaaaatctattccaagcaaaaaaatatatatatagcttcagactttcatttttggaactcatcttccttatttttaacttagaaactgcttgtatgacctaacacctattcccgctggtccataagatacatgataccttttcccctttcataatttattgctttaacagcagactttcattagtgcactgctgttaagggacaaagaaaacacccactttgttgaacatttatgtttaaagtgagtgcattgcactaaatctctgtgtgcccatggggtcatctctaacccaaattataaccatatctgtgatggaatcttgccgtgaagcttttttttctttttgtaatttttttgagtgtgttgatttctgtagaattctcaaaagctatttttttttttccttttttcttccctctgcctgaacaaacttgtttaagttaggttttctggctgtggacttccatagtgtatcatactataccaaagcattcaaagcatatcaactcagcattggcgctgctttttaaataatttatcttttctaatcattaaacctccataatggtactttcaaaatatgttttgaatgaataaacaagtcagtctaactacattgagttttactgagcaagaaaggttttggcctatgcttgtattccagcgtaggagttcctctgcagtggttacacactctccaactgataggtgtttcttctccaagaaattacataaagattagacgtccatgttggatagcacctgcaaatagcaaagaatagatagtaaatcagtatataggtttaaagttaaatcatttgtggttagtgcctttaacttgtgttagatgcttttcatttcttaattttgtttgttttaaataaaaattctcccagaggatgaaggaaatacttgaaagagatttgactgtgattccagaagatatatatggacttaccagagtcrtatttgttttcatgggaagggtaatggggaaaggggaaaagttgcttttttaaaattttttaaattaaattatctggcaaccttgtactttggaggcagctcagtgaaatacttcagagcatgtctttggctttaaacagacttggcttcaaatcattcatttattggtcctgtgtctgaccttakgcaaattatttaatccttattcttcatctgcaacattgggttgagttgcattatataatataagagacgttaatataatgtctagaaatttgatataattatatgataataaaatctgaagagtttgttagctggtaattttattctatttcttagtgttccctggctatgccattttggggctatgtcttatctcactggcaaccacgtccatgaagaggagtgagtccaaagcacaagagtaactcaaggaaacccctttataagtgtattggttgtgatgcatttcttggtaaaatagaggttgactgtcattgggaggctgcagtttatctcacgatgcaaattcaagatgcttacatgttgggaagtacatgtataaataagaaaagaagagaaatttgttgactgagataattaagaagcagtgtgtatatgaaccagagagaaagggcgggtattaatactaagctaaaagcagtcacctattcccagtgttggtgatttgaagcctgatacctctgaatttgaatctcatcttgagtcttgacagctacattatcatggacaaattatttaaattctcctccttcatttttagactctaaagtaaaaagaataataattgctattgctaattgcaagggtggaaagaaataatatgaaaaacttaaaccccaagtattaatctttattacttcctgttgagtactgtttttaaactaggaaaatatattcacacctattattttgacatgtggaagaaaatgtagtcttagttatatattcaaaaggtmggtacaaagtaaattatgcatatatgaatatacaatgtagttctccgaatcctagatccaacaataacaactagctgcatagacttaagttgcttaaccattctgatctttgaacccttcattttaagataaggttgatacctttatgggttcattgtgagaaatacataatagttgtaaagcgtcttattcaccacctgtcacaaaggtagtaatggactaatatggaacataaaggcttatttagatgtcatagtccatgttcaatctcaggagaagcctctttgtaatgaatactccatttaatcaagacttcacaaacttttaaataaatgatactgtagtgaggatatgtttctctttctttagactcttaaggaaaaactcatataaaaattattttcaaaagctgcaacttgttatttctctaataatgttaaagaataacgtttttggcaatccatctgaaataattaaaaagtcatttagattgaatgcctactgtttcatatttaacaggttagaatttaaaaaaagaactttatgaaagacagtggcattattatactttatttagttgtccaagtctaaacaaaattcaatttagaacaaataattaggtctgtgtcaaaagaaggataccagagagagggcttaactgtattttctgacacctactttgcagttttgtgacacaagtgacacactctgaaacagatttcagctttggagacctatgtaatagaatcatgtgcccttatttacctagtttatgtgtggcatggtggtggtttttctgtccatctccttttttccatttttcttagttcaatgaaagtatagagcagggaaacaactagttcaatacccttcccagtggaatttaactttttttttttgaaatggagtctcgctctgtcgctaggctggagtgcagtggcacaatctcggctcactgcaatctccacttcccgggttcaagcagttctcctgcctcagcctcctgaatagctgggactacaggcacatgccgccacgcccagctattttgttgttgttgttttgttttctttttttgtttttgtgttttagtagagataggatttcaccagattgcctaggctagtctcgaactcctgagctcaggcaatcctcccgcctcggcctcccaaagtgctaagattacaggtgtgagccactgcgcccagctggaatttaaccttttaaagaagggtacatcttttaattttgctcacagtacatatgatatgcaaaaatcacatagaataacgtagcagtattttaaaatatgtattcaattatgcctttcacagcaagtgtgttaagcatttttctaataactcgaaagtacgtgttttaaagaaagtcggtcatttacatttgcatcctctattagtgcttttctatccaaaacactcttagttaaaatgtcatttttaaccagtatttaacatagtttaattaaggaaaagagaaagggagagaaatagagtatatgatttgagaaaaaaaaatatgagtaatgagaattcttttgcttggtcctcgaatacaaagtctgctatcctaagataacctaaaagtcacagaagtgcttcatgagaccagaaactatagctttgtctctggtatctcccgcggagctcagattsaataacttatatctcactgaacttttttttctgagatgaaaatcctacctgtttctattctacttaaaaatttctgagttcacctctttctagtatttggatatgaaaaggattcatatgccttaaaaaaatactactaatgtcattgttcttttggacaaactgatatctgtgaccactctgatgtctaggaacttaatttaagagttccaatttcatacacctattacattcttaaattatttaattttaattaaatattttaattccaagttttattcttggcagttgtctaatctggttatcactcaaaaccagacaactcatactttgtatttattygaatgtaattaaatgaagtttttattaaaatttctctatgagcgctatatttgatgttacatattttataactttatatatacatacacacacagacacacacacacacacacatatgtatatatggtttgtctttttgagatggagtcttgctctgttgcccagactcaagtccagtggtgcaatcttggctcactgcagcctctgactcctgggttcaaatgattctcctgcctcagcctccctagtagctggaactacaagcgcatgccaccatgccctgctaatttttgtgtgtggtgtttttttgtttgtttgtttgtttttagtagagacgaggtttcaccatgttggccaggctggtctcgaactcctgacctcaggtgatccacccacctcggcctcccaaagtgctgggattacagccatgagccaccacgcccggcagcattatacatttttaaaaacacgaataatgcatatggcattttgtcagttgggaagaggttggttgtcaagtgataagaaacccaaaataacagtagcttaaaccagttacacattttttaaatctgtcttttaaaaagggagtccagagatgtgcagtccttgctggttggacagttttataaagggcttagtttccaggacttgtgtgttagttttggtttgaccactacctccctcaacacaggacttctgccttacagctagcagcaaagaggtggggtaagggaggaagtgcgctcctttcaggtgatttcctaaagcaatgcaggattcttgtgctgctcgtgacatgaccaaacctggctgcatgtttgatcgtggttctttttatgttttcagttccaacacagtggctagtgcatattagttacttaattcctaagctcttgtgtctctctaaattttggaattactgtaattaattcaagtagtagcgacttatttacagtaagtgaatttaaaaaggattttgaatttaattccttttattgccagtgtagtcacttgagaattttgactcatatctattttatcaaacaagatttgggagcatttgtgtttcatgagtgtaccgtgctattaaattatcagtcctgttgaatgatagagattaaagatttatttttccaagtgtcatattataaatgttgcttaaaactaagcataattcttgggaaaaaagtgagcaaatgtgtctgtgtaatcacatttaacaattaagttatgtaaaatctcattactaaagccattagctaaataagcaaatttgattaggaaatttggattaatgcaaagttcaaatatgactgcaaccaatgttggttcatttcagtttgcaaatttcaaatgcataaawaaccttaggaaaaaatgtgagtatctaaaatttatgttttatctctgagaaaaaaaaaaaacccttagtttcatagtccttatgtgtgttaaaggacartcaaacgaaatgaaattcagaaacatcttttagtttaaaatgaacatacttcttaaataactgggtattaaaaatattttgtgaatcattgcctataaacattgttatctgacttattttgattattattttttttgtccagggaatagccagactatttattactgaaactcattcttggtaatatagtcctaattttcatttgtcttagttttttagtttcccagatgcttcctacatagattttgtcattttattttcatgaagcctgttattattgctattgttaggtgaaaaatgctatcctctgtaactcttgagttttcgtacacatggcttgatctgtctggaatgctcttgtcggcattcctgacttggtccttttttttctcgtcttctctaggaacttcacctcacctgttctcttgggtaggtgttcctttcatgggttcccaaaacaccttacattttatcatgaccctctctacacagtattgtgattgtttgcttgtctgtcttcactgtgagacaattcactgaaaaattatttattcattatttggtaagctccttgtcaatgtttagtgtattgttaagagtgctgcacattgcactttaatgaaatcaaagcaagaaagaaactgtttatccttcartatttccctggttttgaaggtatgtgattccatgttaagcagaatcctgtttcccttgcgtgttgcagggacatcagctgtgttactgaaatatgtactcttgaaaagcatactttcatctcctaatgtgctttattcatatccacacttgaacctctcagatttcaaccactttttaagacctttgttagaacaagaggcgaaaggccactttacttaaggatttggatgttttgatagttctatctagagggcagtcttactacaaagagacactgacaatttggtcagatgtattgtcmgaagtaggaaagggtgtgcttttctgtttaatttttagaaaatttaatttttcttttacctttgtgaaaatagaaatggtaggttagactttttaatgaaaaataatgtaatccttttaatttgcttttctgtagtrtatcttcttgtatagttggtgtgtgtgattagaagagacacagggctttattttctgaagaaatgtattgtagttagttgatatgaaattctaatcagggtttttcaactttagtgctgttgacattttgggctaggttattctttgctgtggaaggctgttctgtgccttgtaagatgtttaaaagcattcctggactctacccactaaatgccagttacattccccaagttgtgacaagcrtaaatgtstccagacattgccaaatatcccytggggtgggaggaagtcagtcctgattgaggatcactgtgctaaataaatgttcctcttctttctctgtcaatgtttaggatcacctagggacccatatgcctatttacatttaatgtttgcgttcagctctgtccaatccactgttattgtgggtttgactgttctttattaatcaagtgtccagattattgtgatttcataaaatattatcttagacaaagacagggttgttaggggagatgggagaaaagatgggcaaaatgttcctagggaaaagaaatactacacatgcagtattactagaacatgtgatgatgatcaggggaaaaaaagagctaaaaggatttaaaagacaacattttgttatttttctttttttagtaacatgattttctagaatttaggtcttagaaatagtagtagttcatatctccaggtgtattttctttctttgaccaaaacaaatactgattatttctctttccccaattattttttcatcactgtctgcttaatttcattgtctgttgttctaaaagataaatcattagaggagaaatctgagaagtaaaatattattttaaaaatgctgtaataatacccacctacacatggatacataaaattgaccctattacttataatttaagagactggaaatatttttttttcaatttctcccccaaaaggcactttaaattcacattaatatatagcatgggccagttttcttaattttcaggcaactccgtatgatatggacttactgccacattaaaatacgttcttccactgtatcaaccttatgtgaaatccttgagttgtaaacatggaaacaaaataatgataactgctaccaaaaacacacttaagtatatagcccacagaccctataaaacaaccacacaatagaaactacaaagcaacaaactagtaacttcatgataggatcaaaacctcacatattaatattaatcattaatgtaagtrgtctaaatgctycacttaggcacagagtaccaagtggaatgaaaaatatatatatatatatgtctgctgtcttcaagagaaacatctcacacataatatgacacccacaggctcatagtaaagggttggagaaagatgtagtatgcagacagaaaacaaaaaagagcaagagtcactattcttccatcagataaaacagacttacttcatttatttgtttgagacagagtcaatgtcacccaggctagagtacaatagtatgatctcagctcactgcaccctccatctcccatgttcaagtgattctcctgcctcagcctccctcccaagtagctgggattacaggtgcccacgaccatgtctggctaatttttgtatttttagtagagatggagtttaaccatgttgaccagactggtattgaactcctgacctcaggtgatccgcccgcctttgcctcccaaaatactaggattacagggatgagccactgcacctggccaggtaaaacagactttaaatgagcataagtaaaaaaagtacaaagaagcgcattccataatgtaaagtgttcaacaagaagacttaactatcctaaatatgtatgcattccacattggaacacccatattcatgaaacaagtactttgagacctacaaaaagacatagccacacaataatagtgggggacttcaacaccccactgacaatgttagacagatcattgaggcagaaaactaataaattctggacttagattcaacactggaccaactggactgatagatatctatagaatacgctaccaataaaccacccaatatacattcttctcatctgtacatggaacatcacccaagatcgactacatgcttggccataaagcaaatctcactaaattaaaaacaaaactgaaatcataccacccacactcttggaccactcttggaataaaaataaaaatcattacctaggagatctctcaaaaccacagtattacatggaaattgagcaacttgctcctgaatgacttttgggtaaacaacgaaattaaaacagaaatcaaaatttttttaagtaaatgaaaacaaagatgcaacatactaaagtctctgggatacagcaaaagccgtgttaagagaaagttcatagtcccaaatgcctacctcaaaaggctaggaagattttaaattaatgatctaacatcaaacctaaactagaaaaacatgagcaagctaactgcaaaggcagaagaagaaaggaaataacaaaagtcaaaacagaactgaatgaatttgagaccccaaaatctaaaagaatcaatgaacccaaaagttggtttttttaaaggataaagaagatctatagaccactatcaagattaacaaagaaaaaaagagggacgatattaggttggtgcagaatacaaataagtacaaagaaatataaaagatcctcagagactattatgaacacttctatgcacgcaaactagaaaatccagaggaaatggataaattcctggaaacacacagtttcacaagattgaacctggaagaaataaaaacctgaacagactaatactgactttggaaactgagtcagtaattaaaaaaaagaaaaacacaaaaaacaaaaacttacctaccaaatagatctggaccagatagagtcacagctgaattctaccagatgtacaaagaactggtactaattctgctaaaactatcccaaaaaatcaaggaggtcggacccctccctgactcattctatgaagccagcatcaccctgataccaaaacctggcaaagacacaaggaagaaaaccaggctgggcacaacggctcatgcctgtaatctcaatacattggcaagccaaggtgagaggatcacttgccctcagttgttcaagacaagcctgaacaatacagctagacctcatctctactaaaaatcaaaaagtttacccaggtgtggtagcgcacacctgtagccccagctactgaggcaggagaatcgcttgagcctggaaaatcaaggcttctgtgagttatgatcacaccactatactccagcctaggtgacagagcaagagtctgtctcaaaaaaaaaaaaaaaaaaacaaaaaaactactgaccaatatccctaatgaacatagacacaaaaatcttcagtaaaatactagtaaactgaattgtgcagtacattaaaaaggtaagtcgccatgatcaagtaggcttcattcctgggatgcaaggttggttcaacatgtgcaaatcaaaaaaatgtgattcgccacataagtaaaattaaaaacaagaattatatgattatctcagtatatgcagaaaaaacttccaataaaatttatcagccctttataataaaaccctcaagaaactagacattgagggaacaaacctcaacatattaagagccatctttgacacacccacagccaacatcatactaagtggacaaaaactggaagcattctctttgagaactggaataagaaaagatgccgactctcaccactcctattcaacatagtactggaactcctagccagaccagttaggcaagagaaagaaataaaaggcctccaaataggaaaagcagtcaaactaactctttactgatagcattaatctatactcagaaaaccctaaagactctgccaaaaggctactggaactgataaatgacttcaataaagtttcatgatacaaaaattgatgtaaaacagtcagtagcatttctgtacatgaataatattcaagctgagagggaaataaagaatgcaatcccatttacaatagccatatacacacacaaaaatataggaatatttctaaccaaggaggtgaaagttctctacaagtaaaactaccaaacactgctgaaggaaatcacagatgacacaaactatggaaaaacattccatgcttatgagttggaagaatcaatatcattaaaatggtcatactgcccaaagcaatttacagattcagtgctatttctatcaaactaccaatgtcagttttcacagaattagaaaaacactattctaatatatggaaccagaaaagagcctgaatagccaaagtaattctaagcaaaaagaacaaacccagaggcattgcattattcaacctgaaactctactataaggctgccataaccaaaacagcatggtactgatacaaaatcagacacatagaccagtggaacagaacctggaatccagaaataaagtctcacatctacagctatctgaccttcgacaaatttgaccaaagtaagcaatgagaaaaggatttgctgttcagtaaataatgctgggatagctggctagccatatgcatgaaatcaaattggatccctccttttcaccatatataaaaaattaactcaagatggattaaagatttaagtgtaagtcctcaaagtgttaagaatcctagaaggaaacctaagagacaccattctgaccataagccttgggaaagaatttctgaccaagtcctcagaagacattgcaacaaaaacaaaaattaacaagcagcacctaattacagtaaagagcttcagcatagcaaaagaaactatcaacagagtaaacagacagcctacaaaatgagagatgtttgcacactatgcatccaacagaggtctaatatccagaatctatgaggaatgtcaataattgtacaagcaaaagacaacaccattaaaaacaaaaaaaagaaagatatgagcagacacttcaaaagaagacatgaaagctgccaacaaacataaaaaatgctcgacatcactcatcatcagagaaatgcaaatcaaaaccacagtgagataccatctcacaccagtcagaatgctattatttaaaaagtcaaaaaaacaataggtgctggtgagacaatgaagaaaagggaatacttataaaaacagtgtggagatttctcgaagaacttaaaacagaactaccatttgacccagcagtcctgttactgggtatgtacccagaggaaaataactcattcaatcaaaaagacacatgcactcacatgttcattgcagcactagtcaaaataacaaagctgtggaatcaatctaggttctgttaatgatggactgggtaaagaaaagggggtaaatcaccagggaatactacacagccataaaaagtatataattatgtattttgctgtaacatggctgcagctggaggccattatcctaaggagattaatgcaggaacagaaaaccaaatactgcatgttttcacttggaagtggcaactaaatattggatattcatggccataagatggcaataaaagacactggggattactaaagcagagagggagggaggaaaggaggraggggagcaatggttgaaaaattaactaagtggtactatgctcagtacctgggtgatgggatcagttgtaccrgaaaccacagcatcatgcaatatatacatgtaagaaacctgtacatgaaccccttgaatctaaaaaaawttttaacaaatatataggtatcaggtttttttaatttaaaaaaatgtataatgtgttcctgtttttcatatagaaaccagaagatttggacatgatctgcatgtaaacaaactatgtcatttttaaacagtcatgaaaagtcataaaaagcctttagtatgaatgatttattaaattacaggtcctcatgtatatccagactattaggtttgaattttggcaccttcttacctgttgtttgaccttaggtatgttacttaacttttcttgcccaaggttcgttatgtgcaaaatgaagaaagtaataatatcctacctcttmagattattgttgaataataaagtaatatatgtaaaatgctccatatattctaagtgctgaataagtttctctgccactattattattattattattattattattattgtaactattgtaacatgaaggatttctatctgtctatcatgttatcagtaaaataaaaaagggttttctcaatctagaaaataacactaacagaaccctagtcataacagtgctagaattggcccaaatttatccagaacttccaaaatggcacttgactccttttcagtgtatcaacacaaattaacattatataaaattcggcaagttttacagcaaaaagaaacataaccgagtacacatgtacctggaattgaagtatttcatctcttttctcttttccttctagaaagagcatgagatttagtatcggaaactgttctaattctggctttgcctcttattaatcataataactagagggagttggttaattctctgagcctctctttttccctttgtaatgtggagctgataactctttttactgtggggtgctttcagcgtctgcctactggcagtctccagtcctatttggactccagacctttccttatccattcctgggctgggtaatgttggtcctctgtcctccagtacagtarttttctacaccatttgttttcttatttgtctccctcagtagattttgcatccataggcaagtgcaactctgtcttgttcacatttgcagcatccattcttgggcatagttaatgctcaattaaatccttacttagcccataagaaatcagtcacaatagtcatctatcttagactcactctattgctaactttattcagattatgtagaggacgatgatattctaattcaaagactcacagtatatatatattcctggaaatgacttgctgaattcctctgagtgactaggatccggcccctccccacaagaataaggcaggcagaacagggttgtcctagtgtggttattatactatttatcatttttttcttctttgtatattttatgaattggataatgacaggaatatagtctatcagcattggaatcccaggaggctaagtacatcagttttcaatgattttgggctttaggtacattgtcagagatatgtgctcattcccttcatgttcattccatctagcctaatagcatgtttgccctttaggaatgtaattatgtggagactaattagtgggctattgccatcattcaggtgacagaaaagataaaaagggctctgacagaagcataaagataaaccttgatgggcagagtaaagagccttagaaaataagaataggtgggcttagtagacaaaacatggaattgtgaagataagtgaagacctaagagtgataatcaggtttctcattttagcaactggagtgaatgactgtgttaattacaaagattttttccctattttatttatttcatttatttatttttaggtgggagatactgatttcatattttggatgtattgattttgaaatttcagtgagcctctaccttgatgtggctcaatcagcttttgaaagcagatctggatgtcaggagggagatcattttttcaaaattgtgagcagtcagcatgtacatgagccacatttatgcattatgtcatgcagagactgtagttatccacagagactgtatttattcctagagacaagtacaaaatcctgtaaaacaccaactccttttaaaggakttcatgaataaagagacattttctttttcattctgtgtaggagggtctcaagaagagactggtctcccaggagcccaggaaatacagagtttcaggaaggaaggtgaattcagtagtctgaagtgtagtagttgagtggagtttcacataggtgcactattttgagggtttgatgattggtagaaatttaataggacatttcaggggaattctgggaagagaatctaaacaggatttaggggtaaatgggattggggcattggtcatatacaccacagaccattcttaaagaaaatctggctttgaagggaagaacgatcataagcaatagttagaggtggatacaagaatgaatacaggttatacgggtgttttyttctcctatgtctaagaggtacacgaacatttttgtgttcttaagaaaagaaaaccgtatgataaaagcagctgaagatattggacaaagaggggttgattgaaggattttaatttctaaagaagctagaaaaaatagaattaaatatctagatggtatttctcccctggtgcacttacccttctatcaagggagatgcacctctttatctgaattttttttttctttatctgaattttaaagcaaagccatgaagacatttaaggttgtagaaaagtttcasaagttagctaatatgtatgagtttaattaatgggaragcattatgtcwataaaattattgtcatawagagtattattcctttttaaaaattttttcatcctctttatcaattttacccatgtktgaataaaactgaccatttccacaaatgcttaactactgcaggragctttattctctcttgttcctagcagcagacaagaacacttcacagcacagcatattaatttcatgatcagatatacagatatacagatatacacatatatatatatatatatatatatatatatatatatatatatatatatgtgaaagtgatcttattgtgtttgggaattctttattcagatgactttktagcaactatgagaaataatgaagtttttaatatatgcttttgacacaagtgagcattctttaattttaaatattttaccaagatgctcattaaataatgtattttaaaatgcttaacagaataagtttttattagtagtcttctcttttctctgacctcccttttaccagcctttcacagacctcagcagctgccaagttgaatctgcaatttgagatgataacagcagtattcaggctcaatagatgtgcggaatgtctgtaagatacttaactgattacaagagaatggggataggccaaaaagccctctgtgcgagctttttgaacttagttcaattctccaacaccttgttttcatagacatgcctgtaattgatttcattcggtcatgagggtgggttctggcatggctgagatattacatgcagttactaccttagagccttctaagaaagcctatggaatcttggggtctgcagagaaagatgtttttcagaacagtgaactgaaatttgcatagtgttccgaaatccagtcttattcaactaaatccaaatatcaagaaaagggtgatgttgatagccttcagtcttttttgttgttgttcttttttggcgtctgattaaactgtgactcyctttttgctattgagccagactaccttttgccttkcaggcagccaagcaccaatatttcccaagcaacacagctagtgagagaggcatctcatgtttccayatatacatatctcactgccttaggcaagcttcatttccgaagtgatgggaaaatgtgcatgctccaagaagaaaaccaggtggttagtaattctagtgggagagaaaagacagctagaaaaggggaaagttcagtggtggtaaaaggcttttagaaaatacctcctaatactttctaatgcagcacaaatgcaacggatacctatccagtattttccctcctgaggaatcatttccttatatttagaatttatttttatattaccaggttagcatttttactgtgctgttaaccatttttatttttggaatataaaataaaaatttgtggttttatatataataatacagtcctttctctaaatttctgttttcctcatgcagagggctacttctccaggagaacagcaggtttgcagaagcactacattattataaattggccattgggagcaggcctaccctggcttgtaagtaatactcaagtgtttatttttttatacctctttccatatttgaaaattaactctaatttacagcctcactgagaaaacacttggtgctcttatttctgaatactcgctaatcagattatgaacctctaacaattatatctcaattgcatcatactttaatgtccattgatcattaaaaaattatgatagctataacttttactcaactatattttaagcttaaaatatttggaatttcttgctggcagacactatttcatatgttctgcagtgatatttgcagtttcactaccattattgatcccatgagtatttgtgtcataagtatttttttcttttttaatgagcactaaaccatagaaaccaaattgaaacaaagaaaactttattttattcaagtgtatatcatcttctcacacttttgtttccacttttccccctcagctgcatatttaaataccggtattattctaatgaaccaaggaaggacggaagaagcccgacggacattcttaaagtgttcggagatcccagatgaaaacctaaaggaccctcatgcacacaagagctctgttaccagttgtttgtacaacctaggaaagctgtatcatgagcagggacactatgaggtctggccaatgcctctctgtccttttccctcccccttgttctgatccagtctcagtggtttgtaacctacagcctcctttgagcctatgtcctttgaacaactaatatgtatacacgttaaactattgtcctttgagaaactaatacatgatgacattggaatggttttttgatcaaatttgtttagaaaaagcttctgctaaataaaaatttaatagatttctttcctgtgagtttctcagagcaattatggtatgtcaatatgtattgtgactattcaagaatggggaaataacatgtaatgtttctcgagcttctttgctcaccatttctttggtttgatgacccaagacacagtttctagaattgttaccctatgcccagtgtttgatattttaaaaaatatattctttgtactttaaggaagtgatttgatataaatgccacccatttctcttaattctttaaaaaactattatgaaataaaatgtaattttattatttcttaactgagggaaaagaaacagtggtgtaacaggatgttgcacagtaagttaggaggtgacccagactagtcctcccttcctctgacaggaagccatgcctgcatgagttccttattgcccctctctccccttcaaactgctttcccctgccctcccactcacgtactcttatgcaatgtattaaaactatactataaggatggagatacaacttttaaaataattgcatttagtaatttctgtgggtttcaagagctggaagatttgttagctgacattatattagatcctaccaggtttcctgacttaaagtaattatgcactttagatgactaatgggtaactttcaaatatgtatatatatatagtttttttggttttttagttgagtaatctgcatgaactagaaaatttgtattaaaagagcattgccaacattcgatgcctcgttaagctatggcattcttcactgactgggctgagtgttttcattggtggaattgagatagtatgccacaaaaggacagttcaattattttcctctagtgaaccatttagaaatagcagtggatggttttaactttggaagaaagttattatcttattttcagtgacgatccctgcactttattgatgatttatctattttttttgttttataaattaggaagcccttagtgtatacaaggaagcaattcagaaaatgccaaggcagtttgccccacagagcttgtacaacatgatgggtaagtaaaacattaacacttttaaattgatatttcagggacctgtggagaaacaggaacccatgttcgtgtttaatggaattctaataaatcatattaatcctcacaaaagaaacgttcacaatctggcatcatactcaaattctgacagagcatatttattctgacatgacaaataaatgcattaaagcagcgattcccaacaccttggtcatatcccagaattattgcaagggactctcaaaaacatctgggtatggaatattagctagactctagagactgtagaaataaataagctatatatatgtaatttttcaataatagtaataaagtatacattaattttagtaagtgtatcaaattcataatttttattaaaatttaattttaaattcagagtaatattaataataaaaacaagattatgcagacaatagatatgctacaacaattattctatgttttatgttgaaaaattgcctaattcttattaatcagaaagtatgtaagtctaggccatggatttttctgattataagaggtcaagaatgagaaattataataaaatatctatcatctgtgattgatccttgtctgccttgtagtaaattgttactacagctgtttgatgatggttacccctgcaaaccacatattcagcatatgacacttggaaaaaaatccctaaagtaaggtggcctaatgactaattaatattgctgcttggagataataaagagaagagaagcattttgtcctcaaatcaaatatttctttttttccaaagcataaattgtaaagtcaaattttcccttttcattaaacctgcttaagttgtttaatatttctagtcctctctcatgcatataaaataaatgagattagactatataatctccaggattattgtacacttctacattctatatttgaggaatttaatagtagctatatgtcttgagcacagaaaaaaatcccaaacctctcccaaactacaaaatacacacctggtaagaacactcacgttctcttttttacaaaggacagaacatttagaaatagtttagagattggctggagtactagacagtaaacagaaaaataaaattatttggaagaggttaaaatatttattccatgtctctgggaatctcaccctcaatttgcctgtggagtgattgaatatcatattaaacagcacactggagtgttttttaattgtcacttttttcctctttggtataattactaaaaggtaaaatttagcttcattaaatatattcttgccattaaatttttataaattaaaacaatgccttttattattcagcatttcaccatcaatctgtctatatgaataaaatatacatgtccataaagcatgcgcttaggatatgtagatttatgagttgaattaacttttttattttaatggtagatgtttttgtgtcaaaataaatgctgaaagagttgctttctctagctttggtttaacttattattttattcttaattctagtgcttccaaggccttattcccagttttcctcacttatcaaataagacatttttcttcaaattaggataggtgtctaagattcttggcaacagactgcatgtagtattttgttgttgttgttaatggaaagtggtgatgatgttcactagagttagctatttcagaaattcattcaattattttatgtgaataaatttgaaaattcagccagtaccttgggatctgtctctcatatggttacacagatgctcagctcacacaggcagcaaaagataagtgtgtccctgggggttattgcttaatcttttgtctcattttccattagagaaggagatggttgctttgtccagactctgaaaagcaccctaacaatttttaaagggagggtcttaatatttaacattccagattttttctacgattatggtggctgccttctatttaattttatgtgaaggtctgctagccaatcaagttttatagtttcagttattcgggaaactataattttctcagagagtgaattcacctcctaatcaaaatgggttaaataccccaagtgttggctctagctcctaatacattttgattagcctccatttgacaagaaaaaaaatgacccaggagataagctgccctatcagttcatcagtttcattagtctgtcagcgtgtgctgattatcctatcaagtttatcaacagccttgaatgtgttttctaattcacacatttacatattattagtgccctttagggatcagtgaaggattataatgtctggctagatttagcctgtaagtgttcatttttctcatgtgtcatttaccccttcacaaccactacccccaagcacttgtgtatagatatacaagcattatattttttcccattctatttttttcttttgtttagaggttaggagaaataaaggagtgtgcgtgaaaaaatacaattatattttaatgtgattattagtgtagtactaaattcactgcagttgcttttgttaaaaaacactctagtcctttgattttaatctccccttgaacattttatgaaaaacatgctatataccttatgccacatgccaatcgacttatcctgaatgccaagtgaatgtgtttttcctgtttctgtattaatagaaaataacaagtttgattaattccccaacttaaattttccatattttaaaactattcatttattttattatggcagcttataagtagtttttttaaatgtttaaaagcctattctcatttatcctcttcaatttcataggaccaagatgtttgagtaacaataattgaggacaccttcccatcctgaattaggtgaattacaaacatacataaaaaacataaaacagataataaatagtattttataaacaaaagctaaaattttacttaggtgcatataattaggaagatatgagaatacatgaaatattaagagaacaaatcacaaaatatgtgttaaattgctcctagccagttgtgtgacttaattctgtggacctcatttccacttgagaaaacaggttagattaaattgagattcaccataaggtagtccctgaagtcagataccctcggttcaaattatggctttgatactttctccctgagcatccttgggcaaattacttaaaagaagcctcagtttcccttttataagattttggtaatagtagtatcagtgtgaggattgattaaagtgataaaaaaggtaaaacatattggtccaactacttaacctagtaagtgttttataacgggactttccattgtaattatcatcatttccttaggctttttgagacggagtctcgctctgtcgcccaggcgggactgcggactgcagtggcgcaatctcgcctcactgcaagctccgcttcccgggttcacgccattctcctgcctcagcctcccgagtagctgggactacaggcgcccgccaccgcgcccggctaattttttttgtatttttagtagagacggggtttcaccttgttagccaggatggtctcgatctcctgacctcatgatccacccgcctcggcctcccaaagtgctgggattacaggcgtgagccaccgcgcccggcctccttaggcttttaaactccaaaagttgattgtattctctgtcactgtttttgtatttagcaatgtggatatgactacttcatagacaagatttttgtcatcattatggccttggtagtcaccacagttcagtggagattctgtttagttctatcctatttggaattactgtattttctctccaggctcacttccctttttctctcagtaactgcagtcaaaatccttctcttaccattagctatattaacctaacttggtttcattaatagagtgcttcctccaaattaagattgtcctatgtaggttagagtttttttctttttctgtcatgatttatttttcatctagacctaaccaaaattattctgtattctattgctcagaggcatttattggatctcagtttctcttcttctgaagttacagatgtattttagaatcatagaatgttaaagatggaagactcatatctta

SEQ ID NO: 96417 - DNA, 12803 bp, Homo sapiens
gtacaaagggtttgcgttcccagcatggggttgcatctgtaagacctatgagggacaggatatttggtaaggcttcttaaacagacctatgattctgtaggagggcacccatgtaaaacgggccctcttaacctccaaatttaccatgacctgggtaatagacatatttggtgggaggatatcccagttatcataaagctagtgcaacatggcttgtatatgaaacatactaactgcttcatctggggtacttcacttggtattttaaagggagagttgggcagttcccttctcagggcaaagagaccttataatggcattatctggcccactaggctgattgctttttcaagaataaaccccctttgcgtttggatcatatatactcagtgactgttcagtaatgagttctgggtcctgcattaattcaaacaagctcttaaattctgtagcatttaaaattaagaattttgtccttaaagcagttattttcacaatccactaaagttttttttaaaaaaagaagctgaatgataccaatctacaaaatggaacaattcctttacattacaccctttggttttaaatagttacttggttttgcccttcccctatattgactattttcttggtaaccatagggctcagagttttgttgccctggcttgttttgttttcctttttaaaaaaaaaaaatccatttagttttatctgtataattttcttcattataaagcaactcttagcttattattattattattattattattattattatttttgagacagagtcttgctctgtcacccaggctggagtgcagtggtgtgatcacagctcaatgcaacctccgcctgctgggttcaagcaattctcccatctcagcctcccgagtagctgggattacaggcactcgccaccatgcccggctaatttttgtattttttttagtaggacagggtttcaccatgttggccaggctggtctcgaactcctgaccttgtgatccgcctgcctcagtctcccaaagtgctgggattacaggcgtgagccacttagtttctttctttctttttttttttttgcgatgaatttttttttttgagacggagttttgctcttgttgcccaggctggagtgcaatggcacaatcccggctcactgcaacctccgcctcccgggttcaagcaattctcccgtctcagcctcccaagtagctgggattacaggtgcataccaccatacccagctaattttttttgtattgttagtagagatggggtttcatcacattggtcaggctggtctcgaactcctgacctcaggtgatccatccgccctggcctcccaaagtgctgggattacaggcgtgagccactgtacccagcccaagccacttagtttcttaacaaaaaagaaacttacatttttttgagagttgacatccgtgtgtttatttatttatttattttctttgagacggagtcttgctctatcctccagggtggagtgcattggcacaatctcagctcactgcaacctctgctttccgggttcaagggattctcctgcctcagcctcccaagtagctgtgattacaggaacacgccaccacgcccagctaattttgtatttttgtacagatggggttttgccacgttgaccaggctggtcccgaactcctgagttcaggtgatccacccgtctcagcctcccaaagtgctgggattataggcttgtgccactgcaccccagccaataaaattttaataaaagcatattttatgtttctactatcttaacttctagtaacccaaatttccagtgggggaaaaaaaaacttgagggtttaaacatgactttaagatttttaaatcactggagagttttaccaaggttatgtaaattaaaaggcatctgagctagcttttaccaatgtgataagcacttacattttttaaattacttgattagagctctttcatgtagtttggcagtaaagtatcacttctatatgacacatataaagatacagatataacaggcatgcagaataaaagccatgttcaaaagatactttatttgcctgttttcaaaaacaatttttctcccttactttagataattagtaaaagttacaggacacaacaaaaggtgaaggagagagccatctttcaaggccttttcaaaagagaaagagggccgggtgcagtgactcacacctgattttattgtctcaactcttttatctttttcttctccttttaaaaaaattccttcactgaagctgggtgcggtggctcacacctgtaatcctagcactttgggaggctgtggtgggaggatcgcttgagctcaggagttcgagaccagcctgggcaacacagtgagacctcctctccacaaatgatttttaaaaattagctgggcatgtatgttggcacgtgcctgtactcccatctgcttgacaggctcaggtgggaggatggcttaagtgcagcaggttgaggctgtagtgaactgcgaccatgccactgcactgtagcgtgggtaagagaacaagaccctgtctcccccctcaatttttaaaattaatttaaaaaataaataaataaaattacttcagtgagaaggaagaaatctcaactcttattgcctggttagtcctgggcaagtccaatccagggagggcctagctggtgtctcaaattaataggtctatgattagcagccccccacgtattggtgggatactacaggaaacacacacataaacaccatccttaactgtctatgaaaacaagagtctttcgctatcttagcctatttttgaaagtaaatattttgggggaatgtgagggttatatcatctggtattctgaacctagaaaattacctctgagactttccatgaagaaggcttattggcttaagtcgctaagtaaattggctttatttaaaaaacattttagaccaggcacagtggcttatacctgtaatcccagcactttgggaggccgaggctggtggatcacctgagattgggagcttgagaacagcctgaccaacatggaaaaaccccatgtctactaaaaatacaaaattagctgggcatggtggcacatgcctgtaatcccagctactcaggaggctgaggttgtggtgagccgagactgagccattgcactccagcctaggcaacaagagcaaaactccatctcaaaaaaaaaaaaaaaaaaactttatttatttatttaaataaaacattgattgattgattgattggagatggagtctcactctgtcacctaggctggggtgcggtggcactatctcagctcactgcaacctctgcctcccagttcaagcaattctcctgcctcaacctcccaggtagctgggattgcaggcacacaccaccacacccggctaatattttgtatgttagtagagacggggtttcactgtattgcccaggctggtctcgaactcctgagttcaggcaatccacacgccttggcctcccaaagtgctaggattacagccaccgtacctggcctgaggaaaaaaaaaaaaaacagctatctttctagtacccataaaaagatacagaaagaacacagccttagaaactcccttggcaagatttttaaaagacagaaatcagattcaaaacacaagttaaaattctttgtacactcaaactgcttgttttggatcccctgaagggcctgcaaaaaggcactatgatctgtggtctagtggctggcaataaactggttagctgctgcagcgtgggttcgattccttgtaaggtaacagtccattgcagatgcaagtcttttaactcagaggaaaaaaaagaaacacttataaaaattagtttgaggccaggcacgatggctcacgcctgtaatcccagcactgtgggaggccaaagcgggcggatggcttgaggccagaagttcgagatcagcctaactaacgtggtgaaactgtctccactaaaatacaaaaattagccgtgtgtgatggcacacgcctgtgatcccagctactcaggaggttgaggtatgagaatcgcttaatctggaggcagaggttgcagtgagtagagatcatgctaaagcactccagcctgggcgatagagcaagactctgtttcaaaaaaaagaaaaagttttgttttgaatttccatttgttgactcctgacttttgggggtactcattcgttattggtaccatatacacaataaacacatgtatagacatatacatacatatatagacacatgtatcgatacaaaagccaaagactagagagtttaattcaaaagagagaagagttttaaacctgacatgaacccattagtgacttttggggctctataaggaaaacgagaggccccaaaagagagggtcagtggcacctttttttttttttttttttgtatttttagtagagatggggtttcaccacgttggccaggctgattttaaacttctgacctcaggtaatccacctgcttcagcttcccaaagtgctgggattataggcgtgagccaccgcgcccaaccagtggcaccttttttttgtcttcctcaagggatctcagggttgtcagaagtcccatctagacccctttaagggttatcaaaggtggcaaaaggaagaagtagaaatacatggaacaaccagttttggagaagccaatttggagagattttaagcttccccaaaaggctaatgaaattttacattttcaaggcagggtgcagtagttcatgcctatagtcccagcactttgggaggctgagggaaaatgtaccacttgagcccaggagttcaagatcagcctgtgcaacatggcgaaaccccatctctacaaaaaatacaaaaattagccgggcgtggtggtgtgcacctataatcccagctactcagaaggctgaggtggaatacttgagcccgggaggtcaaggttgcagtaaggtgacatctcaccattgcactccagcctgggcaacagagtgagaccctgtctcaaaaaaaaaaaaaaaaaaaaaaaagacaaagaaaaaagaaattttacatttttctcagcaaagatcatgccaacaagaaaggaagtgaacacaaggactaaacataatttttttttaaagggggtttcagtgaactgaaaaaatttcccagggcatgagatccaaaagagaaaaagcagaaagcctttaaaaaataaaaaaattggccaggcacggtagctcatgcctgtaatcccagcactttgggaggccgaggcagctggatcacgagttcaggagatcgagaccatcctggccaacatggtgaaaacccgtctctactaaaaatacaaaaaattagccgggcgtggtggcgtgcacctgtaatcccagctactcaggaggctgaggcaggagaatcgcttgaacccaggagatggaggttgcagtgagccaagattgcaccactgcactccagcctgggtgacagtgagactctgtctcaaaaaaaaaaaaaaaaaaaatatatatatatggcctgaatatcagcttttagttaagccaacttctgaccagaaagctctttttaaaaatcctttgtggctgggcgcggtggctcacacctgtaatcccagcactttgggaggccaaggcgggcggatcatgaggtcaggagttaagagacaagccaggccaacatggtgaaaccccgtctctactaaaaatacaaaatttagccagacgtggtggcaggcacctgtagtcccagcttctcgggaggctgaggcaggagaattacttgaacccaggagacggaggttgcagtgagccaagatcacaccactgaactccagcctgggcaacagagtgagactccatctcaaaaaaaaaaaaaaaaaaagagggggggttatttcagaataaatgaatggaggaaaacaatgatatagataaaactaaacagatataaaaagttgggcaaagaggctttgctgccaccaccaggagccctgtactatcagccatggtcaaccccgtgttctttgacatcaccgtggatggtgagcccctgggccgcatctccttcgagctgtttgcagacaaggttccaaagacaacagaaaactttcgtgctctgagcactggacaaaaaggatttggttgtaagagttcctgctttcacagaattattccagggtttatgtatcaggtggtgacttcacacgccataatggcactggtggcaagtccatctatggggagaaatttgatgatgagaacttcatcctaaagcatacaggtcctggcaccttgtccatggcaattgctggacccaacacaaaaggttcccagcttttcatctacactgccaagagtgagtggttggatggcaagcatgtggtctttggcaaggtgaaagaaggcatgaatattgcagaggccatggagcgctttgggtccaggaatggcaagaccagcaagaagatcaccattgctgactgtggataagtctagtaagtttgacttgttttgtcttcaccaccagaccattccttctgtgctctcctctcaggagagcacccctctaccccatttgctcgcagtatcctagaatctttgtgctctcactgcagttccctttgggttccgtgttttccttgttcccttacatgcctagctggattgcagttaagtttatgattatgaaataaaaactaaataacaacaacaataaaaagctagggaaagaaaataaagaatgaaaacaaattctggcctctgcctctgcctctgcctctccctctccctctcccctctcccctctcccctctcccctctcccctctcccttctccctctcggtctccctctccctctctttccacggtctccctctgatgccgagccgaagctggactgtactgctgccatctcggctcactgcaacctccctgcctgattctcctgcctcagcccaccgagtgcctgcgattgcaggcaagcgccaccacgcctgactggttttcgtacttttttggtggagacggggtttcgctgtgttggccgggctggtctccagctcctaaccgcgagtgatccgccagccttggcctcccgaggtgccgggattgcagacggagtctggttcactcagtgctcaatggtgcccaggctggagtgcagtggcgtgatctcagctcgctacaacctccatctcccagccgcctgccttggcctcccaaagtgccgagattgcagcctctgcccggccgccaccctgtctgggaagtgaggagcgtctctgcctggccgcccatcgtctgggacgtgaagagcccctctgcctggctgcccagtctggaaagtgaggagcgtctctgcccggctgccatcccatctaggaagtgaggagcgcctcttcccagcagccatcccatctgggaagtgaggagcgtctctgcccggctgcccatcgtctgagatgtggggagcgcctctgccccgccgccccgtccgggatgtgaggagcgcctctgcccggccgcgaccccgtctgggaggtgaggagtgtctctgcccagccgccccgtctgagaagtgaggagaccctccgcccagcatccgccccatctgagaagtgaggagcccctctgcccggcaccaaccccgtctgggaaatgaggagcgtctccgcccggcagccgccccgtccaggagggaggtggggggggtcagccccccgcccggccagccgccccgtccgggaggtgaggggcgcctctgcccagccgcccctactgggaagtgaggagcccctctgcctggccagccaccccgtccgggagggaggtgggggagtcagccccccacccggcctgccgccccgtccgggagggaggtgggggggtcagcccctcgcccggccagccgccccgtccgggagggaggtgtgggggtcagccccccgcccggccagccgccccgtccgggagggaggtgggggggtcagccccacatccgggagggaggtgggggggggtcagccccccgcccggccatccgccccgtccaggagggaggtgggagggtcagccccccgcccggccagccgcccggtccgggaggtgaggggcgcctctgcccggccacccctactaggaagtgaggagcccctctgcccagccaccaccccgtctgggaggtgtacccaacagctcattgagaacgggccgggatgacaatggcggttttgtggaatagaaaggggggaaaggtggggaaaagattgaaaaatcggatggttgccgtgtctgtgtagaaagaagtagacacgggaaacttttcattttgttctgtactaagataaattcttctgccttgggatcctgttgatcggtgaccttacccccaaccctgtgctctctgaaacatgtgctgtgtccactcagggttaaatggattaagggcggtgcaagatgtgctttgttaaacagatgcttgaaggcagcatgctcgttaagaatcatcaccactccctaatctcaagtacccagggacacaaacactgcggaaggcggcagggtcctctgcctaggaaaaccagagacctttgttcacttgtttatctgccaaccttccctccactattgtcctatgaccctgccaagtccccctctgcgagaaacacccaagaatgatcaataaaagaaaaaaaaaaaaaaaaaaagaaaacaaattctaagaggatataaaaggtttatggaaattttatctkgtctagtcaaagctgatcaagattagacagatttgtttgtaaagtttattaaaatcagctttagtattaaaagcacattaatacatatatattatatataaaatatatttttttaattttatttatttatttattttgagacagaactttgctcttgttgcccaggctggagtgcaatggcacgatcctggctcactgcaacctctgcctctcaggttcaagtgattctcctgccttagcctccagagtagctgggattacaggcacccaccaccacacccagctaattttttgtatttttagtagagacggggttacaccatgttggccaggctggtctcgaactcctgagctcaggaaatccacccgcctcagcctcccaaagtgctgggattacagatgtgagccaccatgcctggccaagtgtcttattttcaaggaggatcatggaaagcatgggaagaatgctgacaaataaaggtttctgataactttgaaactgtatcaccggactgggtaaaaatttccaaagtctaatgaaaataaaactggactcataaaattgctaacctccagactaatgttttccatttttcacccactcttctgacttagaatcactaaaaattaaaacggccttttttagcttggcgcagtggctcacacctgtaaatcccagctccttaggaagccaagtcaggaggatcccttgagctcaggagttcaagaccagcctgggcaacatcaagagaccccaccttgaaaaaaaatttttaaaaattagccaggtgtgtagtgcatgcctttggttccagctacctggaaagctgaggtggcaggatggctttgcccaggaggttaagactacagtgagccatgatcacatcactgcactccagcttggatgacagagcaagaccttgtctcaaaaaaaaatccaaaaaactaaaaaccctgcctttttcctaaggccttaccagctaaagctagtcaacgtgactttgaaaaaaaaatcaccacaaaagcttatatttggacaaactttacacacaacctacaatctaggaaaatagattgctattaatcttcccaattgactgccctccagactctaaagaaactagtttatagactataccagatattaagctttgtttgtcttgttccatagaaatgtctctcttattaaatacctgtttgcctacatcatatacagaggcctagctttgagaactcatctacaatgccatcttctgaaatgagacacaacaatttaattgaactggactatcccccaaaatgagaggctggtttaatgggatcctttgccgctcaattactagcccgatttctctctccacagacaccaactcagcttatagtgaaacttctaaggaagtttcagacaaaggaaataaagaagaccagggactcacaccccaaaatatggcatcctgtatgctaatcattttaaattaaaggtccctggaaaccagcagatactggaagcagctttactctgataactaccttatctgcctaaagtccagacctgtcaaagaagacaacaattacttctggtctcttccctgagttttcattaacttacttcagtacaagaagaaagatggaagcctgtcaacacacctggacagatttttgtcagaaaccattgtctgctctgcaggcccaacagtcattgtcccaggccactgtatgttctccaggccactgaatcaccctaaaaatcatttacgatccaccttaaaatcacccacattttcccatctcccatattcctatgaaagagggtatataagcatctgtaccccactgggtcattctcctgcaattccctcatgctatgcacgttaaaataaaatttctatgcctttctcctattaatgtgccctttgtcggttgatttttcaacaaaccctcagagagcaaaggggaagcttttccttggcccctacatgctatatggcagaagggaaagtgctttaagtttatgttccgagcagtccctccacccataccaaggaagcacagcaaggagcttgggacacttcccaaagaaatcccaaagatttctttacaacgtattttttacaattcctttacagtagcccccaaattttatccactttcgcatcttcaggatcaagcagagtgcctagagtgtacactctagaaatgtttattgaattaagaagcggctgacagtgttgtgcaggtagtgtggccagaagagtagtttcaagtcccaggcactcattagttgtatgacctggggcaagtcacctaaatataccgagatccatttcttcaccaatgaaacaggaatattactacttgccttgtctaccttactggctcctcaggagtctttacataatgagcggcactgtaaaacgttatacacgtgtatgtacagttttgatagggctgttaattagtctcaatggtgaaacagaaagaaacctggactcaacagtcaaaagctgttgggccgttgtgcatgggctacgactaacatgttccgttttcccatcttaaacacaaagtttagactcgatgatggttcggaccctgcacttaatagtctctaagtccgctacaggctcggaacctcaggtgtcctcagagaggtaaaccccagggttcccagatacacctgcaagggcagggacagtcaaggtcgcggggtmctaacacgcgggaggctcacccagtcaaagtcacacgggttaccgtcttcgcgttgggtgggcagaccgtggcagagcggcggcagtttcctcacragtaggaaggcagcagagagcagggccgacagaaggtagtaaggttgggcgagccatcgtgaaagtcgcggcaccgaatacacgagagcaattagaggtgccaagaccgccatcttttcggccgtaacggccactgctcgccggcgtcgtaggtctcgccccgcctcccccaccataacgactgctattgggctatatcgcaaacgtacggcctctaaacccggatgtagttctctgaacgctgtggtaggtcagaacccaaaaaagaacttaatattttattggttagtctagttgtcgctttatccgcctaagtcattttattggactgtagcaagcggagctagcagaagactctaataaggttaaatagcacttcctgaacgttctcataaggcgacggaagtagttgttgaaaaaaggtaggcggtgcctgaggcatccaatgacaagcggctccttgagaaagggsgggggggtactccttgaaagcattgtccaatgaaaattaccaacggcagacacggagacagcgccggggcggagggtacgatggagaatttcacggcactgtttggggctcaggctgacccaccaccgcccccaaccgcactcggcttcggaccaggaaagcctccacccccgccaccgcctcctgcgggcgggggacccggcacggccccgcctcccaccgcggccacggctcctcctggcgcggacaagtcaggagctggctgtggccctttttacctcatgagggaactgccaggtgagtactcggccttgccaaagccagccaatcaaatcttagagaggaggtgatgggcgtggctctcagccggctagcggaggtgcgaggtaacctaggcaacgcatacccggactgtggagccctaagtcggaagcgctgttaggattcacaagcagagggatgacttgaattcaaccaggatgagttgaattcaaccaaagggatgaatggcgggcaggggcgtagtgcatctccgttactgtcttttgcaccatgtccaggctgtgtccctgacactggtttatgtctctctaaaaaatgacctagggctgggcgcggtggctcacgcctgtaatcccaacactctgggaggcggaggcgggcgaatcacctaaggtcaggagttcgagaccggcctggccaacatgatgaaaccctgtctcc

SEQ ID NO: 96418 - DNA, 14653 bp, Homo sapiens
ttcaaattttgaaagcaatactactgtgaatacaatgctatcaaacagcattgcaagctataaggaaatgttttgtgataggacgagtcaatcgatgtagcaaacttcattgctgtcttactttaagaaattgttagagccacccaaccttcagcaaccactaccctgatcagtcagtagccatttacatcaaggtaagaccctccaccagcaaaaaagattatgacttgatgaaggctcagataatcattagcatttttagcaataaagtttttttttattaaggtatatacatttttcagacataatgctattgcaaacttaatggactacagtatagtgtgaaaagaactgtaaatacactggaaagcaaaaaatattgtgtgatttgccttcttgtaatatttgttttattggagtggttgtaaccaaacccacagtatctctgaggtgtgcctggatacaccagagaataccattcagccttacaaaagaaaaaaaatactgtcttttgagacaccatgtttgaacatgaagaacattatgtaaagtgaaataagtacagaaagacaagtacccaaatactgcatggcctcacctatatttgaagtataaaattcaaactcatagacatagagattaaaatggtggttaccagaggctgggatatggaaggattgaggagatgttgatcaaagaacacaaactttcagttaaaacataaataaataaaaataatgtagaagaagtttgttttccttgcttatttgttttccttgcttatttgtttaatcattcgatgtgtatgtgtgttttgattcttaacacacaattattccaaaaaaataaggtgctttgaaataaaaccaactttcccccatagggctatttattttttaaaaaaatatcatcctaatgtctgcatttataataaccatttatttgttttaaaaatatttacttaatatctaaaacctaccaatactatggtcttccttaagaaattgtcacagccatgcaaccttcagcacacgctaccttgattagtgagcagccagtactaggctaagcactttttaaaaaaaatattatttatttagagacagagtctcactctatcacccaggctggagtgcagtggcatgataccggctcactgcaacctctccctcccaggttcaaatgattttcctgcctcagcctcctgagtagctgaaactacaggtacatgccatcatgcctggctaatttttgtatttttagtacagacagggtttaaacatgttggccagactggtcttgaagtcctgacacaaatgatccacccgcctcagcctcccaaagtgccgggattataggcatgacccactgcacctggcctagcctaagcactctaaatatgcaggaactaaagcagaaaagatttgcctttttactgaagtgaaccatagaaaagtgtatgtgtgaggaggggatattaactcaaggctaattatgctactgtttattcaatagattgaaatgttgcctttgttgagatgagatactgtataattcatattgtttattcattaaataaacaaaaataccaaaaatatagccttttagacaatttatctctgtgcttttttattttcttgtgtgtttgcatttagtttcatttctattctttaaatctcagaaattcattctaaaaatggatttgaattcttttttgataaataagccataaactacataaccaagtcaatttaatgttccatgattagatgccacttttctttttaaatcacagcaggattcatataatatttaaaggaaatacgtctatgctttatagttgaaagaagaacatcaacaaatattttggcattctgttgtgcaaattttccaaatatgaaatgtttatgttttgcttttagagtctttattcaattttacttaacaagcattaaattttatgctatgtggagaatattaaatttatatgcagtctttaataccttacacaaacaaactgccttttttcccacagggtgaaaatgattttatttttcagcacatacacacaatcagtaaatcatacacattaaaggcacagaactaaaagttttccttgctttaaaaccaacagttagcctgaacccctggggtgcttttgtcaccacactgtcattcacacatcccatgggagatgtgggttctatttctacatatctggtgtatataactacacttcaagaagctataataaatatatagcaccaccattcaatgttctgcaaagacagaaaattctacacttttttcaaggaaatattacaaaaacaattctgcacaaagcactaacacagtgtcacacaggaatgaacgaaacctcctcagtgtaatagagagccatttggatgtgtaaaatcttattggccattctgacccagccaatttaacacagaatattctgataaagccttaaaaaagactaacatccaattattattatgtgtttgtgtattattttatgttatcattaaattattattattttacgttaaaatttatttgttcttccattcctcgtttcaattctgtggattaagggtgaggaacaagtcaggggtgtttgtttaatatattgcttagtaataaggatagtgttttggcattctggctgacttgcattaaatatttaaaacaaataactagaatttaggctgggacccaagttggcaaaacccactgttacatactgagaatcctggctgttgcataagcagaattaagaaaatttgagtacaaaaggaattttctaaaggaataatagaacagttgcttagtctatggctaaagaaatacagagagctgctaaacttagttttatttattttgcaaattttaggattcatgtagaaattcaagacttatctttttacattaccatacgaacaatttttttctttgctttgctaaatattaaaattttaattgaccatgacacagaagtaaaattatgaatttttccactattattgtttatttatttttcttttctcaacttttattttaggtccaaggagcacatgtgcaggtttgttacatgggtaaattgtgtgttgctgtggtttggtgtacaaatggttttattacccaggtagacagcatagtacccaacaggtagtttttcgaccctcaccctcctctcagcctcctccctcaagcaggacccagtttctattgttcccatctttgcatccatgtgtactcaacgtttagctcctacttataagtgagaacatacggtatttggttttctgttcttgtgttaattcacttaggataatagcctccagctgaacaatttgaataagtaatacaaattccaagaggtttggtctcaaaaagtctagagtttaagaagaatattttttaactcctgtactcatcattttcccttatcaaagtaaagcatttctttcacaggttatacagtaatacctctattaatgaaaaaaagacatttgaatatcacaatttgtcatcaacaattttgtgattaaaataatagttgaaggcattggaatgtattctaggaagagggagaatagggaataggatacagaagatattatttgtaattgttactttttttaaaaaatgtagattctagtgccagggtttggactgctacaccctgttgtttgtcaagtgctatgagatcagagagaagaaaatgatatttgtttagtttcctaaaaataaaaacaatcacttattttcttctgaaaaaaaaatgtagattcagggggaacatgtacatgtttgtcacatgggtattttgaataatgttgaggattgggcttctggtgtacccatcactcaaatattgaacattgtacccaagaggtaatttttcattcctcagagccctcctgccttccctgcttttggagtacccactgtctactatttccatctttatgtccatgtgtacccactgtttagtgcagacttataagtgagaacaggtgatatttgattttctgcttctgagttagttcacttaagataatggcctccaggtccatctatgttgctgcaaaggatatgatttcattctttttcatggccatatagtattacttggcatgcatataccacatttttaaaataaaatcaacagttggtaaacacttaggttggttccatgactttcctattgtgaggtactgtgatgaacattcaagtgcaggtgtcatttttaatataatgatacccagaagtgggattgctgggtcaaacagtggttctatttttagtcctttgagctatttccataccgtcttccatagaggctgaactaatttacattcccaccaacagtgtgttccttttctctgcatccacacaaacatctattgtttttcaactttttaataatagccattctgactggtgtatgatgatgtcttagtgtggttttaatttgcatttctccaaagattagggatactgatcattatatcatgtgtttgttggctgcttctatttcttcttttgagaaatgtttgttcatgtcctttgcccactttttttttctttaaaggctttatttgcattcttgtaaattttattatttcaagtcaatgtattaaaaattactgcgcatatagttattgcttttataaatttgttttccgtgattccttcaaaagctttcttattgttggcattttctgcagagaagactacagttttacagcttatgctaccatttcttatttgaaaataggacctaaagctaatcttctgaacaatgaggcacatgctattactgtgcaagtgacaaagtccacacagaactctttcagggtaaatggctattaattttcagttttatatattttaaaaagtatattaaagcctatgggatgcttttctgtcatattcccctaggtccagttgaacatgagaaaagtcagttttctgattagatttctgggtatggaagagagaaaatatagttttctgtaaagatataagtgaaagaatttagactggccttttaacataaactaggggtttccagtttcttggaatgggaggactctgttttaatatctaattttgttatgcactctgctcttatttggttgtgattactaatagttgagaagtctgtttctgctgttccagtggttagaaaccactgttttaaaccaaatactatcaagtctgcaaaagcatgtcaagtcaagtgccattgtgtctaaggacatttgaggtctttagaacttctctcacaatgtagccccttttattcaaaatagagctcatatttgaatagaaatttgtagataaaaaactagacccctgtatacttaaaaagccaactgatacagaaagaatattttgaaatatttaatctcatgagaaaactgaatagctggatttttaccaaggtgcttgctttgttattttttttttttgtaggctgaatcgtctcaaacttgtcattctgaacaaggtgataaaaagatggaggaaaaaaattcaggcaacttccagaagaaggctgcaaacatgcttcagcaatctggttctaagaatacaggagctaagaaaagaaaaatcgatgatgcctgacatgaatgttactaaattttctaattaaagatggtttatgcatgtatatgccactatttttgtagttagacaatagtttttaaaagaatttcatagatattttatatgtatggatctatattttcagagcttatctctgaagatctaaacttttgagaatgtttgaaaattagagatcacgattatataattttccagtataaaacaagggaaaaatttttatgtaaaaccctttaattgtaaaatatttgagaataagttcatataattgtcttaagttttttatgcctttatatacttagctatattttttcttttgacataactatctttttgaaagcaatattatactgacagaggctcaatgagtgatactttaagttaaatatgtagatcagggatgtccaatcttttggcttccctgagccacattggaagaagaattgtcttgggcctcacataaaatatgctaacactgatgacagctgatgagcttaaaaaaaaaattgcaagaaaaatctcatgttttaagaaagtttacaaaaaatgtaaaatatttgagaataagtccatataattgtcttaagttttttatgcctttatatacttagctatattttttcttttgacataactatctttttgaaagcaatattacactgacagaggctcactgagtgatactttaagttaaatatgtagatcagggatgtccaatcttttggcttccctgagccacattggaagaagaattgtcttgggccgcacataaaacatgctaacactgacgatagctgataagcttaaaaaaaaattgcaagaaaaatctcaagttttaagaaagtttacaaatttgtgttgggctgcattcaaagctgtcctgggctgcattygacccgtgggctagagttggacaagcttgtagatgatttcaggttataaaaccagaagtacaattcaacaaaaaaggagtaagtcatcaatataaatattagcaaacgagatattgctacatctctatttaaagtaaaatacaaccgattttaaagttcctgaaaccacagccatattttgacatttcacaaagaatggttctaatctactagagtacatttggctaaatagataacttacctaaatttgctccaaagctaaatcacaagtaaacatatttatgtttaaaacacagaaataaataacttaagatttttatccaagtggtcagtgttgtattggaaagatatatctataaataaactttgaactgatttcaaacttagaatttatgtttttatatttttccactaatatcattatcacttctgtaattttcagtgtggtcatcattaactcaatacagtcattcattttattgacttgtgatttttctggtgtcatttggaactttatatgattcttgaagaaattccatttttagtcaaaataatcttctatatcaatatttggatctagcagatcttctccatatgatgaaagattcatttggtttaagattaggttttcaaatgtttcttctaaatcagtttcaccaattaagaaagctcccatcattcgtccattttgcatgacgactttgatgtattcttgtcctttggtacatctcagcattaattcatgatctgaacctaagccctgtgcattgtattttcccagcagtacaaccttatagttaaaaaattttgtcacatgagcaaacagttcaaagctgaaatccatgtcaatagagtctcctgaactcgctgcagccatgcactttgctgcataccatcccatctgtctagcctgggtccacagcctcatctgctgccagactgggctcagctgccaggatgtagtacagatgtcaccggcagcatagatatcaggaagggatgtgtgcatatgatcatccactttcaggccaccatcttctcctagatcaaaactgttaccatggagaaaaggttctatattcggtgtaactcctgtagcactgacaatgaaatcgcagccatatatcttttcattggtcaattccacatagacaggccacatctctgtattagttgtaactgacgtatggtctcttggaaaagtgaaggactttttcttcaaaattctaaactcatcctgaaggtagattttctttacttcacacatagyttcaaggtgaatcttatgagaaaactcttttgttcctttaagattcaagccttcatgccaatctggtcccaacgcactgcctacattatctgatttagatttgcttctagcttcctttttccttccttcagttgtatatctggttcttttatatgcaattttagcctctgatttttcagcaatgagctttgaagtcaagaattcagctgctcctgcatcgaagaaagtattccctatagctttatctttaatggcccaaatcacttcacagccttcaatttcatacactaactcaagtgcgatacmaccrttccctaagatcattattcttttagctttagtaagctgtttctgaaattcctgagcactgtctgtatcacggattcctaatacataaggatttccttcacatatcaactttggtttagctccagcacacagagtttcttatatacatgctgattgccatcttctgttacaatgcagtgttcttcactcttcagttgctttacgccagattctataaccttgatgttgggaaagcgtttttctaacatggtacttgattgttcttcaacatcaaattcttccaatattttagaaatctgcttgaaatttgtaactgctttcataacaggagaagctgttaccaagagaatatcttctgatggaaagtgagtagccaactgctccgcacaagtgacgcccgcgatgccgccgccgaccaccatgaacttccctgcagtcatgggagggcgcgctgccttcatgctgccggactcccagtggtttactgaatatcgcggcggaacagcgagactctggactccaggagaggaagcagccgcgaggcggtcacttccggtgccttatccagagaatccgacctacgggtgctcgggccctttgcccacttttaatgtagctctttatttttttttcttgttgagttgtttgagtaccttgtacattctggctattagttctttgttggaggcataattcgcaaatattttctcccgttctgttgtctgtttgttgatttttttcttttgctgtgcagaagctttttagtttgataaagtcacatttgtctatttttggttttgttgcatttgcttttggggtcttcatcataaattatttgactaggcccatgttcagaaaagcttttcctagattttttttttaaggatttttatagttgcaagtattatgtttaggtctgtgatccatcttgagttgatttttgattatgatgagagataggagttcagttgtattcttatgtgtatggctagccaattttcccagtaccctttattaaatagggtgtcctttccctattgtttatttttgtcaactttgtcaaatatcagttgattgcaggtatgtggccttatttcagaatttttttattttaacaacacctacacatgattcaaaatatcaactacactggggaattattgtatcaagtatcatcttgtccaatccatccactcaatggtataaatgaaaagaaggcatggagaggaagacaacttgcatgacatcacaaggcaaactcgcaagaaggcaaggattgaaccctgacctcttgacctacacagcccaccatagacggctctgtgccagaatatgttttcaaaagaatgaagactagaatgtggagttcagtggaatcccagagctagcacatgaacaagtccatcaagtagcctgtaaatacattaatcaaagatgaatcacagagctatttcaacaaatactccagaaagtatttgttttaacaactttattaatgattttcctccaacattcgtgaaaacattagagatgtaaaggggcccttacattttcagtcgcactgctatattttataagaggaattatatgattgctttgtttccaatttggagatttgagtgctctgggcatatccttaatatttgccaagagtctgctcgacgaacaaagtcaatctgtgactcaataataatcttctgattatcccttggatttgtacagcatgttggaattttcaaagtttccacataccttgttgcattttatcgtcctgcagtggtgtggaacacacaatcacaattactgtaatcacggaagctaagataagggagggttgggtgagttgccagagatcacacagtttataaattaagagagccctgattggggcctgtctcactcagtattctttccatacatggtgtggaaagatgaaaagagtgagacttttgaaactaaaaatggcctgactttaaagcctagttccactacttgctggctgagtgacgacaggctgatcacatggtctctcagggtcttagcatcctcatttgtaagactgggataatgataattttaacagaacaggatcaggatgaatatgatggttaatattgaatgtcaacttgattagattgaaggatgcaaagtattgaagaatgcaacaattctattaagctggaagttaagattgccacctggatattttgagctcctcctacctttagaaggtaagttagggaggctaagaagggagttacagtgtttggttggggtgactgacctggactatcaagatgaaatcagtccactacttcaaaatggaggtaaggaagaatatgtgtggaatacaggagatcccttagagtgtcttttagtattaccatgccctgtgacgtgattaaggtcaatgggaaactagaagaacacaatccaggcaggactacaaatagcccagatccttcaggactgaaggtttgggtcactacaccaagtaaaaaaccatggcctgctgaggtgcttgctgaaggcaaagggaatacagaatgggtagtagaagaaggtagtcatcaataccagctacgaccatatgaccagttgcagaaatgaggagtgtaattgtcatgagtatttcctctttattttgttaagaacatgtttgtgcatgtatacacttgtactaagaaaatatcttcatttcattcatttctcctttatcatgtgacataagatttattgatttcatgtcagcatttaagtgttattactttatgtgatagcacttgggttggggattggtgcatttctggttgtacaaaggatagttgtattatgttatgtgtaattatgaacttattgtctttatttgaagattatgtatgatttcaggagatgtgtatgggttcaagttgacaaggggtggacttgtgatggttattactgaatgtcaacttgattggattgaaggatgcaaagtattgttcctgggtgtgtctgtgagggtgttgccaaaggagattaacatttgagtcagtggactgggaaaggcagacctaccctcaatccgggtgggcaccatctaatcagctgccagcgctgccagaataaaagcaggcagaagaaagttgaaatattaaactggcttagcctccaaggctacatctttttcctgtgctggatgcttcctgctctcgaacaacagactccaagttcttcagctttgggactcagactggcttccttgctcctcagcttgcagatgtcctaatgtggaacctcaccttatgattgtgtgagttaatacttcttaataaactctcctttatacatttatcctattagttccgaccctctagagagccctgactagtacaatgaagtttaaatgaaataatacatatcaaaagcataggccagtacccacatatacatgtacacaacaactactatcaattattattgttgttattaagcattatgacaatgataatgattattcagctggcatatgaaagatactaccaacaggtactattaattatgaaactattaactatgaaattatgttgaagaatttataatacattttatgaagctatataagcttcataaagcttatatagctataagcatggaatgcagattaaaaatacacccttattcagtacagcattttcagtaacagtgaaactctggaaacaactgtctataaatacatttctgcttagttttatcaattaaaaacagttttataaagcataaaaagtgccacataaatcataatatcatgatgaaggttgactttgcactagcaaaatgtctcagacacagataatcagaatttgtctttctagacattcccgtgaacatgaacaacgtgtaaaaaactccttgacaagatgatagagttcaactgaagaaacattccttggaagcttgctgtgctggtgaaaagcacgtgggttattgggatatggcaaggaagtgccccaagacgggtaaaggaaagttcaaaggcccagaaggaaaagaaaaattgcatacttagagcactgaagaaaggcccatatgatgatagcagaaagcaaaacgttattggtcagggtcttgtcaggttacagctatactgactgagttatgaccattggaatgtgagtttagcctatgtgattctccacttctctctctactctttcctcagtagccatggaggccacttgtctaagatggtaaaatcacaagataggagactggattccacagtctctctcgcagcagggctgctcagtagaggcacccaacctgcctcagacctatgatgtgagcaagaaataaatgtttcctgttttaagggactgggatttcacgattgtttgttatagcagctagcaatacttaccttgactaatataccaggtcttggtaagaaatcattttcccccaactccatcatacacttgagatgtgatctagactcgcacctcctccatactaagaatgtggtgaaaagaatccatcaagattctttcccaacccagtctgactatattcactctcattttaattaatatacttcccatttttaggttctatgccataaattaattaaaggcaagtcccaagattaacacatattttaatctataattctgaatccaaagctttgcttaaaggacaaatatgcagttggttttatgctcgttcaacattaatcattatgaattataatttcatatcaatttttatctctttgaaagtaattgtatgtgtagtttgcattccagtcagatggttttaaagcctttcaagtattctctaaataatttaaatggtttcttaaatctcagtgttcacaagcagtgtataaattaatacattatttgagaaaatattgagggaataatccctctaaaaatgaaaatctctagggcaaactatgtattagagactttatttctttttgatgtttattttaacatttaaaattatcatctgacttaattttatagtaacctagttagtattaggaggtgtaagatggaggctgaaagaaatgatgtgtccagggtctacggctcaggaaacagaggtgcaggactaggatacaggtattcttgtctggagcatgtcctttgcctacgtctttcactatcactagagaatgagctttttaaaaacttgcataagtgtgcatgtgttatatgacaccctcaggaaaatcccctatataaggtctaagaatgtctgccctgccatgcaatgtttgcttgaatgttttcctgacatctttaaaataataaatgaacctatataacacaattgttatttggatgcacattggttaatatttacaaattttctacagtagtccctaatttatcataaacattatatatttgttaaattaaatgaaagcagctatacagtgggctagaagtaattttagagcccttagctcagcacctactattgtcctacatactattaagctgtctatattagtttgctagggctgctgtaaggaagtatcacgaattgagtggcttacacaacagaaatttactgccatatgtattggaggctatgagtctgagatcatggtgttgacagatctccattctctctcctaggttctggtagttccttggcttgcagcagcataactctaatttacacatggcattctccctgtgtttgtgtctgtgtccaaatatttccctttttgtaaggacagaggtcatactggattagggcccaccctactggcctcattgtaacttgattatttctgtaaagaaataatagagaaacttatctgtaaagaaacttatctccaaataaggttacattcagagatactgggggttaggacttcaaagtatcttaggaagaggtacacagttaacccataacactcactctcctaaataatctgttcactagattatgggagtggtccgcctgtgatctaacagtccacagaatgcattaagaaaatgctcagaagcagtgaatccatatacccatctaatattacaacaactttcaccattcttgattccttttccaagttttatttttctccttagcacttactatctaccgtactatttattttactaccttttctcatttatgtctatcatgatgataggatgctagatccataagagtagcgatttctatctacatgttccttgctatgttttctaccatgtggaacagtacacgccatgtaggcactctatagatattaatggaatggttaacttatatgaacttaatcaaccgtaagtaaagattattaactattggaaaaatagacaaaatatcttttaatgtcttagactttttaatgagtcaattctctactttcccttcaattttccattacaaagcatattagaataaagaaaaagaagctttgagaagagctatgcagtagtctccgagtggcccagtcaccactctgtaaaagagaaattattttttcagccttattaaggtacaattgataaattaaaaattttatatattcaat

SEQ ID NO: 96419 - DNA, 37156 bp, Homo sapiens
atatattataattatatataatatataattataatatataatatataaagaattataaatatatataatctataattataatatataattatttataatatataattatatataattataaataatatataatatataattatatataattataaataatatatataatatataattataatatataattatatataattataaataatatatattatatataattataatatataatatataatttatatactatataataaatatttaatttatataaattttatattatatataatataaatatatacataaatttaaaaagaacaaaattacatcttttgcagcaacacggatggaactggagggtattatcctaagtgacataactcaggaatgaaaaccaaataccacatattctcacttataagtgggatttaagctatgagtacccaaaatcatacagagtggtataatggattttgaagactcagaaagagggagcatgggaagggaaatgggatgaaaaattacttattgggtaaaatgtatgctatttgagtgacaggtacactaaaactccagagttcaccattatacaattcatccacataaccaaaaatcacttgtgcccctaaagttatttaaatataaataagtaaatagcaaaacaaaaaacaacagtgtgacattgatagattaaaacttgtacagatggcaacttgaaatgttcaagtggcagcatcaacctgttcgaaatgatggactatttggcaaattatttggtatacgatatgtggaaactgaatcatttcatggagaactatattatattttcccatttgaaaaggtttttaattctttttacttttaatacatttttgaattatagaaaagtttcaaaatagtatagaggattctcatatatccttcagccagcatcagtaaataacatcttgcataataatcaaatgttcagaattaagaaattaacattggtacactagtaactatcagtgaaattacagactttttttggattttactagtttttccgttaatgtccttcttctatttcaggacccaatccaggatctcaaattgcatttagtcatcatgtctccttagctggggacagttgcttagtcttacatggtttttcatgattgtgacactttagaaaaatattattttgtagaacgtcactcaatttttttctatgcaaaattttctcataattacattgaagttatacattgctttcaagaataccatagacgtgatgtgcccttctcagtacagcatttgtgtcttattagaaatgattaactatttggcagattatttggtaaatgaaggaatgaggaaaatgggtcatttcatgtataactatttttgtttcaatttgagaagacttttaattgttttgacttttaaatgagtttttgaattatagaaaaggctggcagattattgccaaccaagatatgtcttcttactggttatgttaacccatcatcacttgggtaagcagatgttcattgattttctgcactctaatgttactatttttaactttgaaattataaatatattggtggaaataaacttgtttttcttcaaacttttcctcactgattttagtattcattagcacatattgagtacagcaattattactgaagagttctaatgctcactttgtatttccttcacttttgccatatttgttagttggaattcttctgtgaggaacagctgtttattttaccccatttatttatgctattatttacttgtatagatatgaactcatagattttttttaattccatgggttatattctgatatggtttggatctgtgtccctgcccaaatctcatgttgaattctaatccccagtgttggagctggggcctggtaggacgtaattggatcacgggggcagagttcttataaatggtttagcaccatcccccactggtactgtatagtgagtgagttctcacaagatcttgttgtttaaaaatgtgtagcccctcccgcaaactcatgctcctgctctggccatgtaagacacctgctcccactttgccttctgccatgagtaaaagctccctgaggccttcccagaagcagaagctaccatgctccctgtatagcctgtggaaccataagccaattaaatctcttttctttataaattacccagtctcaaatatttttatagcagcgtgagaacagactaatacagaaaattagcactggggagtggaacactgccataaatatacctgaaaatgtcaaagcaactttaactggataacaggcagagggtggagggcccagaagaagacaagaatataagagaaactttggaacttcctagagacttgttaaattgttgccaccaaaatactggtagtgatatggacaatgaagtccagtctgaggaggtctcagaaggagatgaggaacttactgggaatcggagtaaaggtcagttttgttatggtttagtgaagaacttggaggcactgtacccctgtccaagggatctgtggaactttgaccttgaaagtgatgatttaaggtatctgggggaagaaatttctaagcagcaaagtgttcaagaagcagcctggctactttaacaacctatgctcgtatgcatgtgcaaaaaaaagatgtaaaactggaaattatactaaaaaggaagcaaagtataaaagtttggaaaatttgcagcctggccatatggtaaaaagaaatggtcattttcagtggaggaattcaggaaggctgcagaaatttgcataagtaaaaaggagccaaatgcaaaaagagtgcaagccataagccttggtagcttccacagggtgttaagcctgcaggtggagacaatggggagaaggcctcaaaggcatttcagagaactttgtggaagcctctcccatcacagacctgcaggcctagaagggaagaatggttttgtgagccaggcccggggccctgtcaccctgcacagcctcaaaacactggtccctgcatcccagctgctccagctccagccatggctcaaagaggcccaggtacagctcaagccattgctttagagagtgcaagccataagccttggtggcttccacaggctattaagcctgcaggtgcacagagtgcaagagttgaggcttgagagactctacttagatttcagaggatgtatggaaaagcctatatgtccaggcagaagtctgctgcaggagtggaaccctctagataacctctactagggcagtgtggagggacaatgtggggctggagcccccacacagagtccccactggggcactgcctagtggagctgtgagaaaagggccaccatcctccagaccccagaatggtagatacactggcagcttgcactctgcacctggaaaaaccaaaggcactcaacacaaagccacaggggcagagctgcccaggtccttgggagcccaccccttgcgttagtgtgccctggatgtgagacatggggtcaaaggagattattttggagctctgaagtttagtgactgctcttctgagttttgaacttgcatgaagcctgtagctgctttctttctgccaatttttcccttttagaatgtaaaagggaatttttttacatttacccaatgcctatagtcccattgtatcttggaagtaactaacttgattttgattttacaggctcataggtggaagggacttaccttgtctcaaatgagactttggacttcagacttttgagttaatgctgaaattcactaagactttgagggactgttgggaaggcatgattgtattttgaaatgtgagaacaatgattgtattttgaaatgtgagtgtagattaatatatattccaaaacaattgttatttattttgtggctcaaattgttgcaactttggtcatcaggagctctttcaggttagcttctgggccattttgacatgtacctccattttttaaaaggcatttcctagcaccccgagatgctccaggctcatttcatatcccctgacaaagtgatggaatcaaccagccacttctccaagaaattctggctccctttactggagaattaagaaaccaaggtctaggcactaggtgtcattgcttctagggcttctctatggacagagcttgaaaatatacatctgtgtgcatgaacccatgtatgcataaaaatgcatatttatccatcaaaaaactgagtgcatactgattattctaattccaactgaatatcacaaggttaattttaatatacccattacattttcttgtttatagtttctttctccgaaaatattttctatctgattctttacagaaaaagtttgtccacccctggttaatatcattcagatttcagatcactgttcatatatttgaatttaagaatatattgacagtttgctatgttccacttctttttttcctccttttccttctattgggctaatcaaacattttttattatttcatttaatcttcattgttgatttattatgtataccactttttaaaagaaatatttagtggttataccagggttacaatatttttcttaattaatcagagtctatccttcaagtaatattatcccaattcacacatggtataaagacttcaagatagtttttccaacttcctagttttcattctttgtgcttatgttgttatacatatacactataaacacacagtgttagagatcaaaatgaaaggaatcttggattcagccctgtttcaaagctcatcagatgacctgcacaaatcattcaaactttcttttgtactcttggttctttaagtcaagcatatctattgtgcctacctcataaacagactccaggttaacattagatttcaaaatctatgtgaccaaaccaaattaaaatctataaatctatatgtctcagagtagactgtgaacttgggtggttgctggcatcagtcctctaaggaacagccaaaccaaacccactgcaaatacttttttcttattataggctcctcagtgaaaaatttaacaatcctacacccagttttataatgttaaaacagcttttccaaaggtcatcaagtaaagacataaagaagtattgttaaggtgaatttggtagaacaggatcaaagatgttggaagaatttcaagatctgaaacaagtagaccagttgtgaaactggtcttgattccatctttttaaaaacataagactggaaagattgatgggcatgcttaaataagatggaaagatgatgggcatgccctcctgtgtagggcagcagtaatcaacccatggacggagccacagggccagcagctactgcttcctgtgggcactggtgcagctgtctgggtgcctgctctttccagcactgttttcatcagatcaagaatacaaatcccagatggattcaaacccatgactacaagctgtcactctgttagtctcagatgcaattaatattattgtcttccctatgttatatttgaagttcttttagttcaattcagcaaattgtattgaaacctactatgtatgagataatacgcacttgaatcctgccaactgggtcttgatgataacgctagatggaaactagaaagtttgactttctgttgatgattactctcaatcattcaaacttgtggctctttttctcatcagttatttattgtaactataatatttatcaaattgtattaactaaatacaattatttatcaaacactctttttctcatcagttatttattgtaactagaattagacttataaaacttcaggaatttgaaatcatataacctactatgcagagcacttcatttctccttcctacctctgcttgagctaataactacagtttgtgatccaggcccctccttaaggtggagctgacgtggctgacacttctgtcttagctgaaacaagcagaaggttgtgaatccatgctaaaggtaaacaaactgcaacttatatctgcaatttattttggtatagacaagaggtatgccagtagcacactggtggcttcagaagaaattctcaacacctagctcgccagagagtctatgtatgggattgaacaatctgtaaactaaaggtatgaaaaaatttgtaaaattgggaaggtgagggaaaggtgtgacatttatttttgggtgcagaaacatctaatgcccatgtataaactagggatctggggtgaaaggtgcttctaggggagggtaaattttgagggatggaaagttttagaaaggcagcattcaagcaatctgatgttaaagtttaaagttccaagttaaaagagaacttggaattccggtgcaaagagaaatgttaagatgaatcatggaaaaatactgataaagcctgaaatttttttaagtaagaaatgttttaaaataattcttttcaagcttgagggggtgctagaaagcctgctaaaacagaaaaggaggacatattaatagattggcattaatgaaacagaaaaactaatttgcattcaacaggcactgtaatgatgtggttctcagtgttaatatttgctggagtattttgtgtctgcccttgagtttaagggaatagaacagggaacctgataggtgacaaatagtctggagacttcatctagacacgagcaagcttgcatccttcaggcccttaagctgctcgakttcttaaagaycacagtgggctccatgaattatctgttctgtagaatgtacaagcagatagctaaaagagagcacctgggagataccaagtacagcttgcgggggtgaaggtttatttctgggagttatttatctgargctaaaaagtaatcakgagccaaaaaaatttcaaatgtttcccatgtttgtttgcttttctgttttgttgtawgtttttgtgcttgtttttgtattgtctcttgtaggatcctaaycatgaaaataagtatgataaattataagtcactattggcactgttgtttatattagcctcctggatcatttttacagttttccagaactccacaaaggtaggaaatgctttatttatgtggtttacagaagcttatttttgcttattacctcatctgttctaggaaaggctaaactacaagacttgtagattataggaggggagtttgaatagctagataccaaacaacatacctgataatcattaagcaatatgtgagaggataaatactgtgtgtgtgttcacacatacacattctttctttgtcacaaataaatgcattgcacctatcttcttcaatgcttagctcatctttttactttctttaagggaacatctgaagaacagaatatctatatttttggttttcatttgtttgtttttaatttttaatttttgtgggtacaaagtaggtgtatgtatttatggggtagatgagatattttgatacaagcatataatacatagtaatcatatcagggtaaatggggtattcattgcctcaagaatttatcctttcttgtgctacaaacaagacaattatactcttttagctatttttaaatgtaaaataaattattggtgattgtagttaccctgttatactatcaaatgctagatcttattcattctgtctaatcatatttttgtactcattaactaaccccacttctcctccatgcccccaccacccttcccagcctctggtagccatcattctactctctaactccatgacttcaattattttaagtattaacttccacaaataaaaacgaacatgcaaagtttgtcttctgtgcctagcttatttcacttaacataatgaccttcagttccatccatgttgttgcaaatgacagaatcttgttctttttataactgaatactactccgttgtgtatatataccatattttctttatgtatttgtctgttgatggacacttaggttgcttacaaatcttggctattgttatcagtgctgcaataaacatgggagttcagatagctcttggatatactgatttcctttattttgggtatatacctagcagtgggattgctggatcatatggtagcctatttttagttttttgagaaacctccaaactgttctctatagtggttgtactaattacattcccaccaacagtgtacaagtgttcccttttctccacatcctcactagcatatgttactatctgtcttttggataaaagccattttaacaggagtgagattatattacactgtagttttgatttgtgtttctctgatgatcaatgatgttgagcaccttttcatatacttgtttgccatttgcatatcttctagtaagtgtctattcagatcttttgcccaatttttaattggattgttaaatatttttgctatagagttggttgagttccttgaatactctggatagtaatcccctgtcagatggatagtttgcaaacattttctcccattctgtaggttaactcttcactcacttgattgcttcctttgctgtgaagaagtttttagttttatataatcccatttgtctatctttgcttttcttctctgtgcatttgaggtcttatccaaaaatcctctggctacatcagtgtcctgaacagtattccctaggttttcttctagtattttcatactttgggtcatgcatatcagtctttaattcattttgtaactgagttttgtatatggtgagagaaaatggtctaatttcattcttttgcatatggatattcagtttctccagcaccatctattttaaatacttttgttcccccattgtatgtttttgatgactttgtcaaaaatccagatggctgtaaatatgtggattcatttctgtgttctctattctgttccattggtgtatgtgactatatttatgccagtataacactgtttactataactttgtagtatattttgaagtcaggtaatatactgccttcagctttgttctttttgctcagaattgctttggctattctggatcttctttgtttccttacagattttagaattgtttttctatttcgatgaagaatattattggtattttgatagggtttgccttgaatctgtagattgcttttagtagtctgaacattttaacatttattcttctaacccattaacatggaatatctattttgtgtgtgtgtgtgtgagtgtgtgtgtgtgtgttctccaatttcttgcatcaatgttttgtagttttcattgtagagatctttcacctctttagatcaatttattcctagggtttttgtagctactgtaaatgaaattgcttttttgatattttttcaggttgtttggtattggtgtatagaaatgttactgatgtttttatgttgattttgtatcctgcaactttactgagtttttaaaatcagttctgacagtttttcactgaagtctatggagtgttctaaatataagtttatgtggtctgcaaacagggacaatttaatttccttctttccaacttgtatgccctttatttatttctctgacttaattgctctggctaggacttccaatactatgttgaataaaactggaaaaagtgttcaaaaatatcttgttccagatctcagaaggcttttgactttttcacattgaatgtgatgttagctgtggatttgttatacatgttttttattgttttgaggtacatttcttccatgcctaatttgttgagatatttttatctgaagcaaagttgaatgttatcaagtgtcttttctattgagatgattatatgatttttgttgaatgagaaggggccacctgacaaatggactttcaaaaaattagggacataatataccctggtcaatatctcagataatccttgcatcaagggctgtcagtccagacatctcctgttcacctacagatttgtaggccactacttttagcaaacatcatacaggggcctggaattccatgagggggcatggaatttattgttttgaggtatatttggtgaaggattttaaggactttccattggctggaggctggaaagtacagcttgccatattctgactgtagtcatcctgagggctggaaagtataccctcgagaaatggcccattctatttttgcaggggagtactgaggcttaatttcttttatgaagccttcccaggttagaggggcttcaagttgatgtcatgaggctttcttgctgctgacttggctgcctgatctgctaacttgtttccttcagctatttcatttgttcccttctgatgtcccttacaatgcattactgctacctctcatggaaggaaaactgaggataataacctgttaatttcctggtggtaatttatagtagattcattagtagtaagaaagtgtctttccttccaaatggtagcatgagcatggagaattaagaaagcatacttggagtcaatgtaaatgttagctacctttcccttgcttaattcaagtgctcttgtaagagctgtcagttcagctagttgagcacttgtgcctggatagagaggtgcactttcaataacatcattcagagtgactactggatattctgccttatggacttcttgctctacaaaagaactgccatctgtgaagatggtccagtctggattttccaggggagtttccctgagatcctccctggcttcatagatctgtaccacaacttgctcacagtcatgttcaggttccccagttttcttggggaggaaagtggctgggtttaggcaagaacaagtttttaacagaactgctgacccttctaacagcagagcctgatatttaaggagccaacggactgttagccaaaggttccccataaaagacagcaatcctgctacattgtgtggggcataaacagttaaaccatttcccagggttaatttgatgacctccagtaccagtagggccaatatggcaattgctcagaggcatgctggccatcctttacctgcaaatcaagtttcttactcaggtagcccactagttgttgagctggtcctcaggcctgaattaaaattcccatgcccattcctttcctttctgatacataaagattgaaggccctccctacagaggggctgagggctggtaccttaagtaaggcttgctttcactggctaaaggccttttgagctttargtttccaggttaggagatgaattttatccacttgagtttcttttatgaagtgatatagaggatgatctatctcaccatacccaggtatccatagcctgcaaaatcctgtaatgccccaaaatcttgtcagttgcttgaggattttagggagggggaaggaggaaatgggcttaattctttcttcccctaatgctctggtcctttcagaagcactaaaccaaggtactttaccaaggttttgcaaagctgggccttagattttgaaatcttatatgctctgtcagctaagaaattaaaaagagtttcagtgccttcccaagaggtttcctcagttggggcacagagcagtatatcatccacatattgcaagaccctgacctgaggatgggaaaactcagagaggtcctttgacaatgyctgtccaaacaaatgagggattatctcaaaatccctgaggcagcaccatccattttaactgggcagtttggccagaagcattcttcaaaggcaaacaggtattgagagtcaggatgtaacagtatgcagaaaaaggcatcctttaaatctaagactgtaaaccatttagttccctcaggcatttggattagcaaggtatagggattaggtactaccagatggattgagactatggcctcattaatgaatctccattctgcattgggtttttgtgctcctaatattggggtgttgtagggactgttacagggtttaaggaggccctgcatcttcaggttattaataatggcttctagccctttcttaccctctggctttaggggatattgtctccgattaggaaaaaagtgggatcattaggatagatccagactggcatagtggttacaactcaacctattcttccttgagttgcccagacttctggattgatattagcttccactagaggagaaaaagagtttttcctggggctataagtatgctggcccacatgcaagctagaacgtctctacctaataaagaagtgggactttcaggcatgatttaaaaggcacatgtaaataatatgtccccccaactgcacctaaggggttgagaaaaacatatcagagtgtttatgagacaccccacacccctcatgctatgggaaaaggggaggcctcgattatagaggagaaaagaggctggctctggtgtccagaaggaggtccaccttccttccttcagtttccagaattacctgggcctcctgtgctgtaatgggaatttgagccactggagccagggcttgagcaccaggacccatcagtcctgctggaccatctttgagactggttctgaacctgttgaccttcatctctgggggcagtctgatcaccagtggtccccaccacaggctagagagggtcgaggtggcttcttcttgcttcctggatatcctttttaaagtcctctgacttcccacatcaatagcaactcgcagatgcacctcagggatcccagactttgcaagcctgcaaagcagctaccagagcctcagtccttctcttgtgtttcctctctttttcctgggtctcctcctggtccctactataaaagactaaggtggccaccctcaggaggttctccaaaatgctatctggccctatagcctacttctgtagtttccttctaatattgggagctgcctgtgtaataaacttgtcatttaggatgagctgtccctctactgaatcaggggacaagaaggtgtgttttattagtgcttctttcagcctttccataaaggctgtgggattcttacctggattttggtctaccatggacagtttagagtagttaagaggtttggccttagttcttcataggccccccaatatgcacattaaaaagtgtttccttttctattcatctgtgatgtcactggggttccaaacaaggttgtcaagaggtagtgcctctcttcgtattgggaatgatggctcccctatttcttcattttctctatattcttttttcccttttggcctactataggagacatattgctcatctttgaatttctcccctgcctgcagagctgcctgtttttcagctgcagttagggtttggcttaggagcagcataacatccctccatgagaggttagacacctgagttaaattttggaaagcttttatatacttatcagggtcatcagaaaattggcctaagtctccctttatttgtctaagatcctgcaataagaagggaaccctagtgacatcacctccattgagcatttcctgtaaggataagagtgaagctaggggagtggggagttttggagatggtggagctaaaggacctgatggcacagctggagggggccccagagagggaggacaagaagggcctggacactcaatagctgcctcagatagttccctggaggttgcttctctagttttggggaatcattccctttgggccctcctgatatgactgctgaaagagctgagctgattgtgcaatgcttgcaaagttctgggttgtctcacagggcaaagaaagcctgtacytaagagacctctgaccatttgctgtcccatctacagaaaatatctaattgttggatagtattaaaattaaggctcccctctgcaggccaggwtggttcaagatggtaagaaggccacacccttatgcaaaagaaaatgagccactttttcttcagtctcagggtcaaaggaatcccagtgcttcagaaagcactccagaggagtgcagaccaaagatggtctgttattcatctagaaagagaagcaagaaaaaaggtgtccctttagtcaccttcgtttcctttggaaaggcctagggtggaggggaagacagtgggggcatccccccaactgttttccctccttggcgccctgagccctggcatcttttaaggtgccatccattgatgcaagcataacccatagcaatgaaaccagaggaaccaatggattgggattagtcatgctcacccatgtgactctagtcctttgctggtgatttccctttgactttctagacttgtgtgatctgcatgactctccaatagatggatcttgagagagacttcgttacagttacatttgggtaatgccctttaatagagaatgcaggtttgagctgtacaatttgctattatgtcctgtactaaagtatttattcttaggcagtggctctggttaacttccggaattaaattcctcttactatttaagtaccattttaattggaggcagaataggtgccttaaaagaacgtaggaaccaaatggttgttttcctgctgatgggaccatgttcagactaaaatttggttttggaggacctttttcccctcattgttgaagacagagttttcttgttcaaagaaggagcataaagcctggtctcttgtagaggggcaaaaaaagcgagaattaggaagttaagagtgtttccgcaaagggccaacaatatgcctcatggaatagggttcccgttccactaggtgatgctgttgaccttgaaataccatgtgctctccagaccaagggtaaagagagagatgttcacagggggtgtggggagggaaggaggacctctgtgcctagaaaatcacaaaaacggcaatcccatgagctatattcccaggcattatggcatttccttatcttgcctaagaggattacttcaccgaactgtaaaaatttttaaagcattgcatacagagagtggataggagacatggaagttgcggataggaaaggagaaaatttgcaatagaaaaagcttgcagatcctgttgccatcacccatcaggctgttggaggctggaattagtccagaaaccttcaggtaacaccagggtgtctccctggcaaggaaccttcagtgcctctcaacctcttccagccccacatgacagcraggctctctgtaaaaggaaaccaattagaaacaaagccaacaytcccagcaccctgaggacatggggggattagctaagttctccctggcaagcctgtcccctgagtcttgtaaggctggtagccacgctaactttttaaatggctgattgggggcccagtatttggtttgatttttaaatggagagcagaaggccttgaaataaaaagaaggagttggggtccacttctatactcccccttctatgaatcttcctcggatcccaggtgggctcccataatgaaatggcatttttcatctgggataatacccgaggttcattgtctctctccaaggaaatcaaggacatggacatacaaggagtgagtttaagagcagaggtttaacaggcaaaagaaagagaaaagctctcttctgtagagacaggggatttaagtgggtcttttggtccacagtgaagtgcagragattttatagatgagcttgaggaggtagtgtctgatttacacagggcaaaaaagattggtcaccccaggtgtaacatttgcatagcacacaaagaactggttaggactcggtgtgccatttgcatagcatatgaagaagctggctgtcccactctaatctttcattatgcagatgggttctctacctggccagctccatgttgcctgcttttttactgtacacatggtgacaaagaaaagggaagatggagcctccatgttgaacatgcctggccctcaggtagcccttttctattgacacagccgccagcattcacccatgcaagttttcagctggcttatctatgtttgcagcttgatttttcaggctgctctttgttagaaaagaaatgatttgggggctcctttttgttaaaaagggaagccttgccaaggactcctttaccctcactgtctacctaaataatttctttctagttcctgtttcatttcctttatatatttaggtgttctaaatgttgaatgtatatacatatatatayacacacacacacacgtacatatatttgtcattttctcttgatgaattgatctctttattattacataatgaccttctttttctctttttacagtttttgacttaaatccaatttatctgatataagcatagtgactcctgctctcttttggtttccatttgcatggaatatctttttccattacttcactttcagtctatgtgtgtccttaaagctgaagtgaatctcttgcagaaggatagagttrggtcttgtttttttaaaatctactcaaccattctgtctttggggtagggagtaatgaaatataccattttattacagagtctcacaaaaataaaaatagtatctcaaaactcccccaattctgcaggtggaggatggcaggagactagactaccatcctccacctgcagaactkggggaagacagatggcaggcagtgtgagttttttggctcacttgaggccagtgagaaggtatgagaatggaaccaatctaaaaatggctgatgttacttaggagctgaaaagaacagggcaaccttgaagacccagacaccccttttagaaggtgcaataaaggcacctttccaaagctactaagcaggcacttggcatttcaggattttgtcttctgtttgcacaaaagtattcccttcacccagacctggcgccttttatgcttcagagttaagacctgcagagggataggtggcaaggcatttcctagaagagatcacccagcacagctgccctgggctcagggtcttaatttctgtctagtccctggaactatttatatttaataaattttatatgaatacctggagaaatagaagacataaaatctgagggtttgggagagaaagattggggactaggcaggaagccagagcaggggaggttccctcaggccagcttgacctgctccttgacctctttggctcctggcttctcctccttcatttttctcctcttctgtgacatttcttcatctctgagtctctctttttcatcctgttttaatcctcttggcttttttgaagatgggagagatcttgcagccacgctctccctcctcatcagagtcgaagaactcttcctcacaggtaattcatctgtcagagaaacggatggagatgagcttgtcagggtcttcttcattctcatcgccaccctcttgagggacagcatcctcagaatcacctgcatttggactgcaggtggatgggcctgcattactaggttctcaaacagccactgtttaatcttctccaggtactcattagtgttctggttagtcatattggaaggactgatgtagggcttgaaatatggtccaaagtattcaaagtaatcattgtatgaaggctcattagggatctccatatccagagccacagctctttcttatttccagggcactgagcaacattataaatggtgtaaccaccttctgccatcaataacataggcaggttgacactcttgacagattccacacacttggcatgccctttgatgatcagattaaagcaatctaagtgacccctagacaaggcatctgagccatgctgtaagatcaccacactagacaggaacatctytattactttggacatgaccagtttgaaaatggcctcataggactcatcatcaatcccatctaggagcagatagttaatagcataatatctgcctttgccagccccaataacccataagtccccatctcctgggaagtactctccatatttatgaaaggacacagtcctggcctagcctgtaatatagaaggcctcttccatgccatcatcatggtgaatatcaacgtcaacatacaacaccctctggtgatactttagcagttccaaggtggcccagattgtatcattaacataacagaagccagatgccttgaacttctttgcatggtgcaggcctccagcccaattcacagcagtgtccatctgctgctcattaagtttcacagcacttgccacagagccaccagtagacaactgacagaagtcaaacaggccatcaaatgctggacagtcctcactaacgttgaatctctgcatccgcttgctgtgctcagacacgtaatctggatagatggagcacaagaatttaatgtagtcatcactgtggtacttggtcatctcctcagcattggctytgtgagggtgatgggtttccatttttcagtagaaaccatagttgagcagcaaattatgagtcacgcagattcagtgaggattccttgggtgggcttgtccataatagtaatttccaacacccctatcgtagtagtaacagactttcctcctggtgccctgcctttgcgccatcttgctcacttcctgtccctctgtctctcctgtcagtcaatctccattctatgcctttttattggagaatttaaataatattgataatagtatgtaaatcaatattcaaaatcacaataagtaaaaatgactaggaacatgttaatttcatagcatgttacacttcctgtcatttcagttcagatatgctctaaatttatccatctcatgtcacatttgctgtcatttcaggtttggtctgctctaaacttatccatctccctccattactggaacaactccacaaagtccttattccctaaaacaccactgatatcattaaagccactaacagagactgaactcagaataaaggaaatcatagagaaactagatcagcagatcccacccagacctttcacccacgtgaacaccaccaccagcgccacacatagcacagccaccatcctcaaccctcgagatacgtactgcaggggagaccagctgcacatcctgctggaggtgagggaccacttgggacgcaggaagcaatatggcggggatttcctgagggccaggatgtcttccccagcgctgatggcaggtgcttcaggaaaggtgactgacttcaacaacggcacctacctggtcagcttcactctgttctgggagggccaggtctctctgtctctgctgctcatccaccccagtgaaggggtgtcagctctctggagtgcaaggaaccaaggctatgacagggtgatcttcactggccagtttgtcaatggcacttcccaagtccactctgaatgtggcctgatcctaaacacaaatgctgaattgtgccagtacctggacaacagagaccaagaaggcttctactgtgtgaggcctcaacacatgccctgtgctgcactcactcacatgtattctaagaacaagaaagtttcttatcttagcaaacaagaaaagagcctctttgaaaggtaaaaataattacttcttgagactacctgtgcaaatattgtgatttggcctatatactgatccaaagaaaagtcttgtgagtgtattaattttgggtgtctttagtaagagcctttggggaaaggatctgtgaattcatttagagacagtgcccattctctagtaatccacaaactttttgaacatttaattcttatcaatgggaaaaaaatatatacagaataaaaactagaagaaaatgagaartgcacatgtgtgtatgtgtgtgtgctctaatacattatttctgcaactcaacaaattctcttgcataccttctgggtaactgtatcccatagcctaataggcaaagaaatggaaatttactaaatggcctgaaactgtaggcataataattgacttatctctaagaaataactgaggcactggataatctagtttctgtatgtttcctgatttgaggccacctacagattaatttctgtatttgtgtctttaaggtcaaatgtgggtgtagagattatggaaaaattcaatacaattagtgtctccaaatgcaacagtaagtactcctgtgtttggtgggtggtgcctagttctagacccatttaaagggtttcttctttctactggatttgttcactgtttcagtcctatcagcactctgttyatctggcttatctaaggttggccaagacaccagttacctaggtgagtgaataattcaatcactggaatatcataagcctattttagtaactgtaactctcatcatcagtctatttgtcagtcagtgaattccctgcccattttatacaacaacctttaaacgttaactctttcccaattctatacccasttctttacctcaccacaacacctctcttcataccactccyatcacctcttcccatatcaccactagcccatcaccatctagaggtttccaacctgccatctgagtgtcagtttattataacccctccctcttgatctttgccacctttcaaacaattgttagcataaaaaatagaacttgcacacttatatttactaatttctctccaatttctttgaatccaaatagcctaggaaattcttatctaaaacgactcaaggcaagagcttttatgtctctgcaagttcagcattaaaaccttgctaatcataaaaaaagaaagaaagccttgctaatcactaataaacctatttacactgaagtgtaaatatgtacctagatgtagaaatgttatttttaccacacatacatgagtacactcatcccacttattaaaatattaaactacttctctcagttgattaataatcaaacctgccacgggctcctcaccattgtggctacctcaacctgtggattcccagactcttctaaaccagtgactgaggggttcatctttggcccatcttggacctctaagacactctccagcctatagctatattcatttggattggtcagttcccaagccaaactagttgttaatattttttatatcacctttatttaactcaaaggatttatattttgatggtgtcatttaagacacagtgtgacaaacttaggggtaaagtgagctaaaatgataggataattgagcttccattcctatgcaagaattgatgactttagttycatagaaaagctggaaaatacttaaattttcctccagaaagccattttttttctgggaagaaacatatactcttataacgaacattaatgaacattatttaggaaattcacatcagagaaaaatttttattaaaaaaacagctgttccattaagagaatacttcagtaatmctttttccaccattaccaccaccttaccccctcttaggatacttagaggatagarggctcttaatacatactgacgggtaatttgatgttttggaagatcctatctcattgattctttggcagaagaaacagttgcaatgaaagagaaatgcaagtttggaatgacatccacaatccccagtgggcatgtctggagaaacacatggaatcctgtctcctgtagtttggctacagtcaaaatgaaggaatgcctgagaggaaaactcatatacctaatgggagattccacgatccgccagtggatggaatacttcaaagccagtatcaacagtatgcctcagtctaagctataattcttacccctttcagaaacttcttttccatttcaaaggggagaagggaatatgggaaattcctctttttttcatattcttcaatcacaacacaccaaaatttttcacaaggcattgttatcyttcctttaaaaaaacaatacagctatctaactggaaggaaagcagtgtagaaaaaggtttattacatccctatctctgcagaattcacacttcagtatgtacccagtaggctccaaaaactattgatggaaccaaagataatgtaagatattaaattgtccagcttctagaaccagcawaatgattaagggtatgattctagaaccagacaacctgggttcaaaacctgacttctctacctcctatctgggtgactttgaacaagttacataaccattccatccctcagttttctcatctgtcaactgaagatgaaaagagtttctacctagtaaaatgaggtaatgcatacagtgcatttagaatattgtttcttacataacttctctttggtgtaaggtatcattactgtcatcattacctaagagaacagatgtcagaagtgaggtagactttgcatcaggtagacacaagtaaagcatgggcttggggtctaacagatctaggctatgctacttagaaacaatgactttgggcatgttatttattttccctgcctggtgtttctcaccaatcaaccaggaataataatagtgatatagtttgactgattgtcccctccaaatctcatgttgaaacatgatctccaacactggaggtgggacctagtgggaagtgtttgggtcacggaggtggatctctcatgactggcttggtgccctccccatggtaatgagtgagttctcgctctgtcagttcatgtgagaactggttgtttaaaagagcctggcatctctcttgctccctctctcaccatgtgacacactggctccccttcccttccgccatgactaaaagcttcccggcctcaccagatgctgaacagatgccgatgccatgcttgtacagcctgcaagaaccatcagccaaataagcctcctttccttataaattacccagcctcaggtattcctttatagcaatgcaaacagactaatacaagtacaagtctgtatagaagattaaatgaagtaatggatataaagtgtttaacacattgcaaggcatagtggcacacagaaagtgcccaaaaaaacaacagccattgcaattgttatcattacttaatttaagggtcagggataaaacccagttgctaaaatcctagttcagttgctctatttactaaaccaagagcgcaccagtaatagctcagaatttgctagtagaccttagccatctcacctacaaaaccattattgtctacccctctatgaccccggatcctggctctcatcactgagagaattgcagtagctgtggctccatcctggccttcctaaaatgaggccactcatgatctcaaacttagaaggaaagttgatccaatgaaagtgggaaaattggtagggccttagttctaagttataagaaaaattctcaatggaaggaagagctttaaattgtgatctctggtaaatgactaaactcctagggaaacctcaattacctcatctacaaaattcagggtctagtaacagcctttagcatcacattctgtaacagtgattctcttgggtcatataaaggactgagttatggagttacctaccctcttcgactcatcttttaatttgtcatagaaaaacaactgttgtacattgtgttaaaagttaaattctatggccagagtgtgatttggaaaagaaaactgaagtaagttggaagcagagtgaagaaaataactctgccattttcttccaactcaccctacagcatctctgttttccagcctcactgggttaagtcttcaaatgtagccctttgcttctaagacaatcccatgttacaaagcatcaataatcctcctctgaacattttcctcaaaagttctaactacaaagcagttagccctgatgttctgataaaagtctaattaatgtgatgaaaatggaagaacttcattttattctattcatgtgtcaattaaatatacatgagaggatccttgaggtgaatggatagatcagtccaaataaatgctttgtatatcgtaaagggttccacaaatgactagtaatacttattattatagatatggcacttaatattatcccaagcatatgtgaaggaaacacagaagtacagaatataatttcagtcttgagggaatttaaagagtggctggggaaatagggtttacttgttttttatgtaaagaccaattagtaccttcctctagcctcaaatgagcttagtctacaatcaacaaaatgtacaaaaataatatctacaaaactgaccacataatcctccaaggaagttacctcactacctttccatccccactccattagattccacatgattctataaggtggcgtgcacgtaatctttcacatttacataacacttttttaatttttaagttttttatttcaataggtttttggggaaccggtggtgtttggttacatggataagttctttagtggtgatttctgagattttgatgcacccatcgcccgagcagtgtacactgtgcccaatgtatagtcttttatccctcgccaacgctgaccctttcctccgagtcctcaaagtccactgtatcattcttaagcctttgcgtcctcatagcttagttcccacatatgagtgagaacatacgatgcttggttttccattcctgagttacttcacttagaataatagcctcccattccatccaggttgctgcacatgccattctttcattccttttcatggctgagtagtattccacagtgtgtgtgtataacattttatatatatatatatatatgacacatatatatttatgacattatatatatataactttatatatatgtgtatatatataactttatatatatatgtatatatataactttatatatatatatrtatatatatataactttatatatatatatgtatatatatatawaactttatatatatatatgtatatatatatatataaacatcttctttatccactcattgattaatgggcatttgggctggttccttatttttgcaattgcaaattgtgctgctagaaacatgtgtgtacaagtatttttttcgtataatgacttttcttcctctgggtagataccaagaagcaggattgctggatcaaatggtagatctgtttttagttctttaaggaatctccacattgtttttcttagtggttacactagtttacattcccaccaacagtgtaaaagtgttccctttttactgcatccacaccaacattattgattttttttgaatatggcctttcttacaggactgaggtggtatcacattgtggttttgatttgcatttccctgatagtgatattgagcatttttccatatgtttgttcaccatctgtatatcttctttggagaattgtctattcatgtctatagcccactttttgatgggactttttttttcttgctgatttctttgagttctttgtagattctggatatgagccctttgttgactgtataaattgtgaaggttttctcccactctgtgagttgtctgttaactctgctgattatatctttagctatgcagaagtttttagtttaattaagtcccatccatttatgtttgtttttgttgcatttgcttttgggtccttggtcataaagtttttgcctaagccartgtctagaagggtttttctaatgttatcttctagaatcttcatggcttcaggtcttaaatttaagtctttgatccatctggagttgatttttgtataaggtaagagatgaggatccactttcattcttttatatgtggcttgccaattatcccagcaccatttgttgaacagggtgttcttcccctactttatgtttttgtttgctttgtcaaagatcagttggctgtaagtattgggctttatttctgggttctgtattctgttccattggtctatgtgcctatttttatgccagtaccatgctgtttcagtgactatggccttatagtatagtttgaagtccagtaatgttatgcctccagatttgttctttttgcttagtcttactttgtctatgtgggctcttttttggttccatatgaattttagaattgttttttctagttctgtgaagaatgatggtggtattttgaagaaaattgcattgaatttgtagattgcttttgacagtactgtcattttcacaatatttattctacccatccatgagcatgtgatgtgtttccatttattcatgtcatctataatttctttgggcggtgttttgtagttttccttgtagaggtctttgacatccttggctaggtattcttaaggtttttattttattttattttattttacagctattgtgaaaggagttgagctcttgatttgattctcggcttggttgctgttggtgtatagcagagctactgatttgtgtatattaattttgtatcctaaaactttgctgaattcatttaccagttctgggagctttttggataagtctttagggttttctaggtatactatcatatcatgagccacagcaacagtttgacttcctctttacyaattcggatgtcctttatttcttccttttgtctgattgctttagctaggacttccagtactatgttgaagataggtggtgagaatgggcattcttgtcttgttccagttctcagagggaatgctttcaacttttccccattcagtattatgttggctaggggtttgttgtagatggcttctattaccttaaggtatgtcccttctatgttgattttgctgagggttttaatcctaatggatgctggattttctcaaatgctttttctgtgtctgctgagacgatgatgtgatttttgtttttaattctatttatatggtgtatcacatttattgacttacgtatgttaagccatccctgcgtccctggtatgaaacccacttgatcatggtggattatctttttgatatgccattggatttggttagctagtattttggtgaggattttagcatctatgttcataagggatgttactggtctgtagttttcttttttgttgtgtccttccctggttgaggtattaggatgatactggctttatagaattatttagggaggattccctctttctctgtcttttggaatagtgtgaataggatttgtttgaatttttctttgaatgtctgacagaaatcagctgtgaatctatcctgaactttttgtgttggcaattttttaactatcatttcaatctcactgtttgttactggtctgttcagagattctatatcttcctggtttaatctaggagggttgtatatttccaggaatttatcccctctaggttttctagtttatgtgcttaaaggtgttcacagtagccttgaataatctttcatatttctgtggtatcagttgtaatatctcctgttttatttctaattgagcttatttggatcttctctcttcttagttaatcttgctaatggtttatcaattttatttatcttttcaaagaaccagctttttgtttcatttatttttgtattacttttgtttcagtttcatttacttctgctctgatcttcattatttttttttctgccaggtttgggtttggattattcttgtttctccagttccatgagctatgacattagtttatctatttgtgccctctcagacttttatgtaggcatttaagtctatgaactttcctcttaacatcacttttgctgtatcccagaggttttgatagcttgtatcactattatggttcagttcaaagaattttttaatttccatcttgattttattgttgactcaatgatcattcaagagcaggttatttaatttccatgtatttgcatggttttgagggttccttttggagctgatttccaattttattccactgtggtctgagagagtacttgatataattttgattttcttaaatttactgagacttgttttgtggcctatcatatgctctatcttggagaatgttccatgtgctgataaatagaatgtatattcttcactttttgggtagaatgttctgtaaatatctgttaagttcatttgttttagggtatagtttaagtccattatttctttgttgactttctgtcttgatgaccagtctagcgctgtcagtggagtgttaaagttccccactattgtattgccatctctcattttttttggtctattagtaatgttttgtaaatttgggagctccagtgttagatgcatatatatttagaattgtggtattttcctgttgaatgttattttatcattatataatgtccctctttgtctttttaaactgctgttgctttaaagtttgttttgtctgatataagaattgctactcctgcttgcttttggtgcccatttgcatggaatatctttttccacccctttaccttaagtttatgtgagttcttatgtgttattaaataggtgactttcctgaagacagcagaaacttggctggtgaattcttacccattcttccattctgtacgttttaagtagagcattcaggtcatttacattcaatattagcattgagatataagatactattctattcattgtgctacttgttgcctaaataccttgtttttcttttcattgcattatttcatgtaggtcctttgagaattatgctttaaggaggttctattttggtgtgctttgataacttgcttcaagatttagagctccttttagtagttattgtagtgcttgctggtactggcaaattctgtcagcatttgtctcgaaaagactatcttttcttcatttaygaagcttagttttgctggatacaaaattcttgactgataatttttttgtttaaggaggctaaaatagaaccccaatcccttctagcttgtagggtttctgctgagaaatcagctgttaatctgataagttttcttttataggttacctgatacctttgcctcacagctcttaagattttttccttcatcttgactttagataatctgattactatgtgcctaggcaatgatctttctgtgatgaatttcccaggtgttctttgagctkcttgtatttggatgtctagatctctagcaaggccagggaaattttcttcgattagtccctcaaatatgttttccagacttttaaatttctcttcttccttgggaataccaattattcttaggttggggcatttagcatactcccaaacttcttggtggctttgttcattttttaaaatcctttttgtctttgatggattgagttaattctaaagccttgtcttctagctctgaggttcttttttctgcttgttcaattctattgctgagamtttccagtgcattttgcatttctctaagtgtatccttgatttccagaaattgtgattgttttttatttatactatctatttcactgaagaattttcctttcatattctgtatcatgtttttaatttaagttggacttcacctttctctggtgcctccttgattagcttaataatcaaccttctaaattatttttcctgcaattcagagatttcttcttggtttagatccattggtggtgaactgktatggtcttttgcrggagttaaagaatcttgttttgtcatattaccagaattggttttggggtttcttctcattttggtagacatgtcagagggaagatctgggattcaagggctgctattcagattcttttgtcccacagggtgctcccttgatgtggtttaatcccccttcccctaggaatggggcttcctgagtctcgcaacccagtggagctactgggctctgggctggtactggagagtgtctgcaaagaatcccataggatgtgacccatcttcaggtcttgcagccttgaataccagcacctgctccagtggagttagcaggggagtgaagtggactctgtgagggtctttggttgtgtttttgtttagtgtgctggttttgtgttcgttggcctccagccagcaggtggcactttcaagagcacatcagctgctgtcctacaggcaggatggaaacttgccctagggacacagtttttcagcatctcagagagcctgcagtggtgatcctgttccttcaaagggtctatggattcttctgactttcctggtatgttcctgtggcagttcttggagcagaagttcatgatgtgagtctccacaggctgctctgtttgtctgagtgagagctgcaagctagtcctgcctcctatccaccatcttaatccaagatgctacgtaacacttttgactgttcaaataattttcaaaaacatcccctcatctaaacctataataaattagacatgattagcttatttaattataccaatcaaatctcttcyatctttatatctactcaatcttggtaactatatcctccttttattttgggattgcctatttgttatcagcactgaagtcagtggatctgcatgaatctggaaaattgcaacaccagcttgctgtggatttggataggaacatcaacatccagtggcaaaaayattgttatcccttgataggatcaatgacctattcagtcaaagagatggagtacctcacccgggccattgacagaactggaggagaaaaaaatactgtcattgttatttccctgggccagcatttcagaccctttcccattgatgtttttatccgaagggycctcaaygtccacaaagccattcagcatcttcttctgagaagcccagacactatggttatcatcaaaacagaaaacatcagggagatgtacaatgatgcagaaagatttagtgactttcatggttacattcaatatctcatcataaaggacattttccaggatctcagtgtgagtatcattgatgcctgggatataacaattgcatatggcacaaataatgtacacccacctcaacatgtagtcggaaatcagattaatatattattaaactatatttgttaaataacacaaaagtctgaaatycattcacttaagtaaaaaaatttattgactgtctactagcaggmcagatgctgtgtttggctctgaattcccaactagcaagagcagagaatctacattatggctgatccataagccaccaattcagctaaatgagatgtttctaatctgggcttccacttaaaaataaaactaaaaatactcatgaaaagagcctacccttcttgatcagagccatacccctcttcaccaatgggaagtcaagacacctatgggtaaaagttctctctgatgcatgaaaactcagagtgataaagtaattttaaaataaawatttggagaaagcagtcctgtttgtttatttctatcactaaagacaagctctagatgaatttccaagtcagaagagaagtcttgtgaggcaattctcccatagtcatagagagaattctaagcaaggacatgtgggtcctgaaaacctctaaattttctctctctgtaggaactcctgatactaggctctaatctgattctatagtatttttcatccaggtttataggataacacaggtaaaagcacgggccactagaattcaggaagtttgtctttagtcttgttgctgttgatcattttaagactttggagggttgggtgcagtggctcacacctgtaatcctagcactttgggttgcaagacagtcaaagactggagagaccaaaaaagtccaggagagtttattaaattaaggtgatcactggctcagccgtacataggtccagatagtctgagccccaaacaaagggcttttcctacttttaaacatcttaaggcgggaaccatgtgaggcaggaagcgagttacagaagcaagaaacaaatgcagcattacaacatttcttacatcttgagagaaacaggtcttgcaacctaaacttatcagtcttgtgaccctgcagccatgtaggaaggtaagcaggcactctctgggcctataataaactttgaggaatgtagagttggggagtatagataaggtccactgtccacagaaagaagacaggctgttaatactcccttttaacttgagtgtgggggtgaggggtcacactttgcagcagctttaagaggattttaaaatatctattactactactattagcttatagttgatttcactaattccttcttcatttggaggctgaggtggaagggtcacttgagtccaggggtttgacgctgcagtggcacaccactacactacggccagagtgacagcgcaagacccagcctcaaaaaacaacaacaaaagactggataagtatcttcagctctctgggtctcatgtggtactttgggcactaccttgaggggcaggagtcaggagaggtgccccatggggcagagtaccagttccaataccactgcttcagccagaatatcagtcattcttacctatatgtatatggaatcctgggtgagctttttgtttgaaaaaattccacggcttaaaacatctttgcgagccactattgtctgaaagctattaagtagataatcaataacaatggtccctataatctacacatgtaggttaacattttaatcactttcatttgcattttaataggccttcccaagacttgatcaaaaaagagtgttggatatgagaatttcagttgaatagagcaatgtgattattgtcaagcagtttggtaccatattcttccttaattttgtacccttcatcatgccccagataccaccaggcccctgacccaatagtaagaatggcaatagtacttgcatctggaaaaaaacaattacaatagggcaacttaaatatgtttatccagttttttgggggcagcaggagataatacattttctatttatttgccaataatcacagttcatagtccaatgccccacatacactcagatggtcaacatttttttttaaatccctaccatgtgccaggaactgttctagtctttaggtatatagtcatcaaaaagacaaatgatatctctgccatcaaagattttatattctaataaaggaaaaagataataaacaaaaaagacataaaattattccacagttcatgataaagtcatatgaacaaagcatatcacatcagtgatagggtaacggcatggtggtgatggaggtgactaggtatttagaaaagcatctcagaagagaagcattgaaagtgggatagaaaagataaaaaggaggcagccgtgagacaaaatggaggaagacagaggcttgagaagttagagaaacaagcaggagctagatcttatgtggccttattacctatggcaaggagtttaaattttatcctaattataatgggtgggtagttgagggaggaaggaagggagagggaaaataagaaagagggaatgaaagagaggaagagagtgaagaagagagggggaaataaagggaggggggagcagtaccttaactcaagcatcaccatggactactatagctgctaaggtaagaatgaacaagggttgtgaagctccaggaatggtagaacagcacctgctttcttctattaatagagtgactttccactacccctttctacttgaggtaaggaaggataaaaggtattgaagatcttgcaaaaggggcagaatatttaaaaggaacacagagcactataattttagcacagaaactaaaatttgaatgtgacccagagattttttttaagaaaagaaaaagaagatatatgtttgtaatatgtgaactctaaaagggaacgtgagctcagatagaaagatacattcagaatgataattctcagaagttagcactttctaggggcaatccatgaaggcttaatggttcttctgaaaaccaaatcaatatacacactgtggcaatgtctgtgtgatgtttcatatgtttatttcttgtctgagatgattggccagtatatatatatatcgaaagtacaagttgttcttccaacagagggaaaaagtaaaaatgactgacatatagcccttggagctgaatggattcttaaatattttggaaaaatactccacaaagaaaaaacattgtaaaaatgtccaagggaaattattaacaagaggcaagcatattaaagaatatactgaaaagaaactgacaaggtgaggtatttttttcaagagagggtatttaaaaaaaataaaaagtatattctaagtaccagtttgtgctgaatccttacagttataatctttctcatccttgtaactaacagtctgggtccaatgaggaggtagaaaccacccagtgggccaaacggggaaagtttgatataaagaattactaaactctgataaatgagtgactataagataaaaggaatctctatgtggtatgcctaaggctgagggacggtgtccaaaaaaaacttgaaagaaggtccctccccaaggctgccgttcagccttattgggaaatgtatagttcatttcactggaaagcagagatcgttggttttcccaggctagagcgggtctgcagttgctggacaagcagaagggaatcctccatagtccaggcagggttcaggcaatcatgaaccaggggtgtgaacaagtaggtgagggcctaggacaaagatgagctgtgcagggggcctgcatggggaatcgagtgcccatgcaagcagtaggccttcacatacagggagtgctggggtgctgtagccaatgtggaaggctaggaaaggttattgccaggccaggatgaggctgcaaggttgccaaaagattgcttattctgggaacatggctggggaagagccctactggatgtccccataccaaaaacactagcctactgcacggccaccagaaacagcaggagagttccttctttctgcaatgcccctcccaagccctctgctgagaaagcttagcaaagtgctcactatacaggatggtgcttaaggcacttctgtccatgattgcagagaatgtatacaaaggcaaatttggagtcaagaggtaataaatcaataactgacacggtcatcaacccaatcctttcaactgggtcatttgtttaggaaacaaatagactactctctaatagtttgcatcttaaaaaagaaaacataaatttaaatacatatatgtgggtatatagaatgtaaatattctccatatgtgtgcaaatattctatatatacagagatagagagagagagagagagaaatcccttgatattacatgtgtctcttgaggtatggctacatatcttctcccctttttataaaaccttcttgaaaacatatagttttttgtccttgctacctcctattctctgttacaacacattccagttgggtttatgttctaaatcgctcctgccagcggtactaatggcctttgtgttgctaaatccaatggctacttctttgtcttcatccaactcagcctctcagtagtgtttgacccaattgactgtgccttctttattcactcactcactttcctttgtttctgtgccacagatttctctgtgttttcctcctgcttccttggtcactccttcccattttcctttgccaatccccactcagctgcttggcctctaaagttggagtgccctggggttcattcctatgcatccactttgctctatctatatgctaatttggggtgatacccactccctggcttaaatactatcgatgatttccataacttgtaagtatttgtctccagctctgatttctccactgcacttaggacttgcatatctaattgcctacttaatatcccatttacctgtctaggagacatctcaaactcagtatgatcaaagtagaattcttgatttatattccaaaatgcatttgtccctagttttctccagctcagaaatgtttccaagattcatacaggtagtcataaattgtccttgattcatttacttctctcattcctctcaaagttctgccatatttttttttacaatatatgtggagaatctttctcctcttctctatctccattgctaccatcttagtttaaacagtatcacctctttcctggactcaggcaataactgatcttttgctcataatcttgaaacttctacaacccattctttgcctagtagccagactgagctttttaaactgtaaatgagatcattttacatccctggataaaaccctgtaatggcttccaaactcctttccatgatccataatgatgagtctttcctgtcattccaatctcagataagttttcctgaccacacaatgtaaaactagatcactccaactccctattactcttaattacttcactgtttccttttcatgagtgtatgtatcactatccaaaataatctcattaatttagttgtatatattatttttacctgttctactcacagtaaactctaggttctctaacagtaaggaccacgtatttgttcactaggtgccttgttcgcagcatcaggaactacgtctagcatatgttaaagattcagtctatacctgttaaataaaatacaatgattcattttacatttgccagggagtaagtggaatgtaacagccacctattttaaacagatggttttgtgtaaaaagggcatggcctacaataaagacacgttctctattaggagaatatatccaaaatatgacagagaggccccaaaattcatcaagcctgcaaaagcccatgtgaagtatatcacaaatatttttgatgttctgactcagaaatgaagaatttaaggacaaattatgtttttcaatattttccattgatggctaaaactttaaaataggagaatcctgacatctgttattcgctgtactgttcctgttgccaggaaagacttgctcttctggaatgtagacaatgatatcaatacaaatggttcctggaaaaggcttggcatgcttggaaaaataaagatgaataagattttttcctgcctggaaagtattcattatccaactagagagataatcttttatagagtatagaaataacttataagtaaaacaagaggtcttctggaatagctcaaactcctatatcccacaataaattaggctctaaaggtggccctttaatggattttcctttccagaattagctaaagatcatatgaaacatatattcttgcattcaatccattgtcctggctgttccttttttatggaaagaatatccctcatggctttctccaaccaatgagatttcagtcacccttcaagtcccagatcccaggtgggatctgggtcagtcaagtcccaggtggtgtaggcatactcaaccaccccctctct

SEQ ID NO: 96420 - DNA, 16294 bp, Homo sapiens
tatttgctacattggtgctaaaaatgttaataaagtcatatacattttaagggcatactttcactcatgctagattgtcagaaaatgttctgtaaaattaatgaatagaaaagaaaaggaaggatgaagtgatttaaaggcagagaaaaaggatgaaaggtaaattgttgccagattgtagcgtcctctagtggcagtctaaattcggactttattctgtgtcggaatcttccagaagaggagtggcataaaaaaattgatgctgtgcatcaggataaacggacttaactgtagtgtgagaacaggtttgaaaaagaaaagtttagggcgggggagaccactattggtggtctaattttaatatttcaaacagctgcgtattatagctagggtgtttggacggttgtcatggaaataagccccgccccttaagctgcgtcctctctttgacctgtcagtgagggagggacagtccaggcagttctgtgcgtgttcactgtttagtagtactcaaaactgccagtgtgagaggatttggaaatcactggatctgctcaatacaaaaatgttttttcgagtctttctccattttatcaggagtcattctgccactgcagtggatttccttcctgtgatggtgcaccggctcccaggtagagggtttgcccctttctcttcctcatcctcctcttcttgccagtctgcgcttagaattctgtgcctctttcctgaaggttgctgggagcttctgaagctttgtgtcctgtgtggctcagatgagatagcaattccgcagagtcctggaagttaaagaaggctgagttaggattgtttcctcatggtcagggaaacagccttcacatttgtatattttatgcaatatttaaggcaggattcagggacttggtattctttgggatttgcaataagaagaatattcaatatttaggcttttctaaattgaaaaatcactgccacacgttctaatgtaattgtttggtttctctatttgcattttgcggggactgccttaaaactcatttatgttttatagccttctattatagttaccattgttacatgattttatgtatagaaattggctgatctagagctttcagaaatcatactaatatgcactataaattttaaaattacttaatgtagtaatttaatgtttgcagtatgcaagggaatgtattacgtactggaaggagagaggagacaaacaccagaccctgtactcaaggagtactggtagtatcatttatcatacaagacagataagataaggtccatatgagagctataaacagatgctgtgagttcagactaaggagaatcagttcttgctgtaggtaaggggaatgctgtgtttataaagcaaatgacatggcaactggatcttgaaggatgagttaggtgagtaaatttcatctgaaggagttgggaaatatcctagatgaagaaaattgattggcgggggggggggggaattaaacattctattttgacatgttgaaagtcacctgcaagaagtaattgatgaaattaagagactagatgagattgccaagggagagtgctgagattaaagatccaaggtaggaccttaggaacattcatgaagtggtaagggggataaggagcccataaagggaattaacatttggaaagcatccactatctttatatttgattatgacaacagacataaacaggaagtattaacctccttttatttccattttatcatggaaaaacctgaggctcagagacattaagtaacttgcccaaggttgtcagctaataagtaataaaactagcagaatgcagagagtagttatagggcagcaggaaagttagaataggacaatgtctcagaagctacgaatagaaaggagtttaagaaagtgttaatgtcaaattctatggaaactttgaagagcatgtagcagattaccagtagcatgcaatagagtatacaacatatagacatgtaaatattttctacaatgtaaaatgctttaaatttgtgtatctctacttagacaaatgcccaatcaggccattcaatttacttaaaaaagtaagatgagtaaaattacatacctgaccttagggaatttattttaatctgagaataagataaatggtgcataatgttaataaaagtagagtaacataaatacctgagagtttccttctctatcttttcaaagcatcctctttgtacttctgatactgtagttcccagattttagtatgcttaagaatacctgcttgtccttccccagagattctgatttattaggaccagaatggagtccaggaaactgcattttagcagtaacaccaggtatttctgttgcaagtagtcctcataccagactctgagaaacaatgctgaaataaaacacagtgtcagtgatctgtttactaggcagtcagttcttttatttcaggattctaatgctttttattctcagcagtaccaagtacttcgtcaactgaataaaataaaggagatattacaccttattggactgatcattaaaagctatgtaaatataataatagcattttttgagtattctgttctaaaagctttacataaactaactcatttattacttatagccttagaagtaatatgaattatcatcatcaccatcttagaaaagaggaaacagaccacagagaggtgataagtgcctttctcaagccttcttatttaggagagggcatatttgaaaccaaccagtctggagccaggtagagccccagctcacacccttaaatattacactgtgctgcctcttaagggaagtactgtaacactggagatagaccttgaccaattaatggaatttgctttttttttttttttttgagacgaagtttcgctcttgttgcccaggctggagtgcagtgctgcgatctcggctcactgcaacctttgtctcctgggttcaagcgattctcctgcctcagctcctgagtagctgggattacaggggtcggccaacacacccggctattttttttttttgtatttttagtaaagatgggctttcattatgttggccagacaggtctcgaactcctgacctcaggtgatccacctgccttggcctcccaaagtgctgggattacagacttgaaccaccgtgccccgctggaattttcttagaactagagaaaaggacattgggaaagacattcagggtgaaagagaattttatttgaaaaatcagtaaagaattaggtttgactcatttgttacatgtcatataggggagtagaatgtctcgtgtgcttcaagctgaatttttgaaagatttgaaagaaatgggatagtaacaacttgctaaaagaatgcaaatctcacttcttcagagtaatagtgtccctatatgttagctcatttttctagcctagatttctgaatcactcttaaacttttatgagataaagaattctattttatagcacttaattatttatttgaccacccctctatgttaggcagtactgccttgtgaacactcagtaatgttaaaataatagggagaagtttcagttccttattatacaactatgatttttacttcttgtgccttttgcactttaggtaatttcagactggatatcactgcataatttaatttttgacacccttctactggaaaatgccttgtattttcatgtatatgccattaaaataaaaggaattaaatttaagatcttattaaattcacaggaatcgctatgaagtctttggaatcacattctggtatatctaaattactggggtcaatataattggataatattgaatggtggtcatttttataacaacgaggttgctcttagcacatctggggttggcatgtagatttattcttgtaaaaagacaggtattgttcaactatgagaaatgataaaaatagtaattgaagtcctaagttagttcttaggcagattagtagtcctaagttagttcttaggcagattagtactacaaaaaatagaagaattgttgtgggttgaaaatggagaaccaaagcgttgatagtctgggaatgaggaaggagagagaagaaatttggagcctgtatttggtgttaggtttatgtttccctcaagctgccagttgataagattattgtctgtgggaaacaggcaagtttatagaagatttggtaaaatattttttgtgcttttggtttcctctgcacagttttcaaaaggtacatgggaaatactcctcagaaaaaagccgtctttgggcagtgtcggggtctgccatgtgttgcaccgctgctgaccacagtggaagaggctccacggggcatctctgctcgagtctggggacattttcctaagtggctcaatggctctctacttcgaattggacctgggaaattcgagtttgggaaggataagtaagccttgattttggagaacaacttggatttcttggcatgggctggttctgtggaatatgcattaatatctgcttcctctgtgaggttaatatttccattccatccctttgattacagataaagaaactgtagcctagaggagaagaaaggagactttttaaacaaaatgtcctgctttttctgctctgtagactattgtaaatttgaagccctctgtggtttgtaccaaaagaagagaggtgtcagaagctgtcagtgtggtgactgagctgtttccccacaagttcctgaaggaagggcaatgtctcctcataccactctctccctcacccagcacttgccagacacatggtctttttcagttcctcaaactgggcacagttgtatcttctcagcatcttagcattagttctctcacctatgttccctaatcttcccaagactggtcttttcattcagatgtcaactcaaatctcatgtcctttgagcctttcctgatctcccaacataaaaatgccagcacagtcatccctcagcattcacagggcattggttagaggaccccctaaacaccagaatccaagtatgctgaagtcccttatataaaatgcttttatttgcttttaacctacatatatcctcccattatcttttaaatcatctctaaattactctataatacttaatacaatgcttacacatacttcattcccatggatttgtcttagtactcagcaaattcaagttttgctttgcagaactttgtggcatttttttcccacaatatttttgactcaagagattggttgaatccacagatgtggaatatatggatatggagggctgactgtattaattataattacctattttaattctctacacagtgttatcagtgtctggtattttttatttgttatttgagtgttaagctctgttcccccactagaatgtaatttgatgagggtagagactttttctagttcatcctgtatccccactacctgtaacagtggtctgcacctgaatagcattcaataaatcgatgccaataaatgaaaaacccaggcaggctgaggagcctagaagcagggtgggaaggaggactggctgagccctgggtgtgggacagagtgcatgtgtgtggtgtgtccccaagggcagaaaggtggcgaagggaggcgaatccaagtgggtggagggggggaagggcgggaggagaaaaaggtgggaggaggaccaggtgggagggtggtggcccactcaggacccagtgggggcagcgtgatgaggcggatgaccctgttcctgaacggcagccccaagaacggaaaggtagttgttgtatatggaactttatctgatttgctttctgtggccagcagtaaactcggcataaaagccaccagtgtgtataatgggaaaggtggactgattgatgatattgctttgaacagggatgatgatgttttgtttgtttgtgaaggagagccatttattgatcctcagacagattctaagcctcctgaaggattgttaggattccacacagagtggctgacattaaatgttggagggcggtactttacaactacacggagcactttagtgaataaagaacctgacagtatgctggcccacatgtttaaggacaaaggtgtctggggaagtaagcaagatgatagaggagctttctttttttttttttttttttgagacggagtctcgctctgtcgcccaggctggagtgcagtggcgggatctcggctcactgcaagctccgcctcccgggttcacgccattctcctgcctcagcctcccaagtagctgggactacaggcgcccgccactacgcccggctaattttttgtatttttagtagagacggggtttcaccgttttagctgggatggtctcgatctcctgacctcgtgatccgcccgcctcggcctcccaaagtgctgggattacaggcgtgagccaccgcgcccggccgagctttcttaattgaccgaagtcctgagtactttgaacccattttgaactacttgcatcgtggacagctcattgtaaatgatagcattaatttattaggtgtgttagaagaagcaagattttttggtattgactcattgaacacctaaaagtggcaataaagaattctcaaccactggaggatcattcaccaatatcccaaaaggaatttgtccgatttttactagcaactccaaccaagtcagaactgtgatgccagggtttgaacttcagtggtgccgatctttcttgtttggaccttcgatacattcacttcaaaatggccagtttaagctgctgtaatcttgcacatgcaaatctttgctgttcaaatcttgaacgagctcatctctctggatcagtgcttgactgtgcaaatatccagggagtcaagatgctctgttaatgggagaaaatttttgcaatctacccatctgacaaagggctaatatccagaatctacaaagaacttaaacaaatttacaagaaaaaaatcaaacaaccccatcaaaaagtgggcaaaggatacgaacagatacttctcaaaagaagacatttatgtagccagacacatgaaaaaatgctcatcatcactggccatcagagaaatgcaaatcaaaaccacaatgagataccatctcacaccagttagaatggcgatcattaaaaagtcaggaaacaacaggtgctggagaggatgtggagaaataggaacacttttacactgttggtgggactgtaaactagttcaaccattgtggaagacagtgtggcgattcctcaaggatctagaactagaaataccatttgacccagccatcccattactgggcatatacccaaaggactataaatcatgctgctataaagacacatgcacacctatgtttattgtggcactattcacaatagcaaagtcttggaaccaacccaaatgtccatcaatgatagactggactaagaaaatgtggcacatatacaccatggaatactatgcagccataaaaaaggatgagttcatgtcctttgcagggacatggatgaagctggaaactatcattctcagcaaactattgcaaggacagaaaaccaaataccgcatgttctcactcataggtgggaattgaacaatgagaacacttggacacaggatggggaacatcacacactggggggcctgtcatggggtggggggagcacggagggatagaattaggagatatacctaatgtaaatgatgagttaatgggtgcagcacaccaacatggcacatgtgtacatatgtaacaaaccggcacgtggtgcacatgtaccctagaacttatatatatataaaaagatgctctgttctaatgtggaaggagcatccctgaaactgtgtaattttgaggatccttctggtcttaaagccaatttagaaggtgttaatctgaaaggtgtagatatggaaggaagtcagatgacaggaattaacctgagggtggctacattaaaaaatgcaaagttgaagaactgtaacctcagaggagcgactctggcaggaactgatttagataactgtgatctgtgtgggtgtgatcttcaagaagccaacctgagagggtccaacatgaagggagctatatttgaagagatgctaacaccactatacatgtcacaaagtgtcagatgagaaattttagggactggaggaagatctacaagatgaaaatattttccttatcacttttctttctccatccactcagttgtctagaagaaataacactataaggaaattttaaaaaaacatttagaggattatgcttgttctcagcggtgcataatggaaaaaactgacttttttccatcttctgatttttaacagaaaagcactcatttaatagatgtagggaaactagatattgctgctttttgaacggggtaggagggtttacctagttttatgaccaggaatagtatctattatatttgcttttaaataggcatgatgtggaaataccatcttggtttgagatgcatttgaggattttaatttatggaaagcacaacatatgcaattatatttattgaatacctagatgcagtatggatatttaaattgttaaaactttatgaaaacttggtaaaggttgtttaggtttataaattgctttagtgattcctcccctctttaaatacctgtcacactgtatgaatatggtgagatcagactccttaagactcttttcaggttcgtttttacaatgtttactttttaggaaaaaacagtagctaaattaaagtaatatccagttcttactgattgaaacagagtggaaagaaagacattgttgtacatcactgtcattccaaaggtacagtagaactctggatggaggaagaacttacctatcactacaacacttacaaatgagaatttctcagaatttcattctaggcaagttccactgaacaccagaccaagcaattctgtctgtttacactattagcctagttttctcatacaatcatcacaagcataggaagatacttcaaaaccaaaaaaccaaggtgcatcattaatattcatttaattcaaataccaaatagtttacatagggccagcttagaaatagatactaaatccagagctactgcaatcaaagcttatattaatgaatatggttgagttgtctgctaaaaggcaatgtaatataattgcagctagaaccctacagtggggaatgaggaatttttttttttttttttgagacagagtctcgctgtgtcgcccaggctggagtgcagtggtgcaacctcggctcactgcaagctccgcctcccaggttcacatcattctcctgcctcagcctcccragtagctgggactacaggtgcccgccaccacgcctggctaatttttttgtatttttagtagagacggggtttcaccgtgttagccaggatggtctcgatctcctgacctcgtgatcagcctgtcttggcctcccaaagtgctgagattacaggcatgagccactgtgcctggcctgggaatgaggaattttaaacacacatttgattacggccaccaaaaaatatatataaagtaaaaataaaggcatttggctcgtccaagatgtaataccaatcagtcagcacctgtgattcttttacttatattttttgttttttttttaaacaaattttagcccaattttcttgagtcattatctttctgcagcagcagaggaagggcctgtacctccctaccaatgacctggtgtccttatttctaccccaagtgcagggatattagctgtgtccaaatgggttctgaattctacagactcatcaacatgaggcaaggaatcattgaaagccacctgtgtctcctttgggggaatgacatatctttagtatttatgtagcttattcttccatatgtacatatgcaaagctttccttaacagtaaagggtacatatgcatagtgggaggagatcagacctttacaagtaaaggaaagcaacttcagaaatgaattattttctttgctttattatttttaccaagacagagaagtattgtattgagaaataatctattttcataatcaatatgtgcctaaattatatttaaatcatttcactctgtactatattttcaggaattatagaaggtattattcattcacttaaaggtacctctgtagaaataacctaaaactgcagaacaatctgaaagatctaaacrtggtgtgcttagaaactgcagattttagatctaatgtatactgcattaataaacgatataaagtgttgaaaaaaatgaaaaaccaataactcttcagtataaatttctctcagtgtctactagggacgtgaagctatgtgacaaaacctctatggccaggaaggaatctgctttgttttaaacatttttaaatattagaaacaatttattatgaaagttttacccatataaactttttaaaatatagaaaagggaggctaggggaagcatgtaccacctgacacatcctttattagcactttgatgtatttcctgccagttttcctcgctatttctacggatttgttttaaacaattacagttatatgtagtattttttgctccactttaataaaacttcacactatcataagcctttttatccatgttgctaccaagtctgaacgatcattatttttaatggctagatgaattccaggaattattgttttttaaaaaaatattgtggtaaaatatagataacatacaatttaccatcttaaccacttttatatatagaatttaatggcattaagtagattcatacgattgtgctaccatccatccacagaattcattttaccttgcaaaactgaaaccttgtatccactgaacactaatttcccattcttcccttcctctaacccctggcaatcaccattctagcttctgtctggtaaatcatcatgccctttcctctgggcctggttggaatttgatcatggtccttctgtgcctctcatggtctgttgttggaaacagaccaagaattagggatgtttaaaaaaagattatgaggcaaagagaagtagaagagaaggagggcaaaggggaggaggaggagaaacttctaatccagctcccagagaataaacagcctcttacagagggtatatggtatttcacctgctgcagaaggagaggctgtaatgtattgttcaaaccaagtagcagaaccactcagggcccaggcttgccccacaggcctctttgaagataagcatctttgtgggagaagtggatggcatggctggccctcacaagtgtctactttgtcctcaaatcagtttcttcagagccagtggtgggcatttatagcaggaacaaggtcttgccttccccttggacagatatctttaggtcaaaaggagatagacactcagtttagtggttgactccccagataggacctacagggagaggcagtgacctagggaagggcagtgtaacccttcacctatggataagaatagccctgctcacttgtgaatctcttatcactctgttagatgccatttaacagatccatgtcagcatgcagacacagtgatgacatgccaaaggtctatcttcaattaaatttttttcatcaatgatttaattgaagacatactagtttttaaagttatgtgaaggctgggtgtggttgatcacacctataatcacagtgctttgggaggccaaggcaggaggatggcttgaggccaggagttcaaggctagcctgggcaacatagcaagactccatctctacaaaaaacaaaaattaaacaaaagtaaaaagaataaagttacatgaatctgggcagaatactaaatagcgtcagcacctttagtctctaccattctctagacaggatttcaggatccatagtctaggctcccagttcctggactatcgccactgtaatgattgtccccctccatgccacttcgacaaggccacatactaaggccacacttggaacttactatacagaatttctccacccctgaaatcttgaactctgaaactttactctgctcaaaaccccagttttcacggtcctacattcccattaaacttatttttttcattccatcaagttctcctttccttcctgtccactaccttcttaaggcttatctactgtctcttaatttcttctccctggcccagactttaccgtcagtcacttcaagcactttcaacaccacgctcacttcctttgccctggtggtcactgcctctcctctgatgattttcagtcctagattagcccatccttggtttcccctgctcatggcccagtcctgctgagcaggtctagagcaaatcatacaaccttgctgattgattcaattacaaaatgatgatttccagtcctagctgagtgcttggtgctgccaggaatctttagcagtcagtgttctttccatcttctcacagggtctgccgcaagtctctgaccctttcctgaagcctccttcattctccccgtccctttcaccctcagcagataaactggcctacttcataggaaggaatgacttgagggacagctgcatttgaactccttcagcttccctcttcccacctccgcacttccccacacttctgatcagaggacgcagctcttttcctcttctctgaaactttgatgcatcacgatccctcccatttcctcatctgccaaataactcttagagctcaccttaccttttgggatgctgtagagcccaggatttagcgtcatcactgaattcaaacccttgttctgtcactgagcagccctgcaactgtgggcatattcctctgaaccttggtttccacatctgtaaaatgggaaaaatatttcctcgcagggtcaatgtgaagggaaaatatatgtataagggatgtagcaaagtgcttagcacaatacctggcatgtagtaagtgcttggtagatggcacttatctcactggcaaacttatctagatactctcaaacatggatctcccaccccgcccccagctcttgggctctagacctgtgttttgccaactggctgtggaacatctatactctggtgttctacaaatagttcagactctctcaaaaccgagccattgacttttcccagtgcttgttcttcatgtcttctccatcccagttaaagcatcaccagccagccagtcattcaggtccaacattttggaccctctctttgtcgctgtctacatcctatcagtcatctctgacttgtttctggagtttgtcctttgctcactggtgctgcttcagtttaggtgcttatcttctcttgcttgaattattgcctgggctcctcgttggcttcttcaatctgtatgctgttctttgtattccaggatgccggtcacacagtttcactctcctgtttcacaacttcacactttcctgttgaaggtcattaagccttagtctaagtgctggtggtcgtgggcagacctgtttctccaacattatcacctgctccgcccacatgctaccccctcaactggctgttcctctaagatactatatgtcttctgacccttcctccttccatcatctctgcccttgtcctctctgcaattggcagacatccgtaaagaaccagccaaatgtctccttccctcttgacctttccctgattcccccagctttccatcctattgctccttctctgcataaatagctttttttttttttaaagtttctcccttgtagcagcaatcactttgtatccattatttatgtgcctgtaagtgctgaccttggcacaatgcctggcagatagtagggactcaagaagatgttgacttgaataaatgaatgcatggaatgacaggatctcttgagacacaatctaacaaggtgaaatatattaagtagcaaaaattcttgaaattattgtaagtttttttgaaaaatactaccaaagtagacaaaccattagttaacatggtcaagaagaaaaaaggaaaaggcacaaacatacaaagtatgaaatgacaatggagaagaaataattgaagcagaaaaaaattaattacaagagactttgaaggcctttatgcaaatacatttgaaagccttgataaaatggataattctatagggaaagcagattaccaaaattgatggaggccaggtgtggtggctcatgcctgtaatcccagcactttgggagctcaaggcaggataacctcagcactttgggagggtgaggcaggaggattgcttgaggaaaggagttcgagaccagtctgggcagcctagccagaccttgtctctacaaaaataaaaataaaaagaattaaacaaaattgatagaaagggaagtttttttttttttttttttgagacagagtctcactctgtcgcccaggttggagtgcagtggcacgatctcggctcactgcaagctccacctcccgggttcatgccattctcctgtgtcagcctcccaagtagctgggactacaggcacctgccaccacgcctggttaaatttttttgtatttttagtaggggtttcaccgtgttaaccaggatggtcttgatctcctgaccttgtgatccgcctgcctcggcctcccaaagtgctgggattacaggcgtaagccacagcacctggcctcagagagggaagttttaagtagaccagtttctttagaagaaataggaaccttattaaggaaatgtttctcaaaaaaattaccaggcccagattatttcacagatgaattctaccaaaccttcaaatgtgagatagtcccaatactttataaattatttcagagcatcaaaaatgaaggaaacttccctattgtttttataaaggaagcatcatattaatatctaaatatgacaaagatcatggaaaaaagtaaactgcagactaatattatttacgaatatccacgataaagtacaaaataggccaaatatcgtggctgacacctgtaatcccagcactttgggatgctgaggcaggaggatttcttgaggccaggagcttgagattagcctgggcaacatagtgagactccatctttacaaaaaaattaaaaagtagccaagtgtgggggcgtgtccctgtagtcccagctacttgggaggctgaggcaggaggatcacttcagcccagaattgaggatgcagtgagctatgacagtgccactgcactccatcctggaccacagaacaagaccctgtctcttaaaaaagaagtacaaaatatataatactaatataacactaataaatattttgttaagaaacagaattcaataccacattaaaaaataaaattaactttgatcaggtgggattaatttcaagaatacaagttaggcttattattagtaaattcattaatacaatacaaatacgccatattagtaagttccaggaaaaataatcacagaattatctccatagatgttgaaaaagcttttgtgaaaatttaacatccattcttcctaaaaattgcttaagaaaatagggtttggctgggcgcagtggctcacgcctgtaatcccagtactttgggaggccgaggtgggtggatcacaaggtcaggagatcgagaccatcctggctaacatggtgaaaccccgtatctactaaaaatacaaaaaattagctgggtgtggtggcacgtgcctgtgatcccagctactcaggaggctgaggcaggagaattgcttgaacccgggaggcagaggttgcagtgagctgagatcgtgccactgcactccagcctggggcgacagagtgagactctgtctcaaaaaaaaaaaaaaaaaaagaaaagaaaataggatttgtaggatttgttggatagttgctaaatatgattttatatgcatgtatttcttaatatatatctcttggtatatgtatataatatatattataaatatcttatgtatctctatctattatatcttggtgctacaagcagtaatactacattggaaaatataccagtattttcttcaagtccagaaacaggaagggatggtcagtatcttcactactgttcaacattgtaccagatgtaagcaatgcaattagatgaaagacattgaccagagacacaaggactagtaaagtaaaattatctctttatgcaaatgatataatattactattatatcatattactataatgtattaatcctggaaaaccatagaggatcaatgataaaactaaatttaacaataaaaggtaaggtcataggatgtaaaattaacacact

SEQ ID NO: 96421 - DNA, 12649 bp, Homo sapiens
tctctactaaaaatacaaaattagccaggcatggtggcgcatgcctgtaatcccagctactcgggaggctgaggcaagaaaatcacttgaacccaggaggtggaggttgtggtgagccgagatcgtgccattgcactccagcctgggcaacaagagcgaaactccgtctcaaaaaaaaaaaaaaaaaaaacacacacacacacacacacacacacacacacatatatacacacacatatatatatgtttaagtctggagatatatatatatatatgtttaaggctgggcacggtggctcacgcctgttatcccagcactttgggaggccaaggtaggtggattacctgaggtcaggagttcaagaccagcctggccaacatggtgaaaccccatctccactaaaaatacaaaaaattagccaggcatggtggcaggcgcctgtaatcccagctacttgggcagctgaggcaggagaattgcttgaacccgggaggtggaaattgcagtgagccaagatcatgccattgcactccagcctgggcgacaaagcaagactctatctcaaaaaaaaaaaaaaaaaaggctgggtgcggtggtggctcacgcctgtaatcccagcactttgggaggccaaggcagtcagatcacgaggtcaggagttcaagaccagcctggccaacatagtgaaaccacatttctactaaaaatacaaaaattagccgggcgtagtggcatgcacctgtagtcccagctactcaggaggctcaggcaggagaatcgcttgaacccaggaggcagaggttgtggtgggccgagatcacgccaccgcactccagcctggacaacagagccagactctgtctcaaaaaaaaaaaaaaagaagtgtttaaaatgaaaaggctcctgggccacaatagacttcaaagttcaaccaaggtaacacttctctagtgactagtctctatagtgacactggtattcaagttaaatggtgaagcagaactactgtttccaaagtttctgtgtttttaagaaacagaatcctttcttcaaataaaatttatggggaagcacaaaatacaaaaagatagaaaagaactgctctgctggaagtaaggcagggaggcagggctgtaaggtcctgctctttaattccccctttgcctcaaggtgccttaaaggaatgatgggatttgaagaacacaatctgaaaacaaccaaggcagaggatgcccagtacctcccattacatctttgggaaaggcttccctttggtggtgattatgaagcagagaggctgggtgcggtggcttatgcctgtaatcccagcactttgggaggccgaggcaggcagatcacctgaggttaaagagctcgagaccagcctggccaacatggtgaaactccatctctactaaaaatgcaaaaaattagccaggcatggtggtgcatgcctgtagtcccagctactcgggaggctgaggcaggagaattgcttgaacccaggaggcggaggctgcagtaagccaagatcgcaccactgtactcaagcctgggtgacagagcaaaactctgtctcaaaaaaaaaaaagaaaaagcgggggtgcagagagaagaaattcataatactacaaatcgccatggctcacgcctgtaatcccagcgctttgggaggccaagacaggtggatcacgaggtcaggagatcaaggccatcctggctaacacagtgaaaccccatctctactaaaaatacaaaaaattagccaggcgtggcagcgggcacctgtagtcccagctactcgggaggctgaggcaggagaatggcgtgaacccaggaggtggagcttgcagtgagctgagactgcgccactgcactccagcctgggcaacacagcgagactccgtctcaaaaaaaaaaaaaataataataataaatatattattgtctatatgggtttttttagcctaaaaatgaattaagaaggagatatgtggacatatgacatatctgaacatatatatattacacacatacattctatcagtcattctcaaactatgaaaacaatctcaaccctggtttcagttttccctcaaagtcatcttaaattctttgctattatcctgccatggaagtgattttctcctgtttcttcttgacttcctttgcctagtttagacagcagcaattctgatatagcttctcagtaacataataaggccaagaagcaaacttgggcctaaaaataatctgtgaattgacagattgattgcctttgattcagtgagcacaggatggaactgacaaatctgactacgcattatttttgttataaattatgctgggccaggaacaggggctcacgcttggagtcccagcactttgagaggccaaggcaggaggatcgcttgagccaggagttcaaaaccagcctgggcaataaagtgagaccccatctctacaaaaaatttaaaaaatcagctaggtgtggtggttcaggcctgtagtcctacctacttgtgaggctaaagcaggaggatcatttgggcataagcccaggagttcgaggctacaatgagctatgatcttgccaccgcactccagcctgggcaacagattaagaccctgtctgaaaaataagcaaataaacaaataaataaataaaaactaaagaatacatataactaaataaaaataaaatattctgtcccagaaaatgaatcctaagaattataaagttttcatattatcactcactcattataggaaagaatggcaatcctcttcctcattgggaaactcagtgcctcaaccattaagagctgaagaaatctcacctatagtggctttgtcagtttctatctctgccagtaagtctccttcacttagcttctcacccacttttttttcccatctctgaactgtgcccatggtcatggtgggagagagggcaggaagaagtacctgcagaaacaaacacatattattgcttaataccaggaagacttctacataataaaagtctggcagacttatgtggtttcatagaatgatggtgactatgataatccaaatactcaccacagcaaaagcttcacacctcaatagcttcccaccaggtaaatcatccttcaaatctcatactctgacccatactcttatactctcgcccacactctaacacacactccaagttaaatgcaacaagcacatgggaaagatttctttcagacagtcaaaattaatttctcaacatctaagtatggagcatcttttcatctatttttatttttatttttattttgagacagagtcttgctctgtcccccaggctggagagcaatggcgcaatctcggctcactgcaacctccacctcctggtttcaagtgattctcctgcctcagcctcccgagtagctggattacaggcgggtgccatcatgcccactaatttttgtatttttgtagagatggggttttaccatgttggccaggctggtctctgaacgcccatccacaagtaatccgcccgccctggcctcccaaagtgctgggattacaggcgtgagccaccgcgcccagacttcatttttttttaaccaagaagtttttcattttcacaaaatgaccttggtccaaaccattctgttaaaattttactgcgctctgtacttagcatctacctattttttacccacaggaaactgcatttgtcccaaccttaccagatatctttccaagataaaaacgtaatattaagaactgttctgtgctcgcttcagcaacacatatactaaaattggaacgatatagagattagcatggcccctgcgcaaggacaacaaattcgtgaagcattccatattaaaaaaaaaaacattatttggtgacaatagttaataacaatgtattgtattcttgtaaattcctgacagtagatttttaagtggcctaaaagataagtctataaagtaatgcatatataaattagctcaatctagccattccacaatatatacatatttcaaaacaacttgttgtatataatatatgtacacagaattcttacacagaattttatttgataatttttttttttttgagatggagtcttactctgttgcccagcctggagtgcagtggcatgatgatcattcaaaaaaataaaacaggaggccaggcacagctgttcacatctgtaatcccagcactttgggaggccaaggatcacttgggaggggcggatcacttgaggccaggagttcaagaccagcctggccatcatggcgaaaccccctcctctgctaaaaataccaaaattagctgggcatggtgacacccacctgtagtcccagctactcaggaggctgaggcatgagaatcgcagaggttgccgtgagccaagatcgtgccactacactccagccatggtgacagagcaagactgtctcaaaaaaaaaaaaaaaaaaaaaaaaaaacaggaaagaccagcatggtggctcatgcctataatctcagcattttggtaggctgatgcaggaggatcacttgagcccaggagttcacgaccagcctgagcaacatgatgtaacctcatctcttaaaaaaaaaaaaaaaaaaaaattagctgggcatggtggcacgtgcctgtagtcacagcgtcttgggaggctgaggtgggaggatggcttgagccaggaggtcaaggctacagtgagctaagattgcaccactgcactccagcctaggtgaagagtgagaccctatctcaaaaaataaaatagctaggtgtggtggtatgtgcatgtattcccagctagtcgggaggctgaggcaggagaatcgcttgaacccaggaggcagaggttgcagtgagccgaaatcatgccactgcactccagcctaggtgatggagtgagaccctgtttcaaaaaataaataaataaaaataaaaaaccaggggtaaaaaaagccctgtttttataatagccatttccaccccaataatatccaaacatcagaatgcctatctaaatgtaaaattgctttactatttatatggcttgtgtatccactgaatttggtttcatttgctatcctctttgtcttctgtatctgattagcaacaggattatgcggagaggaaaataacttcaattgaagatgtttccagagaggggaaagtaagacaagccttagaaaaaaaattgtaagtgctttttttgtgcagaatttgccatcttcatctgcttcttaagaaacagtgaagccaataatctctatacagtatcttaaagaatactatcagagattcagaatccaattcagtatcttaaagaataattaaggtaaaaccctaacacatgcacacaaagctacagacacaaagtagaggaaaattaagtcagtcttacatcatgagatagaatttgccgaacagcatgtaatacatgtgtgaactgaacacctggcaaaaaatcctaaatgattgttactaacagaccatggagtagaacattatttccaaaggagaaaaagattcctatacaaaaatttctacaaataaactagattaaggagaaatgccagtcagaattatttagaaaaggacggctggatttttatccacttttaacatctaaagcacacaaatatacagacgataaccctaatacctaataaactgacttagtttcttagaaactgatttagttagcacaatcaacagtgattacattcactgccttcaactttgatgcaacactattacatatgtgtatcttacacttaacttttgtcagttttctcatttattaatactattggactacttcacccactcttggaaaatagatcaccacatgtcaaaagaacaccaactggggactttcattcaacagacagcacttgacacctatgatacagcttggatgtctgtcccctccaaatctcatgctgaaatatgatccccctgacttccgtttccgggtcagagccatggtggtggcaacttcaagccctgctaaccccatggtgttctttgatgtcagcaatggcagtcaggaagttggccgcacaaagatcgagctctctgcagacgttgtgcctaagacgaccgagaactttgggtagttctgcactagagaattcagaaaagatggggttccaataggatacaaaggaagcactttccacagggtcataaaggatttcatgatttagggtggagattttgttaatggagatggtactggagtcgccagtatttaccaggagacattcgcagacgaaaattttaaacttagacactcagctccaggcctgctttccacggcraacagcggtcccagtacaaatggctgtcagttctttatcacctgctctaagtgtgattggctggatgggaagcatgtaatgtttggaaaaatcactgatggacttctagtgatgagaaagattcagaatgttcccacaggccccaacaataagcccaaactactgtggtgatctcaaagtgcggggagatgtagtccagaccaagactgaattaggccttcccttcttggtggtgttcttgagtaagataatctggactggcccctgtgtttgcttccctgcctgctgctgccccatttgatcaagagaccctggaagtactggagattcagaatccaagactgtgtaaataaagtttttttgtatgtggaaaaaaaaaaaaagaaatatgatccccaatgttagagatggggtctggtggcaggtgtctgggtattggaggaggatccctcgtgaatggcttgctgcatgccccatggtaatgagttaaggggaaatctgattgctataaagagcctggttacccactcccctctgtctcttgttccctctctcatgggacacaccacccttcccctttcccttccaacttccaccatgattgtaagcttcctgtggccacaagagaaacagatgctggcgccctgcttcttgtacagcctgcagaaccttgagccaaatgaaccttttttctttataaattacccagccctaggtatttcttcatgccaaagtaaaacagactaacacagcctgctataaactctaattatacagggaatagatgttagtaaaaatcatcctcaaaatctgtaatgtaatgttcttgaatgaaaagtgccacgcattaccctgtgtactacactgaggctgagaaaggttacaggaactgttcaagttcttataactggaaataacaaccaggaagaatagttgtcaatcttcatgtttaaacctatatactcccaaatgacaagacctaaccacatttaatgtcagtttccaagatgtagtagccatctatgaaaaaaagtgagtaagtaagtaatcacctagagcaaaaactcagaggctgagcctcacctgcatgtgagggggatatgagctaccaggagcctgagcagaaggtgtaggtggcgaagcagtggcagcaggggttggtgctggggccgcttgtggggtaggtgctgctgaggaatccagtgtataatttttaaaggcctcaatatcctcaggcctaaggaagagaaagaatgcataaatataatgggcagattcagctttcacaaaagtagtcttaaaaaatagtctttaactcctaattctcaattctgggtaaaatactccaccaagcaatgaagttccacaaattatgagcgcactactcacttgccaactgtgatacagatgatcgctccgatgggaacatccctggtaccttcagcaacaagtatctttgccatataacactcctccaggctctcaaatccaacagtggctttatcagtttcaaccttttaacacaaaaagcagtagctcaggtttgtactgttggtatgtaatttattagcttgtgtctagaatttttttttttttttttttttttttgagacacagagtctcattctgtcaccaaggctggagtgcagtggtgcaatctcggctcattgcaacctccccctcccaggttcaagcgattatcctgcctcagcctcccgagtagctgggattacaggaacaggctgccatgcccggctgatttttgtatttttagcagagacggggtttcaccatgttggccagcctggcctttgtgtctagaattatacagttcatgtgaagataaggccactacgacagatttcaaagaagaaattactttagaaacgccttggttaaaatcagtttggccagctgctgacaacttatccaaccaatcttgtctaacatcaagttgtgaaaaacacttcagtttcttaaacaaaggggtagctacacatccagaaagtcaatgttcagtcaattaggcaaagccagtctcttcgaactcatctccgttactttaaaacaacttaccctctccctctccctctccgtctccctctccctctccccacggtctccctctccctctctttccacggtctccctctgatgctgagccgaagctggactgtactgctgccttctcggctcactgcaacctccctgcctgattctcctgcctcagcctgctgagtgcctgcgattgcaggcacgcgccgccacgcctgactggttttcgtatttttttggtggagacggggtttcgctgtgttggccgggctggtctccagctcctaaccgcgagtgatccgccagccttggcctcccgaggtgccgggattgcagacggagtctggttcactcagtgctcaatggtgcccaggctggagtgcagtggcgtgatctcggctcgctacaacctccacctcccagccgcctgccttggcctcccaaagtgccgagattgcagcctctgcccggctgccaccccgtctgggaagtgaggagcgtctctgcctggccgcccatcgtctgggacgtgaggagccccactgcctggctgcccagtctggaaagtgaggagcgtctctgcccggctgccatcccatctaggaagtgaggagcgcctctgcccggccgcccatcgtctgagatgtggggagcgcctctgccccgccgccccgtctgggatgtgaggagcgcctctacccggccgcgaccccgtccgggaggtgaggagcgtctcttcccggccgccccgtctgagaagtgaagagaccctccgcctggcaaccgccccgtctgagaagtgaggagcccctccgcccggcagccaccccgtctgagaagtgaggagcccctccgcccggcagccaccccgtctgggaagtgaggagcgtctccgcccggcagccaccccgtccgggagggaggtgggggtcagcccccgccaggccagccgccccgtctgggagggaggtggtggggccagccccccgcccagccagccgccccgtccgggagggaagtgggggggtcagcccccgcctggccagctgccccgcccgggaggtgaggggcgcctctgcccagccgcccctactgggaagtgaggagcccctctgcccggccaccaccctgtctgggaggtgtacccaacagctcattgagaacgggccatgatgacaatggcggttttgtggaatagaaaggggggaaaggtggggaaaagattgagaaatcggatggttgccgtgtctgtgtagaaagaggtagacatgggagacttttcattttgctcggtactaagaaaaattcttatcctgttgatctgtgaccttacccccaaccctgtgctctctgaaacatgtgctgtgtccactcagggttaaatggattaagggcagtgcaagatgtgctttgttaaacagatgcttgaaggcagcatgctccttaagagtcatcaccactccctaatctcaagtacccagggacacaaacactgcggaaggccgcaggatcctctgcctaggaaaaccagagacctttgttcacttgtttatctgctgaccttccctccactattgtcctatgaccctgccaaatccccctctgcgagaaacacccaagaatgatcaataaaaaaaataaataaattaattaaaaaaaaaaaaaaaaacttacctctgcaattaggtcaccttcattgattttgtccccctcttttttttcccaacgggctatggtgcctgcctgcattgtgggggaaagagaaggcaatggaacctggaaaaggaaaagaagaaacattaaaatttttaaggactacctaactctcagtctggcttaagatttcattcaattcaatttcatgcaaagtgtatacagttccattgcacattgggaactagggatgccaagggagttcctgtccatgagaagttagtaatttccagtgacaggctttctcctccacagtcctgtgggtctgacaaagcatgaacctcggcagatattctgcatacagccccagtcttgaagctctcctttcaatgaaatagatcatgagagggacactaaggagctacagcaaagccaactattggacaaagggccaaagcagatactgggaatgggtggaggatcagtgaggcctctcaaggaggatcttgcaggcatccagtcagctctgaaggacaacggggtcccgagaaggggggtctagggctcaccttctgatgcgggggaagactgtaatagcggcggccgggcgaccccaaaagctgcagcagtaagcggttccgcggcgtggccccagaactgggggtccagccgcacagtgcccggaccccgccataccctgtagtcacgctgttgcgacgagcgggagccgggccagatcgcgaggtcactcgtggagttccgggtacctcctgcaaggccgtccaccgagcctcgagtcccgcccatggggctacattctgagcccgtcgcgcacagacgcgccacatagtgccaccaaccccccacaccccaaaaccaacgccgtctccggagtgacctctccaagagcagcggcgttgccgtcagccacaccgcacagccgcacgttgtcgtaaaatggttcccgcaggtttactccacccgctccccaggccagaaatgcgcggcacgcacgctctttctctacggagcggggacgaggggcactacggggcaggagtgttccagaggggcctgtgcgggcgcaagtttgggagaaataacagacggaaaggggtggaaagtggtagggttctaggggaggcatccgaaagggtgagacggggcctaagagatgacaagggcacgaccgagggggaggggcctaaaaaggcgcagagacgcgggttaattgcggccgagtggcctgagagtctgggccgaggggcgtggccaagctttctggaaaagctggaagtgagcccgggaactggctagggcagtgggagcctcaggccaaagggcgggggtcttggagtgctggggtggtgaaggagccaggaatcgcccgcgagggaatcgaggggtccggcgtggtgacctctgcttctgcgcatccgaagggggatggactgggccgcgccccgcgcaggctgtactggttgcaaagatttcgtttcaggtttgtagcccaagtggaaagtggagtgaacaggtgttccacccagccaagtggtaacgaaaggcagcccagaggaagatacattcccgcattcatgtatactgtagcaagattaagcatattccctgtatgaagatataggtttacaaaacaggtgttgctccctaataccatagaattcttttaagtaaccaaaagcttcgttatgtttcaaatgtttgaaaaacttaactgtaagccgttgaaggcatgaagagtgtctgcgtggtccttccatgtagccccagagcttaatatccagtaaatagcgggggctgaatgtatgtcttttgaatcaatgaataaaaagtcatctacacattttgttaggcacgcttctcttgtaaagttgtcttttaattagaaaacatatcgtttctgaactgaaggtgacattagataaggaggaagcatgtgctgtgtatcaccacctcccccctgtagagatggttagagaacaccaagaacgcaagaggaagttggagggaagaaacttaaaacaagattttagccaggagcggtggtgcatgcctgtagtcccagcaatgcttgagaggctgaggtgggggaatcacttgagcccaagagtttgagaccagcctgggcaacataatgagactcccatctgttaaaaaaaaaaaaaaatgggggctaatcttgctaacaattaatttggaaaactaaaacagattggatgtactatttcatgcctacttaaattggaatgtttaagcaggtacagctgtctatcagaataatatgtaagcaatataattgagaaatataaaatttctagattgaatgaaaaggcatattttaaataatatgaagagagcaattatattgttacaattatgtacaacttatgaattaacaattggaagaagcaatgaaagaataattgtaattactgaaaggacttattactattatttggggatggagtctcactctgtcgcccaggctggagtgcagtggcatgatcccggctcactgcaacctccacctcccaggttcaagcgattctcctgcctcagcctcccgagtgctgggattacagg

SEQ ID NO: 96422 - DNA, 44506 bp, Homo sapiens
ttgtcttctaaaatgaacaattcaaatatagttataaaatggagtatttattttgtacttttaaaaaatggtttaaggtgaggctttgtttattcctaatatgtgaataatactgatgtgaaaaatgtgagtcccagcactttgggaggccagggcgggcggatcacgaggtcaggagatcgagaccatcgtggctaacacggtgaaaccccatctctactaaaaatacaaaaaattagccaggcgtggtggcgggcccctgtagtcccagctacttgggaggctgaggcaggagaatggcgtgaacccagaaggcggagcttgcagtgagccgagatcagatcacgacactgcactccagcctgggcgacagagcgagactctgtctcaaaaaaaaaaaaaaaaaaaaagaaaaatgtggggttgaagtagagaactgtatttaatattttgtgtagcctcggttgtagagtaaaagataataaagggcagcttttcttttttttgaatgtttgtgaatcaagtgactgaagctgttacaggaataattagataacacttattcttcatggtgtatcagttaatatctgtgttcatatgccaaccccacctcttgctaagtatatagctgtggataaattactaaatttctctcagtctcacttttcttatgtttaaaatcagagtaattaacatgaagatgttgtgaaaattaaataatatttagtctttacattgtgcctggaacataatactctaaattgttaactattatgatgttattgtttcacctttctatagcacttacttgagagagttttctttgctactgtagcttaagattctgaatttactacaaagtgatggggatgtgaaagattgtttcatggttaaatttattttctggcttgaaagtctgaaaaatcaagttttagaaaatggtatttaataatcatgccttctaatttaagagaactcttttattttaaagaaatgaccatattttaattgatatgttttttcaggggtagtaaaaagaatcattcctgcagtagcttccacaaatgcagtcattgcaggtgaggaagaaaaggccatcacttagtttattttgctttctttagtttttgacgttgctgcagcttttttgtgttgtaggaatttgatatcttcttggatgggttgtgtaactaagctgtcgaaaaagaaccagttattagactttgcatattttttgtcttacattatgtcttaagttacctgcagtaaagagatgttttagttccatatgaagcaggccatttattaatctgataaacaagaaaaacatgtagtgttactctattacatgaatcacacaaaacaatgtaaaatttgttactgtctcagtttttaaaaattggaatatgtattttttaatgaagagccaatgtaaatttatctgttctgatttataactgacttttaacatgcctaatttccattgagttaaagcacctgtattttctcctcccttcagctgtgtgtgccactgaggtttttaaaatagccacaaggtaataggtttcatttttaatatgcatgtaaatttatgttttgacttggtttaattatataaagatgaacattttttcattacagtgcatacattcccttgaataattacttggtgtttaatgatgtagatgggctgtatacatacacatttgaagcagaaagaaaggttagtagtattaagaacacatttttgatcatgcatattttgatttttaaatattattggttagaaatttgaacaaagtcacccatacattttctaacttccagaactctacttattatatatcttttgctttatagcctgaaataactctatagcgaagtaatttacaagaaatggtctattatgaaaagcaggctttaaagcataaaaatttttttataggaaatatgcatgattataaaacaacctgatttttattttattgttcataaaagagactaatattggtgcatgtgctgctgtaatttgttgtgtattatgtgtgtaggaaaactgcccagcttgtagccagcttcctcaaaatattcagttttctccatcagctaaactacaggaggttttggattatctaaccaatagtgcttctctgtaagtattgtagatttttgttatgttgtaaaaatcatttttgtgatttttgaaaccttaaaaaaattatcttttgataaaaattatgtttgatacttctctctcatcataatctttaggcaaatgaaatctccagccatcacagccaccctagagggaaaaaatagaacactttacttacaggttatcaatgtgtattttaaatttttttcagaaaattatatcaagttttattttactttaatgtgtcttacattaaagtaattttgttttctagtcggtaacctctattgaagaacgaacaaggccaaatctctccaaaacattgaaaggtattttacataagggtatttactaatcattttctttcttttctctctttttggtgaaagtaatcagtgcttgttctagatttcctcttaatgccttgtatatggtcaggtaataattacttacaactttagacatattaatagaattaattgctcttttagtagaatattttaaaatctctaagaaatcaaatattactttgattaaagaggattggattttgatgtttttctagaccgtaatactctatagtttgtttacatgtgtattatcctttctgttgagttttttttgcttgtattaattatattttttctgttttagaattggggcttgttgatggacaagaactggcggttgctgatgtcaccaccccacagactgtactattcaaacttcattttacttcttaaggaaaatctccacataatagaaaactcatggaaataatatactttgtggatgctaagaagttgaatcgatgtcatttttagcaatagtgttgccacgatttgtctttttttatataatgaaccactcttttttaactttgtaaccttcccttgaagacagaattttggtgttggtgcttgtaagcattttcattaataatatgagaaatgatacctggagagagagattatgagcaaatgtattgcttcttttagaggaggaagcatacaacctcttttgtgtgaattttgttattatggtcaaagaatgcattcctaagttttcatttgagtacccaaatacacaaaaggtgtccctttaaggaaaataaagaattaagttttaaataacattacattttacaatctgacatctggagtatattgaacataggctatttcttgatataacactcatttaattgtggccatccaaatgaatattattgcagaatttatcttgttcataatgatttgtaaatggtgttatagctgaatacctgtgcatgaaaatgggcaatattttcatctgtttacttgtagtgccatagaggccaatatgcacaatattaactaatgccaagacatggctgtttaaaaaatttaatgttcaaacagttatcactgatgcttttgcactatttattaataaaatcatatattgtgtacttctttcactgaagtttttaaaagtacattaagggtaatcagtagttccatggtaatataggaataatttttaaatgtgtagcagagttatatcaaatttttattgcacttaatacttttgctacagcaatttctatagtaaaaatttactggtttaatttaactttctgtatcaatataattttttttttttttttttttgcgacagagtttcgctcttgttgcccaggctggagtgcgatgatgcaacctcagctcactgcaacctctgcctccccggttcaggcaattctcctgcctcagcctccggagtaactgggattacaggcgcctgccaccatgcacggctaattttttgtatttttagtagggacggggtttcaccacgttggccaggctggtctcaaactcctgacctcaggtgatccacccccccccgcccccctcggcttcccaaagtgctgggattacaggcatgagccaccatgcctgaccatgtttttgtttcttttaagtgaataaaacttcaaacaaaattaagtacaaatactaaaaaagtaggtgctagtattttaatatgagaacatgtatgtgttctcattctttgtttttgacttagatatggcagttttctgttcaaatgttttttggttacttatgtgtcactgagttaagttttcagtaatctttctagctacatattgacaaataagttttattataaaaccatacggaataaatttataagctctacctgaaaagttacaggtgtagcttacaattttgaaagtgaaggaactaaaatttagcaccatataggtgctataataattctcaaagtagcattgtaagaaggtgactctatctgagagctgaataaatagttttagatggtttaggtaggtcatttcaccaaagctgtacaattagaagtcttggaactgtaactgtacagctaatttcaacccgaatctgccccaaatctcctctgcagactacttagctgtttgaaagtacttgagttacttggtactacttgtgtacatgactaaattgttagttttaacatgcaagtttttactgtagttagataaaattattggaagatgattataacttcttaaggggttcaatctgattttttaaaagaaaaataattcttttttgcagagttccttgcagtggggtaaaatattcaaatatgggaggcaggcatataaggtaaataatcacagcagggagggtgtaataggatgagtgataggggtctgtggcaaactggagtgagtgaaaattatttggtgaccactctggctgactattcccatgcttggtattcatatttttcaaaagcagctggaaatctagatttttgaatgaaatctggcttttagttaggattttgtctttaacttgggcccaaaccaaatatagctgcagactggattaggaaggccaccaatttaaggtattttcccatgtccaaatgttcgaagagaatgcacacagaaaaggttatgttttaagtaatatgcacagtgcacattgttaggataacagctttagtgcttcctaggtgtcttagtccatttggactgctgtaacaaattgccataaactgggtggcttataagcagtagcaatttgtttcttaacagttctagaggctgagaagtccaagataaggagccggcagatttggtgtctggtgagggctgctattctggcttagagttggtgccttcttgccgtgagctcccttgggcctctcttataagggcactaaccccatttatgagggctccatcatcatctaatcatctcctaaaggctccccttaatactgtcccattggagattaggtttcaacataggaatttgtgcaggggacaccgacagaccacagtattaggggtattttgactgcagcaatgagtttactactattttgagagagaggttgtgctttatgcaccatgtgttccacgagttggacacagtgttcatacgtgatcctgtcttttaggcaagcccaaacaagtgtttctccttacaataccaagttaatacagagcttattaaatatttgagacaaagggctaagagaagtgtgaggcccaatttccctttgcaattattgctggcaaggtgcaagcttttagcacgtgaactattttcctggaaagcacacacacgaaaacttgaatattccttccggggaaatcgacctctatcggtagccatagcttccccttcgctaagaactgctgtaagcacgaaatcgacatcaatagaaacccttccgcgttcctcggtaactaacggcaaccctgcgctcccggatgtgacgtcaacgttcttctgttcttccgtctgtcgaccgaactctgggctcgtagatttggttgctgtgtacgtggaagaagcaagcgcatgcgcacatgggcccccttcgtctcagctgtgcgggaacggccgagggtaacatcccgggctcgcgggaggctgtcggggtaatggccacacgctgacagaaccagccgagtggaaaaggggagcgaagccgttcctctgcacccttccccaggcctgaggccttcccgcttggtgctgccgccgccactgccggctgaggaggggcgatgagttggttcaacgcctcccagctctccagcttcgctaagcaggccctgtcccaggcccagaagtctattgacagggttctggacatccaggaagaggagccgagcatctgggccgagaccattccgtatggagagccgggtaagagagagaggagcggggttcctggctcccggaggctgctgttctcttgatgcaggcaggttaagtggtgtagagaggggtccttccttgctgagagagytttcaggaagtaatttctcccyggcccgttccctaatgctgcttcagcctccaagtcggtctttgctgttttcctgagggaaaacccagatccaggttccccyttgtctttctttggtcctgggtgcgaggcttgtggacttggatgacaggggacttggttggttggtcttgccctcaagctctccctcgacgcagcttccaagcacaaccttcccgaacctgaacctcgaattgcttcgcgtctcgggcactgttgggatccaaggtctgaagtacgtaaatcatcagggaagggaagaacaatcgctaacagtcagtgaacatttcgcgcttggtagcgcgtaatgtggttttatgttgttgttgagacggagtctcactccgtcgcccaggctggagtgcagtggcgcgatctcggctcactgcaacctccgcctcccaggttctagcgattctccttccccagcctccctagtagctgggattacaggcgcccaccaccacgcccggcaactttttgtatttttagtagggacggggtttcactatgttggccaggctggtggaactcctgacttaaggcgatccacccacctcggcctcctaaagtgctgggattacaggcacgagcctgtaatgtgcttttttatggccttctcatcttcagaacaactcccagagagagcttggtttatatccgtgttttacataagaggaaaatgaggcccagaatggccaagtaacttgctctaggtcacacggcggaggaggattagaatgtgccggaggtattagccggaaaatgtgtgacccaagatttctggatggtatcacattttatttctgaatagccaagtctctctttgcagtttcattgagcttaatctttcagggatcttcattcagttgcttttgactcttaagtctaaggaacagttcagcatttgatgtgtggggtaaagatttgctggtgttgggggatgtgaacctttgtgtgaaaaaggataagagatgtacttgactactcctttctggtttctgttcttaattttacrtcattgaaaagtcaggacctaaatttgaggtacctcagtttaagatattttggtccatgtgtgtatgtgatgatcctctttactttttacaagatgtcatataaccttgctggagtaactctgttttttcatatgtgccccagttaattagaattactaaactttagataagatagaatataggttttayatataaggatatttgttttcggaaaatgcccatagtcttcagaatggtataatttagatggataccaaataaccctgggattatataaagtattctccaagaggcaaaattaattcctgtcatcttttgaatgtatttaaattaatcagacataatcttggttgttcatttgcatatttaattttgattttctctggtttggatattgtgcaaatgaatgtgtagaactatgcctccaaactgaagttttctacatacttttcatcctaactgcctttgaagtcatacatatatttacatatatatatatttgtttttttgttttttttttttttgagacacagtctcactctgtcatccaggctggagtgcagtggtgccatctctgttcactgcagattctgtctcctgagctcaagtgattctcgtgcctcaacctcccgagtagctgggattgcaggtttgcgtcaccacacctgcctaatttttgtaattttagtagagacagggttttaccatgttggccaggctggtcttgaactcctgacctcaggtggtccgcccgcctcggcctcccaaagtgctgagattacaagcgtgagccactgcgcctggcctgaagtcatattaaaggatagattctactataaggcttgatagtttttagaagcttttagttacttgtgctctctccaccaacttctaattgtgaatattttgtgaatattttgttcagccacattttaatttgaaaaagaaaacatttttaaagaaatgctttaaatactttaacgaatataccatttttaagatcctgattatgccatttttaaaaatcaggattttagtagtagctatttgtatgactgatatgataattaactttttccccaagaaaacagtcattttctttgtagcgcttttttaaaaaccctagtgtcaaccacctctatgtcaaagagcaatagttcttaaaaaaacacacatttctgaaatttataatgaccttgtaatttctgacataatttagaatttgagaacaaaacttcctcttagagtgggcttggagagtgggatttagagaatcagcctgtgattaagtggatgaaaatgaatttgttctctagaacttaccattcccatcagtttaatatgatcttcgggaaagaacatttgtcaccattatcttggtttgaggcttttgttgttttgtttgttttcgagacaggttctcgatctgtcacccaggctgaagtgcagtggtttgatcatggctcactgcagcttccacctcctgggctcagatgatcytcccacctcagcctcctgagtagctgggaccacatatgtgggccaccaggcccagctaattaaaaaaatttttttgtagggacaggggtctcactatgttgcccaggcttgtcttgaactcctggactcaaatgactcttctagtgttgggattataggtgtgaacctccatacccactgagttcagtttttgagtgttgccctttgtctagctcataactatattactgatattacaagtaaaaattaatatgaaactgactgaataggtagggtcatttttctgtgactgcacatggcccaacctattcagttagttccatattagtttatttcatattgataagtaaagcgtgttattatgagatgaatcataggtatcttggacttactgtgggttataaaacatatactgttacttccttaatttgttgtggggaggaataacatactcgcatctggtagtccaggccaggcccagtcttttgtctgtgctcctccttcctctcaggtggacccacaccagttttcttccgtaagtccctgtattaacttggaaactacttaatgatgtagtaagcaaggagtttagcaggtgcaaattacaggtatttcatagggtattttttctaaatttatatttatactgatttataatgatgattgaaatattaatgtaacatatatgtgttcttttttaatatttacttttttgttaaaggaataagttcccctgtcagtggaggatgggatacttcaacctgggggttgaaatcaaacactgaacctcagagtccaccaatagcctctcctaaagcaatcacaaagccagttcggaggactgtggtcgatgaatctgaaaatttcttcagtgcctttctctcgccaactgatgtccagaccattcagaagagtccagtggtatcaaaacctccagcaaaatcacaacgaccagaagaagaagtgaaaagcagcttacatgaatccttgcacattggccagtcaagaactcctgaaacaactgaatcacaagtaaaagactcttctttgtgtgtttcaggggaaactctggcagcaggtacttcatcacctaaaactgaaggcaagcacgaagaaactgttaataaagaatcggatatgaaggtgccaactgtaagtttgaaagtatctgaaagtgtaattgatgtgaaaacaactatggaaagtatatctaatacgtctacgcagtctctcacagcagaaacaaaggacatagctttggaacctaaggaacaaaaacatgaagacaggcagagcaatacaccttctcctcctgttagtaccttttcatcaggtacttctaccaccagtgatattgaagttttagatcatgaaagtgtaataagtgagagctcagcgagctcsagacaagagactacagattcaaaatcaagtcttcacttgatgcagacatcttttcagcttctctctgcatctgcttgtcctgaatataatcgtttagatgatttccaaaaactcactgagagttgctgttcatctgatgcttttgaaagaatagactcatttagtgtacagtcattagatagccggagtgtaagtgaaatcaattcagatgatgaattgtcaggcaagggatatgctttagtgcctattatagttaattcttcaactccaaagtctaaaacagttgaatctgctgaaggaaaatctgaagaagtaaatgaaacattagttatacccactgaggaagcagaaatggaagaaagtggacgaagtgcaactcctgttaactgtgaacagcctgatatcttggtttcttcyacaccaataaatgaaggacagactgtgttagacaaggtggctgagsagtgtgaacctgctgaaagtcagccagaagcactttctgagaaggaagatgtttrcaaggtaactctagtaagtggaagggatttttagatgtgctttttggagattaaatcatttgttttaaaaaatactttcattgatgcataataatttatacagatttaaaaacatacgcattttgccatttctgtgtagcattaagtaccttgaagttgaacaattattaatataatttggaatttctccaaggcaattatggtagaataagttgatacttcaatacagttaagcatgaaagttttcatcttacatctttatttttgagtccttatcacttcaaaattctgttatgcttattagtatgtcaatttgaaaggaatattttcttacattaacatgtatcttcacctcctttgcagatagatgtgccaaaaaaactaaatgttatggtttttcttgtatcagaatttgtttttacatgtttacattatttgtagcaaatattaaatgataatttaagattttaattattggtgcttttctgttattagtattttcattcatatataaggagtatatatccttatattgcttcagtttgttttctgcttatgttatttttgagatctcctattgatagctatatttcacatgaacgagaaagagaaatgtctaaggaacaaaagcattgcttaggagggacagattgcttctacctaatacatgtgaaaggaaagtgatataaattctttgacattaagtcctagttttggtttttactgtgacttttagatatacaaatttagttggatctggtatctttaatagacttctgagatgtaggatgtcttgaagaaatgtcctgtaagtgccatgtattgaattacttaattttttwaaaaagtgccagattctgttaatcaggttaaatattcacaaacaaaatgctgtgcaataatatttcaattagtaatagctatatactgtaagatatataataggagtttgaattcttagaaaccagcactaattactatcagatatttttgaatttcagtgtatttaagaaggtaagtgatttctaagttcatctaaaccaaactcaggtaagactttatttttttgagtccaaaaaggaacccttcctactccttttatactcaagtttatcaccatttgagtaggacctaaggaattagacattccaagcattactttttgtttagctttatactgatacattatggagatttaaaaattcttatgggttttctaaaattacttttagtgtggatggatgtatgtatgaatgagacagggtctctctctattgtccaggctagcgtgcagtggtgcgatcgcggctcacagggtctctctttgttgctcaggctggtgtgcagtggtgcgatcatggctcacggcagccttgacctcctgggctcaagcagtcctcccacctaatccgctctagtagctgggaccataggctcgcaccacgcctggctatttttttgatttttagtagagatgaggtctcactatgctgccaggctggtcttgaactcctgggctcaagcggtcttcccatcttggcctcccacagtgctgggattataagcatgaacccgtgtccagccctacttttattttattttatttatttattttttgagrcggagtcttgccctgttgcccaggctagtctgcctcccaggttcaagtgattcttctgcctcagcctcccaagtagctgggactacagacgtatgctaccatgcctggctaatttttgtattttttgtagagatggggtttcaccgtgttggtcaggctggtcttgaactcctgacctcaagtgatctgccctcctcagcctaccaaagtgctgggattacaggcatgagccaccatgcccggcctctacttttatttatttatttatttttactttttgagatggagtttcactcttgtcacccaggctggagtgcaagatcattgcagaatcttggctcactgcaacctccacctcctgggttcaagcgattctccagcctcagcctcctgagtagctgggattacaggtgcctgccaccatgcccagctaatttttgtattttcagtagagactggttttcaccgtgttggccaggctgctctcaaattcctgacctcaggtgatccccccacctcagcctcccaaagtgctgggattacaggcatgagccactgcgcctggcctacttttattttttaaatgcaatatgtcatattttaaaaagggtatgtgtttcgggtaaagaataatacagaaaatagacacttgtgtatccaccacctagctaaaatatagaggctttaaatttcctctttgacctcttttgattgcatccatctcccttcttcttttggtgtgtatgcagattattccagatttttgctattaccaggaagctacataaagtattcttatacatgtcgcctagtgcatttatgcaagaattttctcctctaaggtatacctaaaagtgaaattttctatatcaaagagtatgtagatccccaactagrtattgcctaattgttttctcaaggggtttctcaacttacactcccactagctatttggttgtatttacttttactctcctctcagctgcctaagagttcttcttgttctggatcttctgtgttcctaatactgttcttgattgtttttatgagataaagctgttttctttgttayagtgatacacctgcatgtaaaaatggtcttttttaaagctaagygttctgacttttatgtattcgccttatccagacagttgaatttctgaatgaaaagctggaaaaaagggaggctcagttattatctcttagtaaggaaaaagcacttctagaagaagcttttgataacctgaaagagtaagtattctgcaaatgtgaataatgttacacattttctggaarcctgtatactttgtacatatttaagaatgtttttgaaattaaaatgttttgtaattttatcattattgaaagttgtatagctttcaattataaccctaaagattacttttctcttttgattgtctttaccctttgccattgaagagagtcattttgcaaaactggaaaactctttcctttcgtttttagtcttttagtattagagayttaaaacgtatttraagaaaactgtgttaatcaataacacagttgtgctataaggagctgattgggaaaatgtgatacaagaagattcagaattgaaacattgtatttactcttctcttatttttacatgtcagatattggtgacattttctctttctaacagattttctttgaggtgttttaaaataaatttaacaagggaaatttcctttttttttcttaaaagttaataggcctaaaactgttctattttaataaggtatatgtcagagaaaagttatcttccttttgagaattgaactcatgtatacctttgggatatatagacaccatcctcattctcaaatattattttaaatttagtgaaatgttcagagtgaaagaagaaagcagtagcatttcttccttgaaagatgagtttactcaaagaattgcagaagcagaaaagaaagttcaactagcctgcaaagagagagatgctgctaaaaaggtaattgaaatttaaagtaatattaattaaactctatagagatatagatttttgaggagtgcattcatcgtattttgatattggaaaaaagagaagtaaggtgaaaaggatatcatctattaacatttaaattgtagatttttggccacgtgtggtggctcatgtctataatcccagcacactgggaggctgaagtgggcggatcacttgagcccaggagttagagagcagcctgggtaacatggtgagaccctgcctctactaaaaaatacataaagttagctggtcatgctggtgtgcgcctgtggtcacagctactcaggaggccgaagagggtggatcgcttgagcccaggagttcaagaccagcctgggcaacatggcgagacctcatctctacaaaaaatacaaagattagctggccatggtggtacatgcgtgtggtcccaactactcgggaagctgaggtgggaggatcacctgagcctgggaggttgaggctgtggtgagtcgtcattgtaccactactccagcctgggtgacagagtaagaccctgtctcaaaaaataaaaataaaaatgaaaaggaaagttaatttattctcatttatattttcatattaacacttgcttgtatatctgaatttaggttttgaatatcattttcaaagttgttttcttagtcttagttaaccaaggtagtagattaactgaacaaaacttacagattcttattgcaaatgtgattatggacagcttctttggatgggggagaaatgagaactgtacttagagtgaaagtcattctttacggtattcacagatttcttttttattaggaaatcaaaaacataaaagaagaacttgccactagattaaatagtagtgaaactgcagaccttttgaaagagaaagatgagcagatccgagggttaatggaagaaggtgcgtatagtatttggttgactatgaaaaatactgtaagaacaggaaaagtacttgccacataactagctgatgcttcctaattaaaaatactgaaagcaaggagggtttggacgtaaaccatagaaataggtgacagtttatggaagaatgaggaataagatatattgagacagagatacgtgtttctagcttttgttttttggaagtaaaaagaaaagtaagtccctgtaaaatagacrgaaatttgtgctgccctaagaaaactttaaacaggtcttaagagcctgtcatttaaaccaagacattcaaagtgtataactctgggatttatgtaatatctgaatacctagcttaagtactgtatgatattgtctttttctgacatttgatagtgaatttttcattgtattaatttttaaattattaagcacttttgtctctgaaaagatttaaaataaacagggttggctgagtgtggtggcttatgactgtaatctcagcacttggggaggcagaggtgggtggatcatttaaggtcaggagttcgagacaagcctggccaacatggtgaaaccccgtctctactaaaaatacaaaaattagccgggtggtggtggtgcgtgcctctaatcccagctactcaggaggctgaggcaggaggattgcttgagcctgggaggtggaggttgcagtgagccaagatcacgccactgtactgcagcctgggcgacagagtgagactttgtatcaaaaaaataaataaataaaataaaattaatagcattacagaaattaaagatctattcatgaaataaatcattacaaatggatactgaattaatttcttcatgtaatatcctgggagagaggagcctttggaaaacgtggtcaagtgaatctctctttttatttctcttgttaattaaagtttttgtagttataagagtaatacttgctacttgtagaaagttttgaagttataggaaagtatatgaataaagaggaaaagtagattataatccaatattataaggaactattaattttttctagttttaatgtattttttaatgcatttttaaacatatttaagatcatatatttaatttccaatcttccttctcttacatctctctatgccattaaatgctttttatcattattagtggctgtattaaagtccattatatgggtataccataatatgttttactatttctagtgttgtacatttatttttataatgttaataatatagttagtggtaggatgaatgtttttgtgcttaaatcactgaacttaagtaaatttccagagaaagggtagcgtttgagaacagttggaagcagtcatttcatttgaaagttagctttatccaactttttcatttattcaactaatatttattgaacggttagtatgtcagatactatgtttgatacaataataagtatgacactctgtcctttaggggcttagttcagtgagagggaaatataggaacacagataatgataaaacacaattctaagcactaaaatagaaaaatgaaggaactgttgttataattattttctcaagatgtcttgaagtcattaactgccttgccttacaatatcagagactgaggggaaggctaactgcatggttttcttattttaaaagagttatttgaaatattaatatcgaatgttattattttgtaatttaataattttgtcagagaatgaactgatgtcttcttttgcttaatgaacctttttacagagaaaatagagcaatttcacatgggagtattttatattcacagagtatttacatttcacaaaagggtattatatattgtttccgcgtgccccagaaaaattttttttttttttttgaaacagagtctcactgtgttgtccaggctggagtacagtggcatgatcccggctcactgcaacctccgcctcccaggttcaagcaattctcctgcctcagcctcccgaatagctgagactatagctacctgccaccacgcctagctagtttttgtatttttagtagagatggggtttcaccatgttggccaggctggtcttgaactcctgacctctggtgatccgcctgcttcccaaaagtgctgggattacaggcgtgagccactgcacccggccagtatttttaaaacttaaagctaaagagctgtaaaactcaaagctgaaagcacactacaatgaatacctgattacttcatcacctagattcatcaggtgttaacatcttgccacaactcttccatatctttctgcacatacatacactacccttttgtcaactcatttgaaaggaggttacaaataccgtaacattctgctcctaaattcttcagtctacatctcccaagggcaagtacgttttccttgacaggtacatcatagtcaaacctaagaaatcagcattaattcagaagtgtaatccagcatatattttaatattaatcctagttgtctctaaaagtgtctgttataattgatcatttgttctgccccaggatccaaagtttgcccattgcatttgattgttatgtccttttagtcttccatcagtctaggacagttctctcttctttatgtctttgaggactctgtagagtctagggcagttgtcccacaggatgtcccacccatgttcgggaatttgttactttcttcatgatgagatttaaattagatttagttcatatttctagtaggaaatatctgggtgatattgaacaactatatcacatcagcagacacatattgtcaggctgtactacaattggtgatgccaaaactgaatgcttagttaaggagttgactgccagatttttctctttaaaattagtaggtgatatatgagagtgattctttaagaccgtgtcaatatccagttcccaacaaccttttacccaataattttaacattcattgatgattgctgtccaaattagttgtaacattgtgggttacaaaattgtaatttaaaaaaattctgttcttttatgttactattagataaaacattctattgagatttttagggaatagttatcatttgagtttatacttctttaccatcaccaggagaaaaactttcaaaacagcagctgcacaattctaacatcatcaagaaattaagagctaaagacaaggagaatgaaaatatggttgcaaagctgaacaaaaaagttaaagagctagaagaggagttgcagcatttgaaacaggtgaatagcaatcataattctctacatatatattgttattacttcctgtatgaacagttggccatggttatggagcatttgaaaagatttaatggggtatatcatgtaagaaggatttttcaaacaatagataaatgataagattttttagccgagtggggtggctcacgcctgtaatcccaacactttcggaggctgcgacaggcagatcacttgaggccaggagtttgagatcagcccggtcaacaaggcgaaaccctgtctctgctaaaaatactgcaccaacctaatacaaaaattagccgggcgtggtggtgcacatctgtagtcccagctacttgggaggctaaggcacgaaaattgcctgaagctgggaggcagaggttgcagtgagccagaacattccaccctgggcaatagagcgagactttgtctcaaaaaaatatatatttttctccattattatagattcctggaatacagttatttaccatggtattatttcttgaaaaatacttttgtctgtttttataacatataggtccttgatggcaaagaagaggttgagaaacaacatagagaaaatattaaaaaactaaattccatggtagaacgccaagagaaagatcttggccgtcttcaggtagacatggatgaacttgaagaaaagaaccgaagtattcaggctgccctggatagtgcatacaagtaagaaaatgaacaaatatgcaacccatttagaatgaattatcagagtaggatgttgaagaaatactttttctattatctgatcactggcaacatttataaactcaatctaattttttaagagaacttactgatcttcacaaagccaatgctgcaaaggatagtgaggcacrggaagctgctctgagcygtgaaatgaaagctaaagaagaactttctgcagcattagagaaggcccaagaagaagcccgtcagcagcaagaaacattagccattcaagtaagcaatggatgatgaattagagtagttttaaaaatatttgtttatgcttctacaaattaaacaattagctggtttgaatcaaacaatgtagtgatacatgtgttagatttcagagtactggattctgctaaatttaaccagttgtgttttttaaaactgttaaagtaatgcttacgtgataccagtattgtttaatttttttgagttttagacccatttgagagtattataaaagctaggaaccctcttagaagagaagagcaaaaatgcacatacatattgcatataattttgagagamtccatttaactcctgagctcattcataacatctgtgggagtccaaggacctcagatgaagtaggaaaaacaaaatttgtgaggctttgtcttatcaaatcatcagttgatgggcatatgggttatttatactttgtggttattatcaataatgctgctttaaatatccatgcacaaatttttgtgtgaacatatattttaaattctcctagatatatatccttaggtcatatggtaactctatatatttaactttttgaggaactggcaaacttttccacagtggctgcattactttacattcccaccagcaataggtgagggtttcagtttctccacatccttgccaagatttattattgtctgtttttaaaagtatagcctttttagtgtgtgtgaagtggtaactgagtatggtgttgatttgcatttttttttttcaatttatatatattttttgagacagagtctcactcttgccagactggagcacagtggcacgatctcagctcactgcaacctctgcctcccggattcaagcaattcttctgcctcagcctcctgagtagctgggactacaggcaggtgctaccatgcctggctaattttctttttttgtgagacagagtttcgctcttgttgcccaggctggagtgcaatagcgcaatctcggctcattgcaacctccacctcccaggtgcaagtgattctcctgcttcagcctcccgagtagctgggattacaggtgcccaccaccatgcccggctaatttttgtttttttttagtagagacgaggcttcaccatgttggccaggctggtgttgaactcctgacctctggtgatccacccgcctccgcctcccaaagtgcttggattacaggcatgagccaccatgcccggccaccctgctaatttttttttgtatttttagtagacacggggtttcagcgtgttagccaggatggtctcaatctcctgacctcgtgatccgcctgccttggcctcccaaagtgcggggattacaggcgtgagccactacgcccggctgatttgcattctcttaatgactaatgatgttggatgtcttttcatttgcttattggccatttatgtatcttcttgggagaaattaattaaaatattcaaatcctttgcacatttttaaattgggcggtttgtctttttattgttattatgagttctttgtataatctgcatactagacctttatcagatataggatttgtcaatattttgtgcctctctgtgggttgtctttctttttcttgatagtgtcctttgatgccaaaaggttttaattttaacaaagtctagcttatctatgttttcttttgttatttgtgcttttggcatcatatttaagaaaccattgcttaatccaagtttatgcagatcttcatcagttttcttctaagagttttgtagtcttagctctcacatttaggtcttttgcatgtggatatccagttgttgcaggaccagttgttgagaaaactatttttattgactcctatgcccttttgatttaattttaagttttgtatgtgtaaaacatttacatgattccaaagtgagagcaaaatctattcagacatttacttccaatttagctgctccccatttcctctctttgcctgtaggtaaccattttattagagtttggcttatcttttcagtgtttctattggcaaaatgcaagaaaatatatgtatctatatacttacatgttctgcgtacatacacattcgcttatacacctatttctgtctcctacatcctttttacataaatgacagtttattattcacactgttttataacttgttttattttcttagtaaaatatcctgatgatcactctagtaaaacatagaggtttttaaaaaatatctttttacagttttataatacttcattaggtgaaggattttcagctctttcttattgatagattatacacctatttctatctcctacatcctttttacgtaaatgatagtttattgtttatactgttttataacttgttttatttacttagtaaaatatcctgatgatcactctagtaaaacatagaggtttttaaaaaatatctctttacagttttataatactttattaggtgaagtattttcagctatttcttattgatggatatttgggttattttcagtattttgctattataagtcatgccatggtccatatatcctttgtgtttctgctgggatagataaaatatcagtaatttaaatttaaaatacgttagaataataataatacagaaaaattgggggaatgggagatagagcatatatgagttaccatgcataaatccatcactttttccaagtactgtcagttttgtgtgttagtgtttcattctattcccatatatgtgtttttcataattgatgtcttacgtgttattttatagtttttccatttaatagtatattagaaattttttttacatgttttatacatttattgtaatttttaatggttatattcatgttgtatcgacatttgcaactatagattactagtgatggagatttagaatatttccagttttgtttttgctagcctatttaatactgtagggaatatccctgtgtatttacgtatctgctttcttagagtgaattcccaagactaggatggcccggtgaaaggatgtgagaagtttgatgattctttaaacatattataatgttttccaaaaaggctatggtagtttataatgtatgctcctgcatatgagtggagcccccagcttttataatccgtatagcacctatcactttctgtgtgatgtggcaaatatttatagacgcactgtcttttctccaatattgtatggtaatggctatgccttatacatatttgtttgygtttctttgccttaacagaatgcttttctaagtaaacattgaatatacatacagttttrgaattgcttgatgaatgagagatgtgataatcatatgtaaaagttcattggagagtatgaaatagtatacatgaacaatgttgacacaacacaaaatatgtagttagtgggaagttatagataataytgtaccattgtttgtgaatgtattgtttctcctcctacaggtgggggaccttaggcttgcattgcagcgtacagaacaagcggctgccagaaaggaggattatttacgccatgagatcggtgaacttcagcaggtactgtcacagktttccaaaacacaaatccaagaagtatgtgtttttctagaaataaaagaattcctcagtgggatagtgttcatggaattgagaggattactgtcacacstagcatttgctgaatttttgtggcttgtgtgaataaatcagagtgggcaccttaaaaattatacaaggaaattccttattttgttttatagaaaataatgttatgatagatttgttatatgtattcagtattgcttttccatttgtaatcgcttattaatgattgtcagtctttgattactgtgggacaggtaatagttcccggtttctatgcctctgttaattttcagtcatttataacatgcagaggaaaagggagagaaaatacaatttaggttgatttttcagtttttataaatacttagaaatatttggatgaggaggtaactactaagaggtttggatgaactcttttttaaccttcaggtaattgaagactatcttagaaacgctttttaaagaagcacttatttatttatttatttaatttctttattttgagacagagtcttgctctgttgcccaggcaggagtgcagtggcacaatcttggctcactgcaccctctgcctcctgggttcaagcgattctcctgcctcagcctcccaagtagctgggattacaggcgtgcaccaccatgcccagctaatttttgtatttttagtagagatgaggtttcaccatgttggccaggctggtcttgaactcctgacttcaggtgatccacccacctcagcctcccaaagtgctgggattacacacatgagccaccgtgcctggccaaagaagtacttatttagatactgtattacacaatctaactctcttggaaggattgaacagttagaaaaataattaagggctgggcatggtggttcatgcctataatcccaatgctttgggaggctgaggcagtcagattgcctgctcaggagttcgaggccagcccgagcaacatgatgaaacctcgtctctacaaaaaaatacaaaaattagccaggtgtggtggcgtgtacctgtagtcccagctgggaggatcgcttgagcctaggaggttgaggctacagtgagccacgattgtgccactgcactccagcctgggtgacagagcgggaccccgtttctaaaattaataataataattaaaaagcaaattattttctcttggaaaaataattttccaggaacctctcaaagttcaggtttgctagtgtttttaatgtttttattgctgtcattggtaatgacttmagaatttcatgattcagagactccaggaagcagagaatcgaaaccaggaactgagtcaaagtgtttcatcaacaacaagaccattgcttcgacaaatagaaaatttgcaagcaaccctgggatcccagacatcgtcgtgggagaaattagagaagaatctttctsataggcttggtaactgctttagtttttatgctcgatgcagaagctcttccrtcttgtttatagaattagaataatggtatgaaattgaaattcatttgatctgatagttacattttgtgtctaatatgtagatttttacattttctctttttctacatgtatttttaatacctttattatgtctctttcaaaccattttttcccattacacaatggtatcagatactggctaaagtacttccatgtcattctttcattcagttcttttttwtttttttttttgagatggagtctcactctttcactgaggctggagtgcagtggcgcgatctcggctcactgcaagctccgcctcccaggttcacacaattctcctgcctcagcctcctgagtagctgggattacaggcgtctgccaccatgcctggctaattttttgtatttttagtagactgctgcactcgatttttttttcttgtccattgctaaatctgacccctttgtagcttgtctgcagtagtgtaggaggtagagatcatatatgattctcatcactggtagaattccaagagcgaaaataggtctaaggagagtcaagatcgaccttagaagagacatactagggagtcttaagattccatattctggcagggcgcggtggctcacacctgtaatcctagcactttgggaggcctaggcgggtggatcacttgacgccaggagttcaagaccagcctggccaacatgatgagacccccgtctctaccaaaaatacaaaaatcagctgggtgtcatggcgcatgcctgtaatcccagctatttgggaggctgaggcaaagaatcccttgaacctgggaagcagaggctgcagtgagctgagattgcgctacagcactccagcctgggtgacagagcgagactgcatctcaaaaaaaaaaaaaaaagattccatattctgcttctttacagtcatgccccaggttgcccttctgtgatgttaataaaaagaaaagtattattctaaaatgtttcccttcaagcacagacagctagtgtatgtatattataggtatcccagaagctagcaaattcatgaaaaattcatgtatgccttctacgcctgacactaaatgtaatttgagaaatcacagtgtagtgataaaatcagacctaaatatgagtcaggagacatggactcagggtattctgttttgaatcatccagcaaaacagtgtggaacaagtcacttatattgttccaactatctctgtgctattccttgtgaatcgggggggtgaactagattagtgactttcaaatagtattcagtggactcttagatacctttggggctgctgtcatggtgagagggaagcttgataaataagaggctgggcttctctagctgctttaatgaaaatagggcctcctttgtctatctttttttaattggagttccatgaaagatttggtctagaaaaagattcatttacttaaaaaaatgaactgaattagataaaccttcatatatatttaaatttataggtataaatgttaggtctgtcgtttatctctgacagcttttgagagcaatgtgctgtgaaatatgagacatctgaaaatgatatcttttgaaataaatatttagcaataaatgaatgctagaaactggtacttttgtggtttttagactgaagtctacataccctcagcaatatgtggtattgtgctagcatataggcaaagccacaggacaaacataccaaggaatgctattaaaaagaccatagctatgctgtggagcagagtgtaaaatgtgaaatagaggtattactagctctactttggtggagaaaaaatacaagaattcttacctaggttaaatctcagaatcttacccattgctctttttttcaattgaaaatttttattgatataatgtagattcatgtgcagttataagaaataatatagaaaggtcctttgyacacattgcctaatatctccaagtattaaaatcttacaaaattaatgtataatatcacaaccatggtattgacattgatacaatctactgattttattcagatttccaaagttttattggtactcatttgtgtatgtgtgtgtgtgtgtgtgkattaagttctaaacaactataccacatatccattaccatagtcaagatattgaacagttccaacactattgagtccttcctgttagctttttttctttttttcttagctgaaaataatcactcttaatgttacccttttggaaacacacctaccactctctcaacccttcctcccttgtcccaaatctctggcaatcactaatctgtcctctgtttctaaaattctgtcatttcaaaaatgttacataaataaaattatacagtgtatgacattttgggtttggcttttttcactcagtgtaattcccaggaagaggttcacacagttgtttttgtatcggtagtttagtctttttattgctgagtgttattccatagtatgtaccaygtatatttaaccattcactgcacaagggacgtccaggctgattccaagctctggctattacagataaagctactgtgaatattcatgtacaggttttagtgtgaacctaagttttcatttctctagataaatgcccaagtgtgcaattgccaggtcatgtttagtgtttttaagaaaatgccaaactgtttacaaagtggctgtgtaagagtaatgtggtttcttcacacccttgccaacattttgtgtcgtccctgttttttcttttagttactcagacagcatgtagtgatatctcattatgattttaatttgtattttttccctaatggctaatgttattgaacatcattttatgtccttattttccatttgtacattctctatggtgaaatttctgtctatgtcgtttacccattttctaactagattgttatatattcctgatactaatcctagatatatggtttgcatttatttgctctcactctgtagtttgccttttcatcctcttcacatagatttaaaagttgaaaattttgaagcagtttgtcagtttttctttctatggctcttgctttttgtgtcaaatctgccttgttctagatcctgaagactttctcctctgttttttcctaaaagttttatagtttcatgttttacatataagtctatgatccattttgagttaattttcgtgaatgatgtgatgtgtaggctttttggtttttttgcatatagctgtccagttgctccaggaccatttggtgttggtgatccactactcttttaatgcatgactccattttgaaattaaaatacttttggaaaagagtgataaagcaggtataagttaagattggttcatttgtctcagtagacagtcctgccttaggcaataaatagttatcagttttaagtgtggctacttgcatcattaaatgtttgaaatcagaattgacttggtattttggtctctgggctgtatgtgtatgtgatttttttttctgtcctgtaatcaggtgaatcccagaccttgctggcagcagcagttgagagagaacgtgcagctacagaagaactccttgctaacaaaattcasatgtcttccatggagtcacagaattctcttttaagacaggaraacagtagatttcaagcccagctagaatcagagaaaaataggctgtgtaaactggaggatgagaacaataggtgagcatggtttctgagtgatatttttggtagttccgtgacatcctaaagcactttttaaaagtatgttgttgggccgggcgccgtggctcacgcctgtaatcccagcacattgggaggccaaggcgggcggatcacttgaggtcaggaggtggagaccagcctggccaacatggcgaaacctactctctcctaaaaataaaattagccaggtgtgatggtgtgcgcctgtaatcccagcagctcggaggctgaggcatgagaatcgcttacayccgggaggcggaagttgcagtgagccaagatcccaccactgcactccagcctgggtgacagagtgagactcggtctcaaaaaaaaaaaataaattaaataagtaaataaacaaagtatgtcgttggcttttagcttcagggtaccaagaactaaatgtaatcacttttagcatttaaagttagggttattagtaataggatattatggccgggtgctgtggctcatgcctgttatccagcactttgggaggctgaggcaggtggatcacctgaggttaggagttcaagaccagcctggccaacatggtgaaaccctgtgtctactaaaaatacaaaaattagccaggcatggtggcagacgcctgtaattccagctactcgggaggctgaggcaggagaattgcttgaacctgggaggcagaggttgcagtgagattgcaccattgcaccccagcccgggcagcagagcgagactccgtctccaaaaaaaaaaaaataaataaagtaataggatattataacaagaagatagtactgggattcattgtcatgtagattgttgagattgtgtggcatgttttgtatttatttttttttccagggaaaggatttgtacctttaatcagattttttaaaggggcctataacaccacaaaatagttttgagactactctttggagttacttttatattacaaggattttagtagtataatttaagtcttttctaaataaatttctgggttcttggaaaccatggggtgtaaaatccatctatctgagattatattaaggcaatggttagtattttttaccctctgttcttccttggaaattttactttttaaaaaaatgtcaagtaaaaatgatttctaaagtaaaatatctgaacttttagaaacattttcatagaactccctaataagctttgtggaatctgagcatattataggatgatggtactcaaaattatttttataaagtctctttttaaatgaaatcttaacccagagcaccaataaataaaatgcacagaagtggagctttttcacttttggtttggtttctgagtgaaactcagatgggatctggaacacactgttggaaaatcactgatgtcaagctggtaataaaaatgatttctcaatatgtagctggagttaataaagtactgagtttttaatagtctatactagcatctttttcattttctgtttttttaaattctgccttgtttaataggtaccaggttgaattggaaaacctaaaagatgaayatgtaagaacacttgaagagacgaggaaagaaaaggtatttctcttcgtgaccactcagctcttagggcatacattagagaatggttggggatggcagcaaattaatgagataacaagatgaaatgggtgatgccactgcttttggaacttggtctttagtaggaaaacaaatatgagtttatactttatgcttctaactttgagattgacttaccatggcatgaattactatcacagaaattgtctaactttatttctctctattagacattgttgaatagtcagttagaaatggaaagaatgaaagttgaacaagaaaggaagaaagccatttttactcaagaaacaataaaagaaaaggtattgaattttgtttttgtttgtttgtggtgtaaccatttagtagatgctgtgattaatcattgctttttaattttagctatgctttataacaagcttgtccaacctgtggccctggttggcatgtggcccaggatgattttgaatgaagcccaacacaaatttgcaaactttcttaaatcatcatgagatttttttcatgatttttttttttttttttagttcatcagctattgttagtatattttatgtgtggcccaagacaattcttgttcttcaaatgaggcccagggaaccaaaagattggacatccctgctttataagtatcatttttttaatgtctaaaatcaacatagtgatgaattctagtattataatcagtgtcctgctcagagtggacccaaagtaattttgagtttatccaaagagatctatgatttctaggacttgaaatataaaacctcttgccctttttaaaaatgaatttaattgtctgtcactgaaaccagtgcacatcatttggtctataggcacttaaggagtaagtctggcttgttttctttctggttaatgagggtaatttttctgaaatgagttttctgaggctgagcatggggactcacatctgtaatcccagcactttgagaggctgaggtaggtggatcacttgaggctaagagttcaagaccagcctggccaacatggcaaaaccccatctctactaaaaatacaaaaattagccgggcatggtggcatgtgcctgtaatcccagctactcgggaggcagaggtgggagaattgcttgaacccgggaggcggaggctgcagtgagccgagatcgcatcactgcattccagcctgggcaacagatcgagactctttctcaaaaaaataaaaaaaaataaataaataaaaatgagttttctgtattgaaagaattaccgtgtacttggagttagcataatatatttaaactaccgataggtaaatttaaattacctattgaatttatttggaattttaagaatacattaaaaataaaatggataagccagaaattttatgatttgtaacactcattagtaattttatgttacagaaataggtttaattgatagtatattgtataatatgaagcttaacagaaacattcttattctattataaaaacccaacaaattacattgttgtaataaatgggttctgtgatgatctaaccaagtctagctacagttttaattagtaaatattgtactttttttttgtttgtttgtttttgagactgagttttactcttattgcccaggctggagtgtagtggtgctatctcagctcaccgccacctccaccgctatctcggctcaccgcaacctcacctcccaggttcaagcgattctgcctcagcctcccgagtagctgggattacaggcatgcgccaccacgcccagctaattttgtatttttagtagagacgaggtttttccatgttagtcaagttggtcttgatctcccaacctcaggtgatccaccctccttggcctcccaaagtgctgggattacaggcataagccaccatgcctggccaaatattgtatttttgacttaagaagccattttatggggaaattagaatgaatcttaaaaaagttttttttcttcttttgattgtattgaattcctttgtagtgtggcttttttaaaagactgaatctttgttctcattaaccctaggaaatgttcttgctttctctgcttatctctttgctctttaatatgaacagaattttttttactccctaaggaacgcaagccattttctgtttctagcactcccaccatgtcacgctcaagttcaataagtggtgttgatatggcaggactacagacatcttttctgtctcaggtgatgttttattttttatatgtgcttagttcttagaataataataaaggaaatatgcaaatggcaatattgtctgtcatcatgaccttgccattctatgggtaattcatctgaatacttgtggaggagtgctaattttagkgagaggaaacacgtgaatgattttctgcctttgagaagacatttaaagcaaaaattgacagaaccatttttgttygaacctggtaatggaagacaagctatgataactgagtaactgtgtgaactttcttaattaacataggatgagtctcatgatcactcatttggaccaatgcctatatcagcaaatggaagcaatctttatgatgctgtaaggatgggagcaggatcaagcataattgaaaacctacagtctcagctaaagctaagggaaggggaaatcactcatttacaggtattggaaaaattaaatttgctatagaagtaaatgaagttttgaggcctaataaatagcacccttcatttccatctgaattctgagcaaattgagaaacaagatgacatagtggcatgtgaagcccaaaatgtatcacatatatcaatgataaaggctaaaaagagaaattagctaaggataacagccaactgaacctgctaattgccagaattaggcatattcggctgatctgtcacaggaaatgctgggctggagcaggcctcccatgttttacaacctgcctacataagacataagcatctaggagcagagaatccctcctcctttcaagcagctctttcccaacagaataaagggaagtcactgagctgtgaatgcctgttctattcagatttacctcttagataagttgttccagctaccccgggaaggaggggtaaaggggatgagatgtttgaactgtaacaccctgtacatgggaggaaacaacatgagttgttgatggagcatccttccatcttacctttttggcttttaaaaaactttatgcagtcagaaatattgaaatgttttacaggtttgagcatcccagctctgaaatctgaaatgcccccaaatccaaaactttgagtgctgacatgctgctcaaaggaaaagctcaattgagcattttggatttccagatttgggatgctcaaccagtaagtacataatgcaattattccataatctgaaaaaaaaaaaaaaaaaaargaaatttgaaacattcctggtctcaagcattttgaaycaggatacctcttttcagtgttaaacacaatacactcagaagtaggtaaaaattcaactcccattatatacttttagttatatgaaaatattaaagaacttgaattggcaaaaagtagatcagactaatctgaatcccagatgtttgtatagctggtatgctatacagggacctaattaatttctttggtagtgatgaaagcctctgtcgatacaacctacacaggtggggctacgttaaagtatatttttatttctctgggttcttgtagtaatttagaataactgaaatatatgtcatttccttagattagaaaaatatatggttgaatgttttcaaacaaataattggatttatctctgttgcacagtaaaccttataaacggtatacctctcaggaaagttgggaccgtttttctgccactgtttcctttacttaagaaagagctagctcaaggttatatgttgacatgtctatttcaaaaaaaaaaaaaaaaccacacacacattaaatatttttatattactgggagtattaaaaaagatatgttttgatttaaactattttgtggtaatgcttctcagctagaaattggcaatctagaaaaaactcgatcaataatggctgaagaactagttaaattaacaaatcaaaatgatgaacttgaagagaaggtgaaggagatacccaaacttagaactcagctaagagtaagtattcttcacctaaggatgagtctaagatattttagttcatttactttaaatctcatgtttttaatttatagtatgtgttagtgatttatttgaaaattaaagagtactaatatttgagcaaagaagtttaaaaatgaatcttttatcttgcttgtatctttacatattcaaagtaattttcacaatcatgtttagtcccagtataggaaaagaactagatttcatttggctacacttcatttataacattgaactttgtatgatcttagtaatattttgttgattgttgttatatgtatcatcacaattgtctcatctggatgttagaagacactgttaagccataagtgagaatatgttttcttttgatctttcctgtggtgtgggctaaatgccgggtaatacttataccaccatggaacaaagagactaaattttrtatcaagtgtgcttacattaatgggagagaagtcatatatggggagaattgtagatttagtggagagatagggtaaaattgatagccatctagcttggtttttttctttaattcctttttttgctatttagttcaacatagactgaagtgtgagtttaatttttaaaagagatgagtatatacttttatttaaattgtagtgttttcattgttgactcctatggcaatataaatattaaagatgttctgtgtagttattttaaaaattgtaaacaaatacatttttcaggatttggatcaaaggtacaacactattctgcagatgtatggagaaaaagcagaagaggcagaagaacttcgattagatctygaagatgtaaaaaatatgtacaaaactcaaatagatgaacttttaagacaaagtctcagttaacttgtgaaaattgaattcccatcaaactgaatgtaagcatttaatatctaaacatttaatgtggacttccaataaattcttttatagaattagaaagtgggatttactgtagagtgtaaaaatttttttaaaattgttttacactatgtagtaatatttacagttaaattattttgtgcaatatttgaactttatttttgaaactattctttaaagatttattttttaaagcattcattttttttccttgaatagcacagagatttattactttatcctcatataaatatggctagagaagaagaatggtgttcatatatgtattgtagatatacaactagttgtatctataatttgtaagtgtttatatatatattaagaacatttgaagagtaatgttaacatactgaaactttgaaatctttcacatttaaaatttcaacatatcttaattactgctcatgaaaatgtacattaagtgttaaagtaaaaaattattaaatctgtggctattaaattttaaactaatttttttcctttaaaagtaagagtcacactgacactgtctgaaatttaaagagtgaatgatttaaacttaaaaaaaattttgatctgaaaatttatttcacccagctttcacaattaagtctgtataaaatgtggtaccttttggtacctatccagagaaacctgtacatattcaatgttatctagatgtgattggataatggagaaaatttatttataatgattttgcaatggcatcaataacatttaaatgattttgaagaagtattattttactaccctataaaatgaatcgaaaataataaagttcttaacataatttactctttaaaaattacctgttcatattttgtaaacccatatttttagcacattaaaaatgaatgtttgatattacagaatattcataacaaaatggaagaattataggaattaacttgaatttggcatttttaattttgtgatttatcattttattttttcttgaaatttcaaacacaaggaaagcatagaatagcttttaaaagtagctatgccttcttccaaatgttattttattcaaaaaggtaaccaggttgtgttttaaacctgtgaaatattgtgatgcattttattactgaaagttatttaactgcctttacttgcacataaaaactctcatttacggccaggtgctgtggctcatgcctgtaatcccagcactttgggaggccaaggcgggcatatcacctgatgtcaggagttcaagaccagcatggccagcagtttggtgaaaccccatctctactaaaaatacaaaaattagcctggcgtggtggtgtgcgcctgtaatcctagctactcgggaggctgaggcaggagcattgcttgaacctgggaggtggaggttacaatgagccaagattgtgccactgcactccagcatgggtgacagagaaagactccgtctcaaaaaaaaaaaaaacaaactcttatttaatttttagttaaaattaaaacactagtacttcagaatatagatacaagtacaccatcttgaagaatttggagtttttcagggcaattcaaatgacctcattttttgttctttttgtattccagacagtgtttctgtcattggatctctgattggtagtgttaataaatattctttcagtgtgagccagattcataaaattaattttcttcattttagtagtaaaaagtagtctaatagctttttgtcagcttgatttttktgtgtgtgtaatattcaagggcagaatgacaggacagataagcaataagaaatgtatagaattagaaaatatagtagttccctcttacccatgggacatacgttcyaagacccccagtgaacgtctgaaaccatggatagtatagacacctctatacactgttktttcctatacatatatacctatgataaagttctatttataaatcagggacagcaagagataaacaataactgcaaatagaacaattataacagtgcactgtaataaaagtgatgtaaatgtgatatgtctgtctctttctctcaaaatatcttattgtactgtactcacctgtaatcagactgtggttgaccgtgagtaaccgaaaccacagaaagcaaaatcgtggataaggggagactactctatatgaaacttaagttacaaaattctctgaagcatttgaaactagacgttttggaattataaaatagtccctttaaaatatccactagtagaaaaaaacttcatttgcagagaaaagattgcaataaaactcattcctaaacttttcaattttataaaattaaacattctttttttatccgtattaacaatttctagttacatagtttctagttacatattaccatatattactctttatctacaaataaatagctgatactcaaactgatcatattttgattgttaaacacttggatctctcaatacttctgtaagttaaagtgaacttaaacagtttcttgaaaaactccagtaggtggcagaatacctattgaatattcgttgctatactttgctgtttgtcattaaaacatctctacccatattcttgcaaaataatatttatattttaatggataggaaaatgatttgcaattagatgtttccattcttgaaagaaaaaagctgcaaataacattttcaagaatataaaaaaatgagtaaacaaagggaaggttgtttggtcatttatagacaattaagcacagactgtagatgtccttccaattcttgggaggctaaactgagtctaccatttcttacatttcttttacctattttttgagaattgccagttgtacagtgtttagcatgtggaatgtaccaaatatatctatgttgtgacttaagatattctaaatgtggataacttctgacctaggaaacatgaagtttgtagtgaagtaagtgaaaagaatgttcaggaaatttwttttctccatctcttcagttggcatttattgagagttttatttgaatgcttattaaaagtatatgatttataatatttagaaaatagaagaaaaaagaaaactgtagatgttttatcttgttttaatactgtatgtttagtacgtatacatttatgttctagtgtatcaaaatttttcattttcattaaagtgaatccaattttccatattctaggtccattttaaaccatgaaaactttaatcacatattttgtaaagggctgaaagtatgatttaaactacagattgatatattttaattctaaatgaaaggtaatgtaaataagcatggatctgattgaataaagattttaaaatagtaatagtgtatttcatttttaacaaaatttatagtggtcaatagtaatgagtgaagaatgaatattgttttatgaaaatataacttgtttacatttgagattaatattttaagaaaatgaagccctaattttctataagttacattattagtattaagtgtagtttttttttttttttttgacagagtctcactctgttgcctgggctggagtgcagtggtgtgatctcagcttactgcagcctctgcctcccaggttcaagtgatcctcctgccttagcctcccaagtagctgggattacaggtgcgcaccagcacatccggctaatttttgtatttttagtagagatgggtttcaccatgttggccaggctggtttcgaactcaagtgacctgcccaccttggcctcccaaagtgctgggattataggcataagccactgcgcccggccctaagttcattatcttctaatgaagatatgttttcggaaaacacagtgctaagaatttacttataactagctggtaactactgtaaggatagtttgtgtcagtttttaatcttaagcaatatcaagacattcttctaaaagtcttatgtttctgtattcaagtaataacagttaaaataagttatcctctatttctgagttcatattgcttggattaagctctgtaacctttaaagtacttttaatctgttgcctttatacatacgcattttaccttttagcaaattaagatctttttgtaagacagactggaaatgaaatgtatttctccttagtacttaaataccttttctcaaaacaaaacaaaaaaactcaaaatgcttcaataattcacaaatacggtaaagagaatttactcttagaactgtctggaattccccacactgccctactcccaagtagcctaaatttaatatttagaatcgcaaataacattaaacaagaacgtaatggcaggtttttctgtttgtttaatattaaacattcttcttgcttttacaggtataggcacagcatggtagatagaggtattccttccatttttataaaatgccatgctgatttgtctgttttaaaattacaatcttaatttttaaaaatatacgttgttcaaaaatctgtggtcaggttggtaataggaaatatagtcttttcttcttttttctttttttgggaaacatagtcttattttgttccaaacactgtgtaaggaattcacttatgtaggattataatcccataatcattgttctgaaatccacaaagctctaaaaaccatatatattttaatacatttgctgttaaatctacttcggtggtaaagcctgcactgcactgacatagggctatgtatagtctttaactcatttggtgtgaatactcatacattttgctgcagaaatactgtgtgagattatggggtactcacccaggactcaatggggggcgggtattaagttaaacgatgggcatatctattctattttttaaagttcaggcacacacagggacccaaggattttggaaaaggaagtgtgtacccacactttatcatcaagtcaaccttttaaaatggatgccattatcacccccatttttaaaaataaagattaagtaaattgctcaaggtcatatggcaagtaagtggcaaagctgggattctaatttgtgcagtttggctccagagtctatgatttcaataattaattatatggtgctacttttcctactgcttttctgtaaaatcataagcatatagatcagttacagccaaaatttattcattaaaaatgtcaacaccttttaattatggtctaacagttggatgagagaaccagtatactacattctgctgatattgttagcaatttactcattgtaatttgttggatttgtctcaaattttttaagccatgcattcttccatctctgtctctctttttcttaattcttgcaatttcgatgaagtttcttatttgtagaaaaaactaggtcatttgtcctatagtttccctccatctggatgttgatttcttaccttttgttagtgtgttccgcctcctgtgtttaaatctaaaggcaattatttttcaacaaaaatacttcattaggtggaagtgtattcttccagcaggagacagataattcctgatggtttctcagttgtgataaagaaataattgatgatcacttcttaaatctattagttcacagagcttgtggagtgatattgtcatttctttttcatttagtagttggaatgtttccataaaaaatttacttcagttattttgttatttgcatcataattcatacaggaaagacagtataaatattcctgattctttccctttgtttaccagttttcagaataagagttggtttccttctgtcattaaaaatgaacagcgatacctttttggcttgcatgtttggttgattggtcgtgtctgatatgattacttaaatgtatctgtccttcatccaattacagttacctttatttatgttttaaatcatcctatctttggccagtaggaaggttttcaaggtggatcctgagtccttttgatatgaccctaatagccttttgattgctttgctgcttcctgatgtaagatgttgcaggcttatcttgtacatttcctgctccagacccaagatcatccattgttctatggagtcagtgtttcttttaatgggaaatggttggtagagatcacagtgtgagcgcaagggggtgcttcttcctcctgggtagcttgtctctaggccttttcaatggagcacgtaggagagatgtgtttttaaagattaaccatactgttaatcatactgaggcctccaactgaaattcagaactacaggatgtttatatagcctgattaagctttcatatttctatctcatgtcaaaaatttcagcttcaaaggtaccatcataattacttcaacttggtgtatcccataataccaatattgccaccaacaatttggttacggaatgcagtctacaaaagagtttttttgtactttagtcctgagaatacatcccactaagtatatacaaattaagttttaaagtcacttgggatagctcctctgggtgatatgccacaattggaaaacatttaggttcatttagtttcattttactttcaaggattgctttttaaaaacagaattttgctttataatgtaacatatttacatgacttcaaagtcatgtcttcacgccaggcgtggtggctcacgcctgtaatccaagcagtttgggaggctgaggtgggcggatcacttgaggtcaggagttcgagaccagcctggccaatacagtgaaaccccgtctctactaaaaatataaatatttgtcaggcatggtggcgcatgcctgtaatcgcagttactcaggagtctgagggagaagaattgcttgaacccaggagatggaggttgcagtgagccaagattgcaccattgtactccagcctgggcaaaagagtaagactctgtcacacacacacacacacatacacacacacacacacacacacacacaccaaaaaacaaagtcatgtcttctttgttccttatacccctcctcttccctccttgcccatatagtcattttaaatgttaatctacttgtaaaataataattagtaaatatatatgtgtatacacatgtatacacacatattcctcttagaaaaatgatatttacatattacatatccttttcccactcaatattctgtagtgtacagagatatttctcaattcctttttatgcatgcatagttttacattgtatggataaaccatagtttattcaaccagccttctattggtagacacttgagttttatgtcagctcaaagaaaatttaaattctaacattggtattttggagagaaattctatttgagaatggctgttacagtaagagagactcaatctcatgttcaggtttatcatatctggtttcctgtaagtctgaatgaccattcaatatgtaggtgtttaaaatagcaccacatagccaggcgtggtggctcacaactgtaaacccagcactttaggaggccgaggctggaagatcacttgaggcccggagttggaaacaagtgctgggaacatagcaagaacctgtttctacaaaaaaaataaaataaaatagtaccatgcacatgtcatactgattttaacctttttgtatgtgacaaaaataggatggtagcaagtaggctgaggaagctttttttttttttttatgagacagggtctcactgtggcccaggctagagtgcagtgtctcaatcatggctcactgcagcctcaacctcactgggctcaagcgatcatcctgagtagctgggactactggcatgagccacagtgcctggcttgaggaagcattttaaaaaattactgtcattagtgtgggatggtgaagtatgcaaagtataaaataatagagcagtaattctgttataggaaaggggtcccaatccagaccccaagagagggttcttggatctcgagcaagaaagaattcagggcaaagtgtaagcaagtttgttaagaaagtaaaggaaaaaaaaaaagaaagtaaaggaagaaaagaatggctactccatagacaaagcagccctgagtgctgctggttgcccatttttatggttatttcttgatgatatgctaaacaggtggattattcatgcctccccttttaagaccatatagggtaacttcctgacattgccatggcattcgtaaactgtcatggcgctgataggagtatagtagtaaggactaccagaggtctctttcatggccatcttggttttggtgggatttagccggcttatttactgcaacctgttttatcaacaaggtctttatgacctgtatcttgtgccgacttcctatctcattctgcgacttagaatgctttaacggcctgggaatgcagcccagtaggtttcagcctcattttactcagctcctatttaagatggagttgctccggttcacatgcctcttgacagttcccttagaggcaaaatcttttcaataaaaagaataaattaatactgtaaagtgctttaaaacaatgtttggcacatgttaaacaccacatgttcttgctgttattatttgaaaaaaattccaggtaagattcctaatttagcaggtcactaatggaacttgtaacaattcttaaacaacattacttttaaaaattacgtaaaaagcatgtaagcctttggaaacaaacttgtttccttatgatcatattatttaacttctggtgactatattcatttgagcatgtttattttgaagtcatcaccttcatataatcagttcaactttagtcactatttaatgatcaactctactgtgctgtagatggaatactaggcctgggggagcttagaggaaaagacagtgggggatgggagttcaaataattataagcagtaataaagtaaattaacaaaaccataaaaattaaactccacagagtagcatttgaacttgatgagtttacggataggtaaaactatactgcttttaaaatgtgtgtggactccaaagtatcctcaccatcacaaagtgtattcggtgaacgatgttcagtccccaaatttggaagttagggcggcaacttctgcttgaaataagacaaaagtaaaaatccacctcagtgcaacgcagaagacacgaagagtcaggttttctacccaccccgtcctaacatcctctgagcgctttaacgctctcgctcaaggaggcgcgggctgctgcgatggagatgggcgtccggcgccggcacgtgccgtcggtctttccggccctggtgagggagctggcggactcgcgcgaacgttcgcgggagaacgccaggaagggcagatggttcctcgactctgagcccctccctgctgcgctcgccgggtcgaggccgctcgccgggctgaagccg

SEQ ID NO: 96423 - DNA, 33338 bp, Homo sapiens
cgtttggttgtgattatttttaattttctaatttcctataactccacagtttctaccgtcaaatatattagtaatatccaatttttacaaaagggaccaagaagtattgcctagcaataaaaaccatacgttttgatgtcagagttgtgttgggttccacaattaacagcactgtgaccttgagcagattacttaatagacataaacctcatctgcaggccgttcatagctacttctttcagccatgaggatatagataatcacacagaagactcagtacagtacgtgggatatggtaagcaatgtttaattgtgatttcatgtaaaagtgggagggaaataaaaggcaggaaagaatgtgaaattaagtttgtcatcccggtcctcttgcagctgaaattcaactgagggacacacataaagatcaaagcactgctactgggaatcggcacggaaatttacaaactcaccataaccaatgcaagagtattttttccctgcccaggcagggaggggagtaaattatgtggcgctggccaggttagaaaacacttcgattaaatctgtctcaccagcatagaattaagcatctgataagaaatagggtgtgtagtaaaagggataaataggctgtttgaagtcaacaacctctttccagatcttttaagagccaattattctgccaaaatgactggagtgcttagtacaatacctgacatgtagagttatcattaaaagtttgcaattagtactactgtctcagtgtttgcaaaaggccacaaaacggtcttgtgtccttttcctgtgtgtttaaggtagattgccttttcacagggtcactgctctgacaatttgggatggaggaagaggagtgcacaagggtccttcctcaagacctttacgtcaagcaccccggagggcccctgcaggagctggggcagtacagcctggccccgacgcccgcaccgggcagataccgggagcggcccgccaggcccccggggctgcggggcggggatcaggggatgaggcagcgcggcctgcgctccgggtgtccccctcccagccccccgggcccgctgcggctggtcccctaggcctggggtggggggaggcgggggtccccggagagggccccggcctcccggcagcactaacttctcagccagcagctcctctattctccttcttttcttctccctaaaagagagaataaaagaagggtcagcatcgcgctacacactgggcgccgcgaggggaggggggcgaggggacggggcggggggtgtggggaccccgggtggcggcggcaaccgcccaccgccgcgctctctcacaacccagcccagcccggcgcgtctgcagagccccggtacttacggctcctcgccatccgccatattgttctccgcctcttcccaggtgcccacgcgcggcagggcggggaggagcgggactggcaaagcggggaggggcggggctggcgaagcggggaggggcgaggccagaaacacaaccggcagggaggtgcgaggttgactgcggctgggctcccatgggctttaaagtcttgccctgtaattataatcttaattacctacgcttaattaggtgaatcttataccgtgcataatgttgctctgcagcgtgaaaatgtagacaatacattatgcgtttacacaaactatatgttaatacgtaattatacaaaatattggtatattctatgaaaaattcgtgaagaaccctcccagtatgccagagctttcctctgggggcaaagatcaaggaaattttcactttctgcttttcaggatggttccaaagtctttgcctttataagtactcacttgaataataaatttatctaaatccgtttacattggtggggtgggagattattattttctttgaacaaatcagcattaatattttcatgtcacattctgttagataagttcagcggaaacaaaatgattaaaacttttcctgagataaatgtgtatatttagatacaaagaaaaaagtataaaggaaaacaatcacaaaaatcaaagaataactgagaacacccataatcctatcacctaaagataaattgtgataaaagtttcaattattttcttctagagtcagaaatacaaatatacactgtgaatctggatggctggatagagggaaatgatcatgttcaaaaatgtatgtatatacacgtacacacacatctccttctatggagtgggacaagaatgatatttggaatcaaaagtaactgattttaaattcttctcagttgtgagctacgaaacccttagacacttctatttcttcatttataaagtgggcataacactattcaccttgtaagactgataattaagtaaaatccagagtggctctcaaaatacagttcctgatcaacatcacttgggaagttttttttaacacaaattttcacccctcaccgcccccaccacgctccccaccgcccccccgccaccccacccttcagccttctgcaaagcctggggtgattctccactggtaaagtttgagggccactgaaatggagtacataaagcctgatgggtactcagtaaatgtagctgctgttactacactgtgatatttaacctcctcttgtcctagttttcagtgaaccttaaggaaagcttgtcctttatggtcccccaattaggttcagttcaatagcattcactgagctgaaagtcaatgccaggcagtgagcgtgggaatagagttcacagtccctatcaagagataccagcctccttctgcatcacatgtctcagcgtcaactatgaaactactttttcttgcccagacaactccacagatggtttcactgaggatttaacctcagtgcttatcaaaatgggctcctgtagcctgaacccccaacaatactggataccctttgattagtggtagtgagcattgcaaccctctcagatagtgaaaagcagcagtcaccttaaaggccacctagtccagtctcacccatttcacaggggaggaaactgaggcctagggatagagtacagctagccgatgaagaagtctgcaaaggtatctggccctgcatctgcttgctttgagactaacagcctgactcaccatggtggtattttgataaacgacaccaggcactctcactggcttagattgattgacggattagaaatagccatctgcccttgccaggaatgaaagcaacagagacatgcaagcaaaaccttcaacagatttattttacttcaaatggaacatatcataaacaattagactatctgctatggtttttaaacagacagatagtctgaatggtcctatctagacacaccagtcccattataaaagccccatcaagcagggctcggcttcccacacctgtagtcccggctacttgggaggctgaggtgggaggactgtttgagcccaggagtttaaaaccagcctgggcaacatagtgagaccctgtctctaaaaataataataaattaaagctccagaaagacctctacagtgaatctgacccctccctccccggaatgaacactaacaaagagctgctactaatagcatttcaaacagttactggaaaaaagtaatgactcattacatgttcatttttatttaaaataatttaacaaaggtagaaatatttagagaaaaaaaaaatctcccataccccaaagagagagacagggttaacattttgggagggagacagaagggaatcatgctataaacagctttctctgtcttttcagaatttatttatttatgtttaaacctctaaagaggtttaattctttcttgggtatcaattgcctgtgatcaaggagtaatcatattgttactaatacactcttgacagcttttggtcatgcagttctgagcagttggaagataaagttcttagttacagcttctaatactcataaatctcaccaacagtgtggggccccactggagttcccactctcatcttgaccaagatgatttactcagcttgcccacagtgctgcctcttgacattctgaagccctggggaattcctccacaccctctgacttcctgtaactgagcactgaggctcagtgcatctctatttagcactcctcttactgtctcatatttaactagtgtttccactggattgcagaagttttgaaggcagagcaggattacatttttctcctctttaaaaaaaaaaagaaaagaaaagaaaaaaaacccacagtgctttcacagagcctcaaaagaactcgaaatacttgctggcattgtactgaatattctcaaccttttccccctacccagatacatccacaacaataaagttggagcaaggtagagaaaagttagtagatgtttataatgaaagcatagaaaacaaatcagattaaagcactattaatagcaaacaagaatcgtgggctatcctattgctaataacaataatagtaacatataactgtgaacctttattatacactaagcatttcctatacattccttcacttagcctcgtctatatggcagatgttccattatccccactttacacatgaagacaccgaggctgggagagattaagtagtttctccaaagtcacctgccagagaggaaggagctgcgactctaattttgctttctctgacttcacaccatcccatttttccagaatcaagaaaacatgagcactcaggaatattttcacattttaaactttattcaaaaagcagcacataagatatatcttagcactaattccatgcaatcaccaaattttcctaaacaacagtagtagtagtaatttcttagagtcgctgtaagctccttaactgtcttctgaattaataaggaaaattaaattatgttttctagactttgcattagtatatttcattactttccaagttttcaaaaattggtgatctgagtagagtgaattcaccttgtctaagccacttaggggcttagagactctgttatcttagaaatcttcaccttagaattctacctattacattatacaattaaacaaactactttttttctcatgcattgtaccaatcagccccttaactgaaaaaagatgacccttggaagcttagaagagaattgacaacgaatacttcttttgccaggtctttgggctgggatacaaaacatcacgttatctatgaatatattgtggtccctcagtgaaagctgtcaccaaatattgcaataaaactaagaaaacttttgaagtggaatgcatatttctgcccagaaaatgctggatgcagaacaactagttcactgcagacaactgtttgctttaaaatgtaagcaacatgcccagctcaggactgaagtggccagagtgcctactttatcagaatggcatagcagtccaacaatttagcctagagagaacagaggtggagaacaaagaagagaagtgaaaaaaacagaccagcccttctgttctacatgaccttctttcccgttttgccaatctgatttcacacatagtgactcatggtgaaacagagaaaacatgggaattgcattcagatgtgtagaggttagtaagacttagttttcaaaagcagctcattctccattaacactgtagtcgccttccatttcatttcacttagattggcatctgcacagctgccaaaatttttctctaagtcagagaacacactcctaggtaaaccttcaaaaaaggtatttcgaaggaggcagcttctctgctgctagagaaggcattgccacctcccttcagacaggggatttccgctagttgctttctgtcatttcgtctctattctgcactcagtcccttgttctgtctggaggttcctgttttcctgtacccaaccaagagccaatgaagaagtaaagaggagcaaacacgcccgcccactcccaatttcctttgctctgctgtctgccaaccgcaaagccgaccgagacggagccgctgtcaactctccaactcagctcagctgatcggttgccgccgccgccgccgccagattctggaggcgaagaasgcaaagctgagaacatggacgttaatatcgccccactccgcgcctgggacgatttcttcccgggttccgatcgctttgcccggccggacttcagggacatttccaaatggaacaaccgcgtagtgagcaacctgctctattaccagaccaactacctggtggtggctgccatgatgatttccattgtggggtaagtggggtccccctacccgggacaccgatccggggcgagcacggaggggcctcggggtgcaagatcccgggatgtagagacgctctctgaccacgctcagcgcctgccctggcaattctgcaagcggccaagccagtggaaacttgtttgcagggcgaggccgcagtaacctggggccccattttctgcaccaagggctgagacttgaggggggccctaggggaaagaggacggggaaaatttgccagccgcagggaagaaaaatgagagttcccccacccccctgcccccgcccgcgtgccaggatcgggctcttgctggaaagatatttgtagcgccctcgtcttttaaaaataagaagaaaaaggaaagtggtgtaaccctaccctggagctggctggggcggcagggtgtggacccgggctagtgtaaaaagggcaaccaagtggcgacgcactttgctgctttctctgcctaatgcctgccacactgtacagtaaagctgagcttgggatcaaaagggggggtgtctcctggtggcgcatctcccattgtggggtaaaggctgccatgactgtgggaagatggccttctggcattttcttccagcagtggccaggcgtggtcactttctctgtcttcgcttcctagcctgaggtttcaatgtatcagaaggccttttcaatacctgatacttaacaaagtatcctgtgttgagactgcatgtacacctgctttcctagaaaccacctttccttctagttcaccctttaagaaatgcttctctcgcttatgcaggatgggtggtgatattctcaatcttgctgattatctcctacacatctttaaagaaaaagccaccctcagactttataaaggactcacttgcacttaaatgtctgacatttctatttcagggcagacgtagagggaagaagcagcaagctggcttgggagaaaagggagaaatttgcacttgaagggtgtgggaaagggtgaacagggtggcttcttcagttggctcgcagttaattggcttatacattgagccacctctctgtgcctggccccatgccaagctccaagcacaccaagatgaatcagacttgaattctggcccaggggctcctggcagttgttgagaagctaaaggagcaaacacacagcacagaggagagggggagacttcacagtttccgagtatggttcacagcaatcacccccatgcagaggtggaagcccacatgtgggactctatacacaatcgcacagatccttcttctgcattgcttaaggaattcttaaggaattgcattctgggaatggcttggtgtatagagggcacaggctctgagtggactcggaactagtgtggcagccaaggtacaagttagtcagggcagggtggggcaggcccaaggcctgaggcagctgccttctgaaccttccctcagctctgtgcttcaggctgctttcctggaacactaaaaaatttcttttttttttttttttttgagactgagcctcgttctgtcgcccaggctggagtgcagtggcgtgatctcgtctcactacaacctttgcctcccggattcaagtaattctcgtgcctcagcctccagagtagctgggattacaggcacgtaccaccatgcctagctaatttttgtatttttagtagagacaaggtttcaccatgttggccaggtgatctgcccgcctcagcctcccaaagtgctgggattacaggcgtgagcctctgtgcctggccaaaaatttctttttaaaaatttttattatttatttacttttgagacaaggtcttgttctgttgcccaggctggagtgcagtattgtgatcacagctcactacagcctcaacctcctgggctcaagcaatccacctacctcagtctcccaagtgactgggaccccaggtgcgtgccacaaagcctggctaattttttttagagatggggtctcactatgttgcccaggctggtcttgacttctgggctcaagccatccttccaccttggctcccaaagcactgagattgcaggcgggggctactgtgcctggccaaaaaagtctttaaaacaaaataagtagtaaataggtttgcatcaatttttgtttttttctttctctttgcaaagaagcaggagggcatcttatctggtgatctagttatggaggtattttcttgaggtaacttagatgtggggcaaagtttgacacagaccaataattaaaaaaaaaaaaaagtctattttcttcagacatgtgtgctgcccagaccaggcacaagctcagacagccttgctgcttttgatagaatccatttttcactgtgaaggccaggggccagccctttgactaaatatagctccgtcagtattgtgccttaggccactaactcaggtagtttaggggtgttggccctcctcattttcctttcaaataagagttgttggttgtcaatgaaaattttgaagtgaaaaagtgaaaagtagccatgaagtttttaaaacttatccttatttttaaaaacttacaaaagatacaggctagtagtaaaggttgatttgaaaattatgtggataaaatgtgaaatttccttcatacttcagtaaaagtttggtatataacccctaactgttttctatgcaactataagcacagtcagtagttttttccaccagttgttctcttttctttctttatcatttaataatataaatatttattgagtgctctgtgtgtcaggtaccttgcaaagtattttacctgcattatgtcatagaacccaattttaaaaaactgttactttttttttatyattaaacctgaggctcagagaggttaaatgatttactcaaagtcacaaacttaggcttgtgctcttaactactgttctgtcttactatgagtcacaaggaagaaaccaaacatcttcagagttagggagcgtccttgattccagaacacttctcattctaaagagaactatcctctttcggtgatgctagtagatgggtaggtcagagcagtgctggcagctgttcatctggatcctccacagacttctctctagtttctcagaatatcttggtagagtatatgtgaaaatgtgacctggataaaagagtgttcaacaayggttccatcccctgctggtgaggagagcctcaagggcattgtaggagtgctctagcctcagctctccaatgttggaaactggcttagatgaggatagagagggcctcctcttcaagatttcaggaagggtgagggaagaacatagcaaatactatctagatccagaaacactggaaaaaactgcccataccaagacggagattaagagggattaggatagagataaatctgtgtttaaacttctgatcagaagagattgaattatttaaaaggaatagcatgaataacaggctaggaaacttgcgttttgctggaaatgcctttggatcctttacatcaagaaggaaaagtgtctaagatcgaagttgccatagcttaccttctgcatccttgatgtgagacgttttgggattaagatattcttttcacatcacacacaacaatagaagtctctaccttgatcttcaaagtgaaaaacaaaggcaacacctaatgacacttgcaatttaagtactaagcgtgtgatacattctagttgtggatgaaaacttctttgtgcttaatggaatgccaaatgatttgagctggagaactctgttcagtgtgtgagccatggaacagcagcatctttcgcctgagagcttgtcagaagtgaagcatctcaggccccatttcagacctactgggttagaatctacattttaacaaaagtctcagatgattcataggtacattaaaatctgagaggcactggattggtctggctcaaaagaaaatttaaataaatatacctatatgcccaggtgtcaccttccgtgattcaaaatgtatagttcttggcagggtccaggcatctgttgtttttttctttttctctaacttcctaagtgattgtgattatacacccctaggagaaatactgatcctcttgaaccccgtaacttctgaaatgtaaaagctcgaggtcacaggctaattggaactaaagctgctaataataggaagtgaaatattttttccattaagccatattgcaaattttctaaagctcttgattaaccaaattcaactgcatccctgactcttacaatatttgcaatgctattgctgtcttattctgaaaagttctttcctggatgggtatagtggctcacacctgtaatcccaacacttcgggaggcagagatgggaggattgctcaaggccaggagtttaagactagcctgggcaacatagtgaaaccctgtctaaaaaaaaaaaaaaaaaaaattattttctgccattagaactcatattttctggtatggcctcagaatcaccaaccacacacagaatttgcaacatataaaaatgcctctgctgcttctccagcaagagagctgcatgtattcttatgtatatacatttgtgcctccccctttagatagaaccatgtagctgctgaaggaatgagcccatgatttctcagctgaagtaactcctcaccatgtggcctgatcatttggcctatggagatgttgcaggagggtggaattgacagctgccactttatgctttcagttactcaagatggtaaggagtttctagaaggctggtaattataagtttgaaaacagcattaatgtaatcttttcaaaatgaacgtggcttggtggctctgtaatatgttctaggcctgtggctcccagcatctggtattatgaaatgttcgtattgtttgtacctttaaatgctgtaaagatgaagaaccaagtttccagctggtagaggaaaaaaagcgtaaggcaaccctgggaggctctggatcagaatctattgaaatgattgcagatagaatgagttgcagtctgtttatactaaagcaagtggaaatgtttttgagattagtcagcttcaacaccagttctacaacattactcttatttgtgttgcttcattcattcaattaacaaagagtatgaagcacttaccaacttctcagacactgctaggagatagtgaagaataggacagctgtgattcctgccttcacggaaaggcagcaagaccacactgaacacatgataactaatttgtatacaagtatagcaagtgtacagaaatacacacctacataaacacatccttctcaacctgacttacctgatctcccctgtacattattactccaaattccaaatctctcaggtgttgggaataggggaggcattgagtatgtagacaggaaaaaggtttttttaaattttactatcctaacccacagctcagatccttctattccattgaacaaatactgagcacctaccatgtggtagacactgtctaggccctgaggatacagtcaggagtacaactccaccagccttcccaaatcctcccagaattctcctgcccttcgatgcccatttatttgcatttgaggctggcacctgtcttcctctgatggcttatgtgtttcttctgaatacagaactttaagaggtctgtcaacacacagtaacattttaatctcaaaatctttatctaggctggacatgatggctcacgcctgtgatcccagccctttgggaggccgaggcgggtagatcacctaagctcaggagtttaagaccagcccrggcaacatggcgaaaccccatctctaccaaaaatagaaaaaattagcctggcgtggtggcatgcatctgtggtcccagctacttgggaggctgaggtgggaggatcttttgagcgtgggaggcggaggttgcaatgagccaagaacgcacgccactgcactacagcctgggtaacagagtgagacgccgtgtaaaaaataaataagtaaatataaatctttaataaggattgcttttcattaaataacctctgacagtgtatgtgtgtatatgtgtgtgtatatacatacatatatatatattttgagacagggtttcactctattgcccaggctggagtatggtggcgcagtcatggctcactacagcctctacctccctgggctcaggtgatcctcctgcctcagcatcttaagtagctgggactataggcatgtgccaccagcctggctaattgttgtatttttttttgtagagaagggtttttgccatgttgcccaggctggtttcgaactcctgggctcaagcaatcctcctgccttggtctccgaaagtgctgggatgacaggcgagaggtatggctggcacacctttgatactatttatgtaactttgtttatctgaacttctctcccctctccgtccagcttttttttttttttttttttcaatgttgcctgctacttttggcctttggttggtagtttctgtttcctttccctaggtaaggatttacaatgattctaggtaagtgtgcaaataaatgagtgtattttggattcctggccccctgtcttagaaaggagaagctctccatcagcttagggacagagagctctgtacaggaaatccagttcaaaaaggtcaagacccattcttgacctacccacttaatatctaattaagcatcaatattggaaattttgtattttttattttttggacaaatgaattctatccttatcactcagcttcagaaaacttaacccttaataccatcctctgtctcttgaaatgagcgtggcttcctgtttctgagaatgccttcacccttaataccatcctctgtctcttgaaatgagcgtggcttcctgtttctgagaatgccttcaagccctgtaattttaggcaaaaccttcaggctaacaacttsaggtttgcaagcattcatcattgatatatgataggatttcctggccttccttctcgttatgcaatttgctaaaggagacacctggaaggcagaaagccctgcttcttctaatctgcttcatatctcattggtgcagcttctccttgtctcagaggaaaaagaatgcagaaattgggggttagtgaggggtaaatagacaggaaacttgtgagaaggaagtctgtgttaccaagctcgttagcatttgtccagcccctgtcttctctccacagctctgtaagaatttgccatgtgacagttctcagtagcttttgtttgttttgttttgttaagacagagtctctctgcatcgcccaagctggatgccatggcaggatcttggctcactacaacctctgcctcccaggttcaagcgattctcctgccttagcctccaagtagctgggattacaggcaygcacaactatgcctggctaatttttgtatttttaagtgattacaggcacacacaattatgcctggctaatttttgtatttttaagtagagacggggtttcaccatgttggccaggctggtgtcgaactcctagcctcaagttatccccccacctcagcctcccaaagtgctgggattacaggtgtgagccactgtacccagccttttttttttttttttaattttctaaaatcattcaagaagaacagtttgtaaacaaatatctttccacttctgttccccaaaaagtattggttgttaagagtaaccatgggttgctaattgtgaaagcagtgatgagcatacatgaagattcattatacattattctctctacctatgtatatgttagttttccataatgaaaagttaaaaagggttttatgaagtctaatcagagctttgtacacaactattatttgaagctccgtcactgtgggaagcgtcagatttatggtttctaatccgagtccaacctgttgtttattaaaaacaaaagaaaatctggaggttcctaaggcatgtcttagtatgaacacttttaacatgccaactgttaaaaagacaatggttggtttggatgcgagtgtttaatttgtgccaaattacacaggatacagtaaatatttagggaatggcaagaatacaataaatcctctaggccttcctaattcagttggttaggaaaatctcactatgacctttctgtaacaaaagagacaggctcctgttcagttttacctactgtacagtctcctttattccatgatccttaggccaaggagacactgttctcatttactcaagacgaatttgtgtccaaagcccacatttatgcctatagtcaaaaatagctctccactttgggaggctgaggcaggcagatcacttgaggtcaggagttcgagaccagcctggccaacatggtgaaacatcgtctctactaaaaatgtaaaaattagctgggtgtggtggcgcatgctttaatcccagctactggagaggctgaggcaggagaattgtttgaaccagggagtcagaggttgcagcgagccaagattgtgtcactgcacttyagcctgccgacagagsgagattctgtctcaaaaaaaaaaaacaaaagaaaagaaaagaaaaaaattaaaaattagccaggcaagctggcactcacctgtagtctgtagtttcagctactcagaaggctgaggaaggtcacttgagtgtgggagaaagaggctgcagtgagctatgaccatgccatcatactccagcttgagtgacagaggaagaacctttcttgaggaaagaaaagaaaaggcatatggagctgtgctctggtcagagagactgaggaaaggctggctgagctgagacttgaaggagggtggagtgaggcctgtgtgcaaagtatcctctctgcctgatkcacctcaccctgagatggcaaaaggcaaggtgagttctggggtagatagaaaccctgagtggatgggggtgcaatcaggagatggtgtgacaaacctggcaggtaggccagctgctagccctgagagttccctcatgctaattactaaggcacttcttcctctcctagcagttacagccaaagccaaattttggccttggcttgtggagtgtgtgacctggattccaggccccacttaccccctcagccaggcaccaactccacacstatatacagtggccctggctgcagaggcaggcaggggccagaccctgcgaagccttgtagaatgtttaaagaattctgtttttagtttaagarcaatgaraagaaaatggttgggtgggttcatatttgcagtgatccctctggctgattaaggaccacagagaaacatcgccaatttagagaagtccaccgtgagtatattgttccccactttttcggtgagtcagccttcctcagaaaccacacttcaaaaatagctttttcggctagaaaattggaactcagtgcaaagctgcctgtactcctcaggaaatattttgctgcctctttggtggttctttttggccttgcagcctgacaggagtcaccaaatgtggccttgagttgatccgaggatttctgttatggcaaacttttattgccaactttgcaattggtggccttggacaaatttattaacttgtatattctttagcttgcttacgtgtaaaatgaggtgggttagcaagatccttcctagctctaaaattttgtgagatttttttttcccctttcagtaacttgtggtaaaactatagacatagctactgaatcacgttgggaagtttaggacctgtatccacacccactaatagccaccttgtttcagagagaaatgagagtgcagagggattttccaggatgatccttggttatagtaggttacttagagtgtgggggaaatccttaaagccggttaacatgacagaatgggttctactgtgagttgctgccacaactggcacccttgttttcttgtttctctcctggatccctttggatatgtttcttctctgggcctcagtttagttatctgtataattggactagactgattcatctttgaagactgctacaaaatttctgtgatgggattctaaacctttttataaccataaatgactgctctagaatgtgtaactattatagggaaagatttattaattatttattggaattgggtaatacatgttcatattttaaatatatataattaaaatatatacaaacatatgtattaatatatttttaatttcacaatagaaaaacataacggtttttgagttgcaaaactaggtcctgctgtttctcccttctttctcaccatccctcgttcttttttttttttttgagacggagtctggctctgtcacccacgctggagtggcacaatctcagctcacttcaacctccacctcccaggttcaagtgattctygtgtctcagcctcctgaacagctgggattacaggcatgcgccaccacgcccagctaatttttatgtttttagtagagatggggtttcgccatgttggccaggctggtctcaaactcctagcttcagctgatccacccacctcagcctcccaaagttctgggattacagttatgatccaccgcacccagccctctttcttactctaggactatcagtaagtgaaactccacccagcagaccacagaggcagctgtctacatgaaagatgggtggcatgtttatggaaagttttgtcctaaaagtctttggggtttgtcgtgattgctgtgataaacagcccaactgttgactaaaaagcatctcaggcaagaactggttcccagatttctgagaatttctgttaatctgtagagggtgtgtgtgtgtgtgtctgtctgtctgtctgtctgtcttttgttccaaatacaggtaagtgccagggcattggagtggtatacattttatcagatacagaagaaaataatttctgctcagagtaacttcgttagtttttttccagcttggaaacttgcttgctttctaattatagactgttgttgggcaggttatgaactaaaaccagttctatagaacttcaggctctgttcttttctcttggacatgagcaaccagaacaggtgaaacaaatttggaattgcttgagttaggcctggatttttcattgttccttgtcctggactttaggcactcaacctaaatatgtattttacttgtctagaggaaaataaaaacagcttgacatgaattttgttatatgcttcacttcatgaattattattttaataagtattccagaatgaactgagtaggagccctttgatgctttgctgccagccaacccactcctacttgcagggtatgcaaaggaatttccttgaatttcaatcctccatttgagttctttgtgttgatttgatctttgttttgctttgcttttttttttttttttttttttttgagacggaatctcgctctgtcacccaggctggagtgcagtggcacaatctcggctcactgcagcctccgcctcccgggttcaagcaattctcctgcctcagcctcccaagtrgttgggattacaggcacatgccaccaagccaggcttagttttgtacttttagtagagacggggtttcaccatgttgaccaggatggtcttgatctcctgaccttgtgatccacctgcctcagcctcccaaagtgctgggattacaggtgtgagccactgtacctggcgatctttgtttttctttacggctcagaagaaacatttgggtaggttataggtcaaagtcaaggctttgtaaagggttttttacattcaggagcctttccccaatttcatttgttcatttttaaataccaattttttttattcatcaaggaatacatggccattgaaaaaaatatgaaaataaaaataagcaaatggaaataaactccccttatcctactatactgtagtctttggtataatttttcagtttctctaagtatctttttattttttaattgagacaggatctcactctgttacccaggctagagtatagtggcaccatcacagctccctgcagccttgacctctgagctcagatgatcctcctacctcagctttccaagtagtggggactataggtgtgtgctgccacacctggctaatttttgtggggtgtttttttttttttttggagagatggggtttcgccatgttgcctaggatggcctcaaactcctgggctcaagcgatgcatccgccacctcggcttcccagagtgctgggattacagacatgagctaccacactggcttagaatcttttgtgatgctgggaattagataatattaatctataagagtttcaaggcctcttcattcactctccactctctacaacctgctgaaggggattgtggttttgattcatcagattctttccttcctcaggcgtataagggaattttttctttcccagaccaattccggggttgtctcagaagacagggcataatccagataaaataaaacagaaagaaagtgcagagaggccaagtagacccaggtaacacagaaccaagagggaggggaagagggcagagagaatagcacatgtgctgggtattggggaaggttggggcactggggtgctatagactggcacaagaggatctggaggatgagcagaaaaccaggatttggattggagaaggaacagcttcgctgtggttcatgaactgaaattccattaatgttgttggcgagatgggacaagtagagatggacttttgtggttggtctgtgccaagcggcggttgtgggttggagagcagctgcttttatgtttttgtatttccttttttatatattcattttatttctgattatgaaataatatactaattatagaaatttctatttcttttttttttggaaacagagtctcactctgtcacccaggctggagtgcagtggcgcaatctcggctcactgcaccctctgcctcccgggttcaagtgattctcctgcctcagcctaccaagtaactgggactacaggtgcctgccaccatacctggctttttttttttttttttttttgagacatagttttgctcttgttgcccaggctggagtgcaatggcaccatctcggctcactacaacctccgcctcccaggttcaagcaattctcctgcctcagcctcmgagtagctgagattacaggctcccgccaccgagcccaactaattttttgtatttttagtagagacagggttttaccatgtaggccaggctggtcttgaactcctgacctcaggtgatctgcccgcctcagcctcccaaagtgctgggattacagacatgagccaccatgcccagcccaggcccagctaatttttgtatttttagtagaggtggggtttcaccacgttggccaggctggtctcaaactcctgacttcaaaagatccacccaccttggcccccacaaagtgctgggattacaggcttgagccactgtactcagcctagaaacttctacttctgakctatctaacttatatgataaatctacctaacagacaatgcattatgtattacaattgcttttacccactcaatatataatgtcttcccatattattaaatgcacttcaatgttttaaaaatagctgtgtatacaataccacagctattggtattgttggccatataggtcgtttctgaaagtttttaatcataaataccactaatatcaatactgttacaactcaatctttgcgtttttgtttaattccttagactatattctgaggaggggatttattggcttgaaggatacaagtatttgcaaggattttgaatgaaattagcaacttattattgtagagtttagttttaaattatgtacaactggctgggtgcggtggctcatgcctgtaatagcactttgggaggctgaggggcggggggggtggggggtggatcacatgaggtcaggagttcgagaccagcctggccaacatggtgaaaccccgtctttactaaaaatacaaaaattagctgggcatgttggcgggtgcctgtaatcccagctagtagggaggctgaggcaggagaattgcttgaacccgggaggcagaggttgcagtgagccgagatcgcgccattgtactccagcctggggcaatgagtgaaactccatctcaaaaaaacaaacaaaaaaaaattatatgcaactactcttaccactgtttagctttgtgcatcttaatagaaatttttagctttttcaaagcagtttgacattgattttatcccttaatttcacccattcaggtgtgaaaagcttttactcttaattttaaaatgttcaaaattccttttatgtttcagtaggcagaaacagagctaaaatttaaagggatttttgaaaaagaattgtatttatcctgaatacgaatcccaatatgagcatgagttcttcatctcttccatttcagagaaagtaagctcttggcatcaccctcccttatcctgtcttcccccttccctcatttcaaatcagcaatgttactattcagggcatgaggagaacacactatcgtctgtgtccttcccaagtaaagtcctcattagcctctagggtaaaaagttaagtaactcattgtaccagcccaccacagacgtcttgttaagggttttgtatacacagtggattggggtgggcgactataatgcccaaaactttgtctaaatttcttcttcttattatcattattgagacagagttttgctcttgttgcccaggctggagtgcaatggcgtgatctcagctcactgcaacctccaccttctgagttcaagtgattctcctgcctcagcctcccaagtagctgggattacaggcatgtaccaccacgcccagctaatttttgtatttttagtagagatgaggtgccaccatgttggccaggctggccttgaactcttgacctcaggtgatccacccacctaggcctcccaaagtgctaggattacaggtgtgtgccaccatgcctggcataaatttcttctacataatgtgtttcctccattatcaatagtagtgtaattgctattacatactaaacatttggcttatataagaatgaatctggaactgtgtgcttgaaaatctgcattggtaactcatctcctaatgatactttgggcattttaaaacacttataatgaactctctatgtgaggagtcataaactcaaatgcctccatggggcaggcaggttatgtaagagagcgattcaggccagctattagaaaaacaatgattagactgggcatggtgtggctcatgcctgtaatcctagcactttgggaggccgagctgggcagatcacttgacgccaggagttcaagaccagcctggccaacatggcaaaatcccacctgtactgaaaatacaaaaaattagctgggcgtggtggcatgtacctgtaatcccagttactcgggaggctgaggcacaagaattgcttgaacccaggaggcagaggttgcagtgagccaagattgcgccactgcactccagcctgggtgacagagcaagactctgtctcaaataaaaaaaaaaaaaaaagaaaaacagtgattaatagcacctcactttgggcctatgtgtccatgatgcagtagagagcagtgtggactggagctcaatggagactgtttattctgtctgaatgagaaggcactcaagccagctgttgacatgtgggaaagtgggcctagcactgttattttcttgttccaggagaacaagaaatcccaagttttctggatttttttttaacacatgggtttcaagtaaaagttttttaaaacactgtacaggccaaacaaaaatgtgactgtatactggatctagcccatggaggccattatgtggcctgtattctacattcgtccatcatgagcttctctgaggatttaaataaacctttagagctaagaaaacacaacctactgtgtactagagcccaggatgtaaggaagctaaacatagtaccttcaaaagaagttttagtcttcaaaattgtggacctctaacgagatactttgatgggaactgcctgggtgtgatctcagctccacctttttttttttttttttttttaatgagataaggtctcactctgtcacccagccaggagtgcagtgggggaatcttggctcactggagactcaacctcccaggttcaagtgatcctcccacctcagcctcctgagtagctgggaacacaggtgtgtgccaccayacctggctaattttcatatttttgtagagatgggttttgccatgttgcctgggttggtcttgaacccctgggctcaagtgatcctcccaccttggcctctgaaagtgctgggattataggtgtgaactaccattcctggccttccccaccattttctaacctctgtgccttagcttcttcatttgagaaatgaactaatagtatctcctttataaggttatgagaaatcaaatgagacaatttagataaagtattaaagtattagtaagttctcaataattgtttttactcctctttctccttttgctacttctattgctgaactagtcacccctcattttttcttcctcatatttcaggtttctgagtcccttcaacatgatcctgggaggaatcgtggtggtgctggtgttcacagggtttgtgtgggcagcccacaataaagacgtccttcgccggatgaagaagcgctaccccacgacgttcgttatggtggtcatgttggcgagctatttccttatmtccatgtttggaggagtcatggtctttgtgtttggcattacttttcctttgctgtgtaagtgaacttgagttttttcttccatcatcaaaaaaatgtagaagcaattatccaacgggaattccataacccatttcttatatgtgttggcatgtcagcaaaagtgtcagaattttctaaaacagctttctacttgttatccaactagacccagataacacagaactgaggtcaagaactatgaggtcaaggccttatagttcattaattccacaaatatttgttggggcatctgctatgtgtcatacattcttttgttgttgttgagatggggtctactctgtcacccaygctgtggtgttatctcggcttactgcaacctctgcctcctgaatagctgggaccacaggtgcacacccagctaattttttgtgttttgggtagagaccggggttttactatgttgcccaggctgatctcggactcccaagcttgagtgatctagcttccttggactccccaagtgctgggattacaggcgtgagccacttcgcccagctgtgtgccatacattcttatggggacacaacagtaaacagaacaaagacaaatcccaggtcatacagcaggaatgtggcataacctgcactagactccagatttgtctaataagagagtctattctcaatttttaagtgccattcctattgtcctgacacaggaatgaatgtatttattatttggaagtagactatttattctccacttgctcargagatcataactagtgttaaaagtttggtaagtctataggaataattggctcagaatataggtactaaatactcagattctggtgaagagatctagatattctctaagttttacatgaattatttactaagactccaaacacttgaagcctgaaatagacaagaaataaaatcccagcctaatcagcagaaatctgattaaaattctagtatattaagtgacaggcacatccctttaactttcaataacatttgacatgtgcacttattccactaaatgaaattatttgcttgtttagggctttgttagattaagtccagaatatttatggatacatcccataccctattggataaaatatctgagccaacaaattcacacatttttggaattttcttcaggttttctgtaggtgcttaacgcttagtatttcaatgatactgtttaatcaaacagcttgctaattttaatacctttccacatcagaacctgagacaggccagtgtaacgaaatgtatcagaggtagacagttaagagtcctgatttctattcttagacctgctggaaaccagcatgtgatttggaccagtcatcctatatgggctgtagttcactcatctctaaagtaaggagattagataagtgattcccaaacggataattgtgacaagcattcaggatactttttaaaaatatacatttcccagccacatctttattttgtgggtcaacagtggtacccaaggatgttaggtttttagaaagctcgtcaactatttctaacgggtggtctaggttgagatcctccagatgaatccacatcagggtttttcaaaataagggtccaagatccacctacatcagaatcatctggagtgattattaaaataatgaattctggagccttccctcagttgtaacagtctgaatttggggtgatggagaccaggaatttgcctatttaacaggctctccaggtgatttgaatgtacatggaagttgtaaaaccactggtatagatcatatggagagagggttacctgtttaaaatacagattcccaggcctgtctctttaaggctcaggtggaggaggtccaggaaaggggatagggaatctgtggtaaaataatcaagcaagtttggggaacggtaggctatagaaactctgtaaagcccttagatttttacatctagaattctatacccaacactttgggtaaagcctccgggaggcactttaaaagtggactttactcacgtgctcctgcagggaacaagatacagataatcccgaatcgagcaagagttcttttctggaaagcctcgggtaagttgatttttaagtaggatggaatcccgttgattcactctgaatttcaggacatttaagtagcatctgcaaggtgatgatatcagtgtgtgaaggaaagggtgtggcttccagataatggtccttcctgttgaatacagcattttcctttaatgcagaaaaaaaactatgtatgacttgatggagagctttacataaagtccaaggagccatttgaaagcttgyatcaattcgagaagcagactggactgtggctaactaaggcagtttactaatagtgtgaagagagggagtgtaatattgatatggcaaaagagaattgttgctttggtgttaaccaggtgtcccttctctgcagtgatgtttatccatgcatcgttgagacttcggaacctcaagaacaaactggagaataaaatgraaggaataggtttgaagaggacaccgatgggcattgtcctggatgccctagaacagcaggaagaaggcatcaacagactcactgactatatcagcaaagtgaaggaataaacataacttacctgagctagggttgcagcagaaattgagttgcagcttgcccttgtccagacctatkttctgcttgcgtttttgaaacaggaggtgcacgtaccacccaattatctatggcagcatgcatgtataggccgaactattwtcagctctgatgtttcagagagaagacctcagaaaccgaaagaaaaccaccaccctcctattgtgtctgaagtttcacgtgtgtttatgaaatctaatgggaaatggatcacacgatttctttaagggaattaaaaaaaataaaagaattacggcttttacagcaacaatacgattatcttataggaaaaaaaaaatcattgtaaagtatcaagacaatacragtaaatgaaaaggctgttaaagtagatgacatcatgtgttagcctgttcctaatcccctagaattgtaatgtgtgggatataaattagtttttattattctcttaaaaatcaaagatgatctctatcrctttgccacctgtttgatgtgcagtggaaactggttaagccagttgttcatacttcstttacaaatataaagatagctgtttaggatattttgttacatwtttgtaaatttttgaaatgctagtaatgtgttttcaccagcaagtatttgttgcaaacttaatgtcattttccttaagatggttacagctatgtaacctgtattattctggacggacttattaaaatacaaacagacaaaaaawaaaacaaaacttgagttctatttaccttgcacattttttgttgttacagtgaaaaaaatggtccaagaaaatgtttgccatttttgcattgtttcgtttttaactggaacatttagaaagaaggaaatgaatgtgcattttattaattccttaggggcacaaggaggacaataatagctgatcttttgaaatttgaaaaacgtctttagatgaccaagcaaaaagactttaaaaaatggtaatgaaaatggaatgcagctactgcagctaataaaaaattttagatagcaattgttacaaccatatgcctttatagctagacattagaattatgatagcatgagtttatacattctattatttttcctccctttctcatgtttttataaataggyaataaaaaatgttttgcctgccaattgaatgatttcgtagctgaagtagaaacatttaggtttctgtagcattaaattgtgaagacaactggagtggtacttactgaagaaactctctgtatgtcctagaataagaagcaatgatgtgctgcttctgatttttcttgcattttaaattytcagccaacctacagccatgatctttagcacagtgatatcmccatgacttcacagacatggtctagaatctgtacccttacccacatatgaagaataaaattgattaaaggtttttttggtgagactttatttaatgcacatctgtcttaaatacctgagaaacttggcgacgaccctataaacagtgaagcaaacacttcagctgtttcaaatactgtttagtaaagcttgaatactttattaacttgcagccagaataaaacaattccagtgggatcctatttttaaacctggcacgagttttatatacatgttagcccagttttatatacatgttagcccattccattttctacaaggtgaattctgccgataaaatccaataaatttggagaaactaataaaaaaaaagatacctgtaattactaatggccagtagtcaattctggaagggtaataacagaaaaatgtaacatataaatgttgtaaattatgattacatttaaaaacaagctaaaatctgcaactaagatctttagggttgggtggtagaaaaagcataatgtgaactgcttcacctcttttggcaaaacctgtgtattgaggccataagctatgaaattggatcatcttttcttcttgtatatctaagataaaaaccctcttactgtgcattttgaaattcctgactttaataatactgtggctatacaaacaaatgcataggggctttctagaattttttttttttttttgagatgaggtttcgctcttgttgcccaggctggagtgcaatggtgcaatctcagctcactgcaacctccacctcccatgttcaggtgattctcctgcctcccaagtagctgggattacaggcatgagctaccatgcctggctaattttgtatttttttttttttttttttttttttttagtagaaatggggtttcaccatgttggtcaggctggtcttgaactcctgacctcatgtgattcacccacctcggccgcctacagtgctgggattacaggcatgagccaccgcaccggcctagaatttcaactactaatttacattaagcttttaattatgtttaaagtgcttttcctatcagagtttagcctcttagatgtagtatgtgctagacacttgaagttttgtttgttacagccctttcttagctatcctgctttgtatgcaaggatgttttctagaaatattgaagggtgagaaaacaaaactatcagccattgaaaactatatttaaatttggatacttttgtacatactaaattatcttaaaaaaatagaaacgccatatttctttcccatggcttgtctttccaaataatgtgttgtttttaagtctgtcacaattagacctattctcccctagcctgtttggtttgatacatgccacttatgataacataaaaggagaaagaaggcaggtgccaattatttactcaggtaaagaagagagaaaaggcaccaaagggtttttttttttttttttttttttttttttttttttttttgagatggagtatcactctgtcacccaggctggagtacagtgacgtgatcttgtctcactgcaacctctgcctccccagttcaagcaattctcctgcctcagcctcccgagtagctgggattacaggtgcctgccatcatgcccagctaatttttgtatttttaatagagacggggtttcaccatgttggccaggctggtctcgaactcctgacctctggagatcctccctccctggcctcccatagtgctgggattacaggcatgagccaccgcacctggcccaaagcttgattttctaatttctagggttcacactacttctattattacaaaaatctcaaattctatgcacctagtggctagaatgaataattaaggcctctaggaacttggaagaaggacagattggagttgtctggaaaattttttatggaggacacaggatctgacccgggagttgaagactgggtaggacgttcattaatggagaacaggagggaagtctcttggaaggattaatgcgagcaaaggcacaagggtgtgcacaaggatgtttcatcgagtagagtataaaggatttgtgggaaataagacaggattagtaaattggggccaggcaatggagtgccttaaagaataggataagtagttcaagtttaatccttcctgtaagcaagtttcctttaaaatatgtttgagagtgataaaatcaaattagacttacagagtaaacacatatgagcgtgtgtgtgtgtgtgtgtatttagccaaaaccaaaagcttgtcaataactatattatgtaaaacttcttttctataaaaacagcatgctgtctcccattgtccctctatatatgaaaacttgctgccaggaagttttcatatatgcagggtttactttcccattacttttcctagtgacacttagttttcaccatgttctgtggcttacgtgttctgcccctcacaggtacccctatagaaagaatactccaaaacaccaagggagtcaccaagagagaaagccaggcagggtgggaaactgaaaatctccactgattctgcagagaagctctaaggaacaatccttccatttcaaagcatcagaagggccaggagctcaattcatccttcacatttccataggatgaaacattatttgttccctttaagatactatgtgatgaattaccgcagaagagatggaaggagaaaaaaatgggaatacaatagttaacacttctgttatatttattatttaccagaagaaaacaataataaagcaaatgtttaaaaaattttctttaacttctgcttcgggaaatatgactctaaatttcacctgagtcactcaaattgattgcaagtagaaaatattgcctctaaatattatattttatctccttccaccttcctcttcagcccctacttcttcatggcccaaacattctgccttttacaaatacccttatcagatggtagcattgtttccagttctgccacgtggatcctaaagtattgctgctgacatagtctccatgctgtaatccaagagtcactatttccatttcttgttcttctagatggctctgttgcctcttacgccagttcttttggcagttgcacctgcgatttaagcatttgaggaaacgggggaaattaatcctggaaatttaagagctttgcagcaaaatttacaaaatttacatgccttaaaagatacagaataggtttgaaattctggccaaagcacctccaaaatcaagataaaacaacaatcataaccacagccaccatttattagacatttactaatgccagggactgttccaagagctttgagcacatggcaaagtaacatcatggaaataagagggcgggtgcctaagttggcctgggttcaaagactggcactagcatgtagtagttatgtggtgttgggcatcagttttctcagctgtaaaatgataataacagtatctaattcacaaggctattatacaagtgagtaatccatgttaacactttttttttttttttttttttttttgagatggagtctcagtctatcttccaggctggagtgcagtgacaccatcttggctcactgcaacctccaactcccgggttcaagcgattctcctgcctcagcctcccaagtagcttggattacaggcatgtgccaccaatgcccagctaatttttgtatttttagtagagacagggtttcaccatgttggcctggctggtctcaaactcctggcctcaagtgattcacttgcttcggactctcaaagtgctgagattacaggcatgagcacccggcctaacacttatttttaaaacagtatctcattacatcctacaaaagccttgtagggagagaaatggctcagagaagacaataacttgcctaagatcatacagctaggaagtggcagagcaggatttgaaccaggtctgcctgatttcagtgctcattattatacactgcctgtaaaaatatcactataagaatataaaatatatgttctttttaaaacatgtctttcctctttgaagcacactcctaatctgatggtcagaaatatttaaacatgaaatataagccaggcaagggggcatgcacctgtaatcctggctactcaggagattgagatgggagaatcacttgtggccaggagttcgagaccagcttgaacaacaaagtgagacccatctcaccttgttaggatttttattttattttttttagacaaagtcttactctgtcacccaggctggagtggagtggcatgatcccggctcaagacaacctctgcctcccaggttcaagcgattctcctgcctcagactcccaagtagctgggactacaggtgcatgccaccacgcccagctaatttttgtatttttagtagagacggggtttcaccatgtcggccaggcttgtcgtgaactcctgacctcaggtgctccacccaccttggcctcccagagtgctgggattacaggtgtgagccaccgcacccagccacctgattttcttaaaagagttttataacaaggctgggcagcggctggctgacgcctgtaattccagcactttgggaggccgaggtgggcggttctcctgaggtcaggagttcaagacaagcctggccaacagggtgaaaccctgtctttactaaaaatacaaaaattagctgggcgtggtggcacgtgcctgtaatcccagctactcagggagctgaggcaggagaattgcttgaacccgggaggcagaggttgccttgagctgggatcccaccactgcactccagcctgggcaacagagacaccatctcaaaaaaaaaaaaaaaatatatatatatatatatatatatttaaagcatcccccaagacaaaaaaaaattataaaacaacaacagaagtccaacactgcaaacccacttcatacttctgcctcataggaaaaccttaaggacaaagcaagtttttaaagggtttcaagtgtcattgtatcttaggaaagtaactcatcaactcatccatcatgtatgtaccttccagaggacactgaagatgcccagtgtccccagggcatttgtataacaatgactaggaatgtttctccctgtattgctaatgtccacctgccagtgtgatgaaccattttggtcatctgctctggctcctcttgcagccagttctcagcccacgatctttggctaggaatgtttttccaatattctgcccaccagagaggacctttgatgtgctgctgcctgccagccttcaagccaaggggacttccatggcttctgaccctctacctcccttgtgccaaactttgagaagagaggggtatgactgcaccctgcagggctctcccatggagaacaccagtagttaagagaaaccatgagccaggtatttaaaataactgtaaagctgcaataaatagttaaaacactgtgttctttgtattatggaatggaaaaagaagcattttatataagttattccctgtatttgtttatatatgcatggaagagttccaaaataatattttaaatttaaaaattttttaattatttagagagatgaggatctcactgtcacccaggctggagcgcagtggtgcaatgataactcaaagcagccaggccctcctggactcaagtgatcctcttgccttggcctcccaaagtactggtattacaggtgtgagccaccatgcccagcccagaataatattttaaaaagaaaatgtggcactgacccagaatagtaaacccagacacatatttactttaaagtatgaccaagctggtagttcagatcactggggaaaagaggaatcagtcactaaatgatcactggttaactatttggaaaagaaataatgaaatagccttcttgctttctactgactttaaaaattaaccctttaatctatccataatatcaaatattttttaaaaaccaaaaactataaaagttgcaagaaaaggcaggcacacattttaatcattttcaaagaggccatttctaagcagaatacaaaaggtagaaatcataaaaatagctagatatgatgtcataaaaatgtaaaacttacaaacagaagaaaatcaacttgtgttattggtagggagcctttttcccctttgcttgttagttttcaaagaaagtatgtctagtgtgcttgtgtgtgtgtgtgtgtctagcatcacacagtgcacacatacgcatacactcagaggcttggaggcagagcgggtgggaaagttg

SEQ ID NO: 96424 - DNA, 14503 bp, Homo sapiens
  misc_feature (1)...(14503): n = A,T,C or G
gtagtccagcccgcctggcccagaaacgccggtcagccccggaggcccctccccaaggaaacgatcaaaccccgcccccgagcttagctccacccagagcgctggtccagcgagctccgccccaggtaactcccactacgatcaaagacacccagccttggccttacaccctggatctagcaaggtttggttcccattcaacgaggccccgttcagagctcttcccccagacgcaatgagactccaccccgcccacgcccccagtccccatttgtctccgccctgagacacctgttactgtggccacacccacagcccaattctggtcctgtccctaaggcctaggccacggtcccggactccaggcttcaggcccagcccctcacccagcttgtccagcgcaaactgcaccacgctctcgggcgcctcaggggaggccatgtccgccgcgatgtagaagaccttgggggcgcccagcttccggcagttccctaccacctggggggggccagagctgcccgtgggcctctcctctacagcagcgcttccccctccaccgcacctgctggccatagggaggcccccgcctgaaaacccccccctactctgagcctcgggacccattcaacatcattcccaaaaatttaccactgcttgaggggcgcaaagtggaggcccgcgggccagaatgctggccaatttggtggttagtcaatcaccaacatctaaaacaggacatttcatctacaatttcctgattgctagcttctcttgaaatattgaaaggtttgtgcccaagagccatacccttccttgaagtagcaatggactgcttgttgctaagaagtgcccatccttcccttcgagtttaagaaccctggctatcagcacaggcctggacactcaatactctcatttgttaagaaacactgcatcttctagtcaccgtctcactgcattggcacaacatcctaacccatgagaaggtgggtttttttgtttgtttgtttgagacagagtctcactttgttgcccaggctggagtgcagtagtgcgatctcggctcactgcaacctctgcctccggggttcaagtgattctcctgactcagcctcccatgtagctgggactacatgctcgcgccaccatgccctaatttttttttttcttttttttgagatggagtatcgctctgtcacccaggctggagtgcagtggcgcgatctcagctcactgcaacctccacctcccgggttccagcaattctcccgcctcagcctccccagtagctgggattacaggtgcctgacaccacgccggctaattttttatttatttattttatttttattttttgtatttttagtagagacagggtttcaccatgttggccaggctggttttgaactcctgacctcaagtgatccatccgccttggcctcccaaagtgctaggattacaggcatgagccaccatgcctggcctaatttttgtcttcttagtagagaccaggtttcgccatgttggccaggctggtcttgaactcctgacctcaggtgatccactttcctcggcctcccaaagtgctgactacaagcgtgagccaccgtgcctggccagaaagtggttttattgtccccgttttgcaaatgaggaaactgagaggctcagagaggttaggcgacttgcccaaggtcacacgggaagcctggatcattgcagggattaaacccaggctctcttcccaccccccatgagcacccccaccattcatctagacatggggtggctcaccttctgcaggagagcctcagtgtgggcagtgagcaccaggtgggagcccagacgcgcgtagtgataggccagctcctcaccaacaccagcgttggcccctgtcagcagcactcgcgctccctggaggctggctggccatagccggggtggtcactctgggcggaggacaggacagctggcccggtttctccctccctcaaccccaggtgctcacctgggtcgaagttgtcatcccaataataggcgaagaacagggcccccagccctgtgaggagaagcaccttcatggtcctgtgtgggcctgcagagggacaggggacagaggtggccggcacaggcctggcccacagccacccgtgtttggtgggtgtttggtgatgccaccgccttggatccacgccttcctatccacctccacagccaccacctgtccaggccaccacggtggctccatgaaccaccgcggctccatgaaccaccgcacctgcaccctccccctccacccttctcagccctctccatctgcacaccttgcctctcctggactgaaaatccttcctgttccagttagaataaaaaccagactccttggtggctacaaacgccctgtgtggacctgtcctccttgctcactccgctccactaaaacagacccttcgctgttccttgaaaccagccagtcactatcctgcctcagggccttctcgtgggctgttcctactgcctagaatgctgttcccggatataacccaatggcttgctctctcacttctttcaagtctcagtgcaaaagtgacctccttcagctggatgtggtggctcatgcctggaatcccagcactttgggaggctgaggcgggcaaatcacttgagatcaggagttcgagaccagcctggccaacatggtgaaaccccatctctattaaaaatacaaaaattagccgggcgcggtggcaggcgcctgtaatcccagctactcagggggctgaggcacgcacatgcctgtaatccagatatttgggaggctgaggcaggagaatcgcttgaacctgggaggcagaagttgtagtgtgccgagatttgccattgcactccagcctaggcaacaagagcgaaactccgtatcaaaaacaaacaaacaaacaaaaaaagaacagtgacctccttcaagtgagggcctcctttttttattatttatttttttatttttatttttttttatttttgaggcagagtctcactctgttgctcaggctggagtgcagtggtgcgaccatagctcactgcagcctggacctcttgggctcaagcaatcctcttgcctcagccaatggagcagctgggactacaggtgggcgcaccagcacacccaactaatcatcgtattttttgtagggatggggtctcactatgctgcccaggctgattttgaactcctgggctcaagtgatcctcccgcctcagcctcccaaagtgctgggattacaggtgtgaaccaccgtgcccagcccaaggaccatttgttactcgttccaccatccttctctccctgtagaccatcagctccataagggcaggaaggaaatggaaatcttctactttgttccctattgggtcttcagggcccaaaactgtgccaggtacacagtaggtgctcaataggtaccagattgatcatggagtgatatgaggcacgtgggaggcgagaggtgaggaagccaagagacagctcgctctctggagacacccagaaggcatttgacacatggggctgggttggagacagaggtgcctgcgtcatccagatgaagatatgatttatgatttcagctatgggagctgattcactaattccagggagaaggtgaaagagagaaacagtccaggttctttttttttttttttttttttgagactgagtttcactcttgttgcacaggctgggattacactttgtaatcccagcattttgggaggccgaggtgggcggatcacttgaggctgggagttcgagaccagcctgaccaacatggagaaacccagtctctactaaaaatactaaattagctgggcatgctggcacatgcctgtgatcccagccaatggagcagctaggactacaagtgggtgcaccagcacgcccaactaatcatcgtattttttgtagagatggggtctcctgctgaggcaggagaattgcttgaacccagcggggcggagattgcagtgagctgagatcgccccactgcattccagcctgggcaacagagtgagactctgtctaaaaaaaaaaaaaaaaaaaaaaaaaagtcaatgggacaaggggaaggggacttccagaaccaggaagctgagacagaccagatggagcggatcattgaggagtccctaaatctcccatctgtaggtccagccctaggttctttgcctctgctgtcttctgggtgtctcctcctgacaacctccaggccccttagaaccagcaggacccaatccaggctcagcatgtcaccccatacctgcttctcttcccagctcaccatcacagaaatagccccactatcccctgtccctaaatgggagacccaggtattgtcctcacctccttctatcctttcacccccacgagctcatggttttcagatcttatcagttctccctctccagtctctccccagctgtcccttcctctctctctccaggactcccagattgtcacctccctcctagaccctaccccgggcctgaccacccccatctttcctttggcctcccttccatctccgatttggtctcccccacctccacactggcttccccatgtccatactcattctctccctgcctcttctgtcaatgcagccaaaggcgtctgtgtcaaaagcaacatggccatggcccttcctgctccaaaccctctcaggggtccccactgcaactgatggaaaccaggctcctcactgcaccccatgaggccctgcaggtatagcccctgactacctgtctatccttctctcccacggccccatctatgaatcgttcagttctcaaaataatgaactcctcacctttcccagacacaccaggcatgcccacagcaagaaacgagcttccaccttttccccttccagggacagcccatgaagctcctctgctcatccctctttccacccccagctctacactgactgcagcagcccggcagggggaagtgggaccagatggactgacgggtggacggatgggtggatggatgaatggatagatggacagatgcatgtatggatgcatagatagaaggatggatgggtggatggccagatgaatagatggatgggtggatggatggatgatggacggagagatgtatgggtggatagatggatgagtggatggatgtatgaatggataaatgggaacacataaatggatggatggatggatggatggatggacggacggatgcatggatggatggatggatggatggatggatggacggatagatgagtgggtggccagataaatagatggatgggtggacagatggatgagtggaaggatggggggagcagatggatgaatggatgggcggacagatggatgaacggaagtgtggatggatagatggaaggatagatgggtggatggccagatggatagacgggtgggggacagatggatggatgggcagatgaacggttgaagcagcccggccgaaatgcgggagaaatggggggaagccctgcagaacgcatcggccccttcttgacctcggcgggccttagcttcccctctgaacaaagcgggcgtgtgaccctctgcgcacccctaaaccgtgcactcacccgctcaggcctcagtttcccccactgtccagcgggggtggggtcccgggctgggagccacgcgaacgcccccacggtcctctcttctcggccgcctcctgccgggtccccgaccgcaccccctcccgtagggcacgggtcacgtgactcgaagcccacctcctcccggggaggggccgggcctcggggacccagcgccggagcgtcgccgggcaacagtgcccgcctggtcttcgcctcccagcaggggcccggccccgcccactgggcggacgccccgcctccgaatcgatcacgtgagggggccgcagcgctcgaacaatcccgccctctcgttgccgtgacaaccgccttgtaggcacactcttcttaaatccgggcccttggtcccccgcgcgggcgcgggtggatctctcgggctctgacttgttttcgggtcaccttcaggcttcagccaggcacctgacgcctctttcccctcacggtgccagggccgggccgaactacatttcccaggaggctccgcggccaggtgcaaacagcgccgtgctgactacatttcccagacagccttgcggcggcccgggccttaaagcgtccatttcccagcggccctccgctgcgagaccgcagcccttctctggagtctcagagccgcaagacaccacgactcccagaggaccttgcgtcgggcaagaaagactacaccttccagaggcctctgcggcgccgcgacaggaagcggcgggcgagccgagtgtccttgcgcgtggatccgagcgaccatggtggcccgggtgtggtcgctgatgaggtgcgtgggggcgccggaggggacccgagtccccgaaaaagtccatttttgtgggcatccctgtctccagtctggtcccgatctgctcttcgcttcccttagagtcacttccccttcgttccccgcctatgggccagatagggaaactgaggcttcagaggggcggggcttcccgaggtcgccaatcccctccctcctgcttcccagcgagcccttggcgttcagttcgcggtgtcagcctccgcctccgagcctcagttgtcttctctgtgaggtgggaatgccggtgaatcctgccgctggcgtggatgagaagtgaatgcgtgctcggagctgcgagtgacagcgggcaggaggcgcccagggacacttggtttctccagggctggaaggcttctagaaggtcaagatcttacgtcttcactgcccctgctcactgtgggactttgagtgacccactctcccyctctgggtttcagttcatcagttcaagtggcgtccagccgccctgccttgcacgttgtaaaacgagtgctgtatataataggggtctgggtcgacggtgctgcactacagagtgtcaccctgtggacggtgagccctcaggagggtctcactctccccgtgggccttggcccctgagggtggctgtcagtgtccgctgagcttctgctcctcccgtccctgcccgcaggttcctcatcaagggaagtgtggctgggggcgccgtctacctggtgtacgaccaggagctgctggggcccagcgacaagagccaggcagccctacagaaggctggggaggtggtcccccccgccatgtaccagttcagccagtacgtgtgtcagcagacaggcctgcagataccccaggtactacgggccgggaacgaggccagggtttggcgggtggtcagctctgggaggtccctccagccctgcacgatgttgtcctccatattgatgctgacctgattctccggcctgtcctcctccctccgcctctggggatgggctgctgagccttttcaccagttctttctgcccatctctttttcccagctcccagcccctccaaagatttactttcccatccgtgactcctggaatgcaggtaaggcacccagtttctttgcttggagggagacaccccagtctagcccctctccccacttcctggccattcctttctgtccatcctccttcctgcscgacacgtgtctcttagggatctaaaagggaaaggaggccgagcacagtggctcacgcctgtaatcccagcactttgggaggctgaggtgggcggatcatctgaagtcaggagttcgagaccagcctgggcaacatggtgaaaccccatctctactaaaaatacaaaaattaaccgtgcgtggtggtgcacacctgtaatcccagctgctgcttgagaggctgaagcaggagaattgcttgaacccaggaggcagaggttgcagtgagccgaggttgcaccactgcactccagcctgggcgacagggcgagactccatctcaaaaaaataaaatacaaaaattagcctggtatggtggcgcacttgtagtcccagctacttgggaggctgaggcaagagaatcgcttgaacccaggaggcgaaggttgcagtgagccgagattgcactactgcactccagcctgggagacagagtgagactccatccccgccccccacccaccccccaccgcccaaaacaaactctagagtttcccaggggttggaggctgggtgaggctgggaggggagtatcaccagtggccgtccctttcccacaggcatcatgacggtgatgtcagctctgtcggtggccccctccaaggcccgcgagtactccaaggagggctgggagtatgtgaaggcgcgcaccaagtagcgagtcagcaggggccgcctgccccggccagaacgrgcagggctgccactgacctgaagactccrgactgggaccccactccgagggcagctcccggccttgccggcccaataaaggacttcagaagtgttccctgacccgtgtgctggccccagggagcacagggttggcctggtggtgcccagagcaccgaggcctgggcttctggctcctgatggcttgtcagggcttgaccttgaccacaggccatagcactcccctttgccgtctgctctggtgcggggagtcagaggtcagagcggctgctcccggtgctccagaggctgtgctctggggccaggaaagtgctttggccaagcctgggttgtggagggtcttggttttggagggctgagaccagggtaggacagtggaagagccagagtggatagaagtggggtctgcttccctgcgggacacagggcaggagcccccagggccactggttcctgccctcctcagctcctgtccgcagtcctgtcccggcccttccttggccggactccaccctcattccaccctctcccgacaaccctagcaggggaatcctggtcattgaaggaaatccaggtgtttgttgccattcagagggtctcccggacattgcctctcccctgggacgccttccctgacacccctgccgcacactggccaggctacctggcagcctgcatggttcccccgcatcaggcatgagccctgggaggctcccagcacccagccacagagggcgatccacggggttgggtgatggcaagaggcctgtgcccagaaaccagtctggtggctccagacacatgggggtggtggggagcttgggtggggccagaggcctccgtaggatgctgccctgggagcagggagcagacaggtgatgctcaccgagctgggacagggtccccgttcccatgagttcaggggtttatgttgcttggtatagggaactgagcttaggaggggacagctgttacagaggagaggagcagagactagaggccggggcatctcccccactgtcccactcagagaggagaagccactggcctgagcagggcgtaggaggggtgtggctgggagcagcggcctagtctggtagaaggggagtccacagggcctgcccaccccattccccccaggagcgtggtcccgggacaggtcccccacatctgatatgcccctgtccttactgggccttagcagtggtgggggcaggtctagggtgagggagggatgagcagggcaggggagcatcactgaccctcagtgctgcaggaggaagccggtgctcgccggagcacccacgcactcactgtcccctgacactgtccaccaagtccttcccgaaggcccaggaaggagcagactgcaggcccattttacagacgaagaaacttgcacagacagacagttctgtctgcccagcctgtccggagcccaggctgttcaccacaaaccctcgcaggggatgcagaatttctagtcgcctcgcacccaggcacccagccccagccccagccccagcctgtgaggacaggaggggtttgcactcggtgctgtgatgccatggctgggccagagggcgtccgtccgctccaggaggcctctgcagcctcacacctgttaccgtcactgttagaggggaaggactggacgaggccagtgagcagctgctttctggcccctcccctccatccaggcggccgggtcctgcagctccacgaatgtggcttagttcttccctggggtcacaggctttatcccatgagttcgtcctcacccatccactggcacctgtgtgcaagaacatgcctggggtcaggggagttggggggccatggaagtggagctccagaaagcagaggtggctgaggcaggtctaggggtgactttgggaaggcgggaaggggctggggaaacacctgaccacacccacagccaagaccacagagcaaggcaaggctggcatgtggcacagtgccatttgacagctggggtcactcgatagctggaagcaggacgggctaggaacggagtccagggaaagctagcccatcacgatgtgggctgggcagagctagaagagagagcagggggagtccataggcggaggccagctggggctggggcgtgggggacaccgagtggctgcccttcctttcagctgtcaccacagctgcccgtggtcccgctccagccttgagcgcactttgcccggccctggcctggagtgagtgctaactcgccatcccaaggaatggtgggtgcagcagaaatggaggtgattagctgggtgcggtggcatgtgcctgtagccccggctgaggcaggaggatcactgggacattgagtctgcagtgagccatgactccaccaccgcactccagcctgggtgacacagtgagaccctgtctcttaataataaagccaaggtaaccaggagcaacgtgagccctgagggtccccaaccctgactggggggatgctgggctcagggtctccatggtaccagcccagagcatgttcagcccacctttggccccatccatccggtgccatacgggccagcggcaacctggcttctccccgtgtgggctgagtgctgagcagccagttttaattaaatctgaaaggacaaggtgacaaccgaagcagctgacagccacgcgtcttcccatctaacatggtcctggaaatgagtttgctgtcagtagacatgtaggattttataggctcagaataggggaggggcaggccatagatagtatcagaaagggcaacattcgactggttaaaaggcattgttcagaaagaatcaaccaggaaagggtgggcaaacaggaacagaagttctcactctgggtggtgggtttcctccaggaccagcagtctggtctttcagcttttgggctatttttggcttgaaggtggggtttcactgggacctgtccctatctgcctagacacttggctgcctcctgtcactttcagtagtgatcccagtgaacttgggcttaagagctgctctacgccttggcggaattcagtttttggagctggagggagagggaatgcagttctgtgatggcgccttcatcccgaaatcctaagagcagctcagtagcctcattttacaggtcagcaaacggaggctcagaaaactgcaagaacttacctggaggcaggcgatggcagaggcaacagtggaagccctgtgctctgacccctctgctggcctctggtggcactgatgccaccggagggctggtgtccttcatccccaggggtggtctctggaagaaggaagaggcaggccaaggggaggggtggtttccttgaggctgaggctgaggctgaggctgggagagaacttccaggcctcaacccccacaccatctctgcattccaggggcaccaggtccctgcacaccctgcctcatctcaccttgcaggagagtaagacccctcccgtcctcatcctggcagactcctctcctacaggcagggtcaccatgcccctgttctgaggcacagttcagcaccttttcttctccttgggcaccacagtttgcgtttgtgtgacttagctcaacaggatgcaggctccctgagggaagggaccatatgttaatagtaggcgtgttcccaaaccccagcatagagcctggggtatggaagatgattagtaagcatgggctgggcgcagtggctcatgcctgtaatcccagcactttgagaggccgagatgggtggatcacctgaggtcaggagttccagaccagcctggccaacatggcagaaccccgtctctactaaaaaaaatacaaaaattagccgggcgtgatggcacacgcctgtagtcccagctactggggaggctgaagcaggagaatcacttgaggcagaggttgcagtgagccgagattgtgccactgtactccagcctgggtgacagagtaaaacttcgtctcaaaactaaataatactaataataagaagaggccgggcgcggtggctcatgcctgtaatcccagcactttgggaggccgaggcgggcagatcacaaggtcaggagatctagaccatcctggctaacacggtgaaaccccgtctctactaaaaatacataaaattagccaggcgtggtggcaggcacctgtagtcccagctactcgggaggctggggcgggagaatgtcatgaacccaggaggtggaggttgcagtgagccgagatcgtgccactgcactccagcctgggcgacagtgtgagactctgtctcgaaaaaaaaaaaaaagaaaaaaataataaaaagatgatgattagtaagcatggatgaattaatggatgagtatagtcaatggcttgatggattaatgagtggatgggatgagtggttagatgggtagatgcatgcattcatgggtgagtgcgtagatggatgatggggtagatgggnnnnnnnnnnnnnnnnnnnnnnnnnnnnnnnnnnnnnnnnnnnnnnnnnnnnnnnnnnnnnnnnnnnnnnnnnnnnnnnnnnnnnnnnnnnnnnnnnnnnnnnnnnnnnnnnnnnnnnnnnnnnnnnnnnnnnnnnnnnnnnnnnnnnnnnnnnnnnnnnnnnnnnnnnnnnnnnnnnnnnnnnnnnnnnnnnnnnnnnnnnnnnnnnnnnnnnnnnnnnnnnnnnnnnnnnnnnnnnnnnnnnnnnnnnnnnnnnnnnnnnnnnnnnnnnnnnnnnnnnnnnnnnnnnnnnnnnnnnnnnnnnnnnnnnnnnnnnnnnnnnnnnnnnnnnnnnnnnnnnnnnnnnnnnnnnnnnnnnnnnnnnnnnnnnnnnnnnnnnnnnnnnnnnnnnnnnnnnnnnnnnnnggtgggtgggtgtatatatgaatgggtaggtgggtaggtgtaggtagatataggtggttgggtggttggttaggtaggtagtgagatgaatggattagatgaaggatggatggatgggtgggtgggtaggtgggtggatggatgggtgggtgggtaggtaggtgggtggatagatggatgggtgggtgggtagatgggtggatggatgggtgggtgggtggatagatggatgggtgaatgcgctggtggatggatgtatgaggactggtttgtctactccacttacccacaaagcaatggtccatcttggttcagagagtcttgccagtgaaggcctgctgttggggagagcctagcattgttgggctggctgccactagaggcacggccaacaatgaagacgtttccctggctgaggtgcaggccgaagtggacactcatgtacgttgccgtgctgaaactaagggcaaggtctatccctctgggacctgggcttcagctgcttcctggagacacgtgtaaggatggggaccagatttggagggaaaagactcctcttactgtatagaacaacctcaagagaccaccaagtagcccatggccagagacttttcactcccagagtgttaaaaatacatggtgctgtcccctgtggccattcccctcttcccccacagccttctggcagtttctcccacaagtttgctcctgttggcctcagagccttcagtgtgttcccccagccaggaaacgcctccattccttctgtggccagggcaacctgtaccatgaagctgcacttccttttattgagatggagtcttgcgcttctcccccaggctggagtgcaatggcgtgatcttggcttactgcaacctccacctcctgggttcaagcgattctcctgcctcagcctcctgagtatctgggattacaggcgcgggccaccactcctggctaatttttgtatttttagtagagatggggttttaccatgttggtcaggctggtctcaacctcctgacctcaagtgatctgcctgcctcagcctcctgaagtgctgggattacaggtgtgagctaccgcacctggccttttttattttttcgagatggagttttgctctgttgcccaggccggcgtgcagtggcatgatctcggctcactgcaacctccgcttcccgggttcaagcgattctcctgcctcagcctcctgagtagctgggattacaggtgcccacc

SEQ ID NO: 96425 - DNA, 96922 bp, Homo sapiens
tgcgccccatgggacccccagtgttcttgcctgtgacctcttattgcgacatgcaggtggtgtttttttttttttttaaactctgagctattttatcaataaaggatattttgtaataagtaagtggtgtccttgttgcccaaaggctgcctggagcagttattcctcagctgctggcacagcagactctgggtgctggcctaatgacctggggctccctcccagggccagtagtcctctcctccccgagatgtggctggctggttcccccaagcccctgcccttcctacccgcctttgtccacaaagcatccttactcatcatcacaagccaatgggtgagggtggctggaggagcctgagactggctccctgggagggaaaaaaagggagggttttctggaggaggtggcctttgggttgggtcttggaggaagagaaggagtacaccaagaagcaagatgggagggtgttttgggtagggggaagggcatgtgtaaaggatgtgattggtggatttgtggctgggtttgaaaacagccccaagctagccccgggtggtctggtgccacagccttcctgccctacttagtggccacagagtgggcagtccctggagcctgaaccaggtgggcctgctcccatgggcaggggggcagatggcaggctggcagcaggaggccgtgggcagggccagtgccagtggccagcccagggaggggagggaggaaggaggacacgtgaagccccagggtcctcagtgtgaggccacccctctacttccacattggcccagaatcttcactctcaccacctccatactggcgtgggccatgcttctgctagggacaaccagcgagacctccagtgtacccaccatcactgacagacacggggacatgggctttgctgaggacttaacaagaaagacatgccctgccctgctctcagcttcccacacctgccgaagcacccactgctgacacccagaggcctgatgtgggtgatgaggatggttcattgactcccttttactgatccaggctcttctggttttgtctgatgacctcatttaatccttatgcctgactgtaaggtaagtatcagccccttttatactagagaaatgcaggctgagaaagctgtaatgacctgtttgaggtcatccaggcccaggctctttctgctgaccacattgtcccccagtgcttaagcgtctgcaaggggcaggcccttgagcctgggagtagagaaccctgccctgactctggaaatggtggtggaaaggtacccctcctagagcaggactgtttgcaagcccattttgaatacattatctcattaatcctcacaaccttgctgagaatgatcattttacaaaaaacgaaattgagacttaaagtgacctctctaggtcttgaaatcacaaaactatgaaattcaggtgatgaagaattgtgattccatctcttcagccagctctcattcagtggcgctgggtatctgaagatcctgaaactgcacgtggatggattcagcaggtgaccatgctgtgattgattgttcatgtctgtcactgccacagaatatgtaattgatggcaggtgtgtcccaggctttccattcctgacagctcagtccaaccactgaattgtatgaaggaaaagactggggcccagagagaggagttgaattgcctcagagggcgtcacacagacacagctggctgagctggatgtagatctagatctagacccaggttgcccatcatgccacactttcacactgaaggaattgcatccgaactcaaggaataacaggcccacattcaggaaacatccgctgacctgtgtggcaggacctgtgctgggctcgtccccattttgctgtctctttcagttctcagatgaggaactggggggcggagtctcaggcacctgcccaggccccttgactaacggggtgcagctggagctgggcccaggacctggctcccgatcaggctttcttctctctcatgctccattcctgaagctctctgtgagtaggacctgcttttgatttcgccctgagcccatctgagggctacaggttgatgaggctggctgagaacagtagaggcgggagtggggtgggtgcagccctctgcctccaagagtaatcctggcaagtcacctggaggtgagggtggtgggtgcggggagcaggtgtgaggccagcaggggtgctttacctggcaattcaccaggtggacgggagctgtctcagccggtcacatcatccttccagacacccctttcttaagacgtccctgctggaagggaggcgctgctgcagaatgcagttaaagaggagctgggcagagcaggatgaggaatatcccacagtggcacctcccctctgagagcctgggtccttagttggcaaggatacccttgagagggccttaagagccagctctaccttgggatagctgctgagaactttggggctgctgagaactcctctttggagcactgtggctgaagggactcctgacacttgtttaagaagggacctgtggcaggagggcccagctgatctgccatcagtgctcaaggtggaggaggcttgtggcttcatctggccctggaccctctccccatcctctgcatggtccccaccctgtgtgtggggggccactggcaaggggtctgagaccttgcccaactcccacctgcaaatggggttgctgctggctggggaggaggcatctgcccagctggagtcggacctgggcagcctttggcttccctggcactggtggggctttctgctcccagatcctggttgctgtgggtgggagggcaggagaaggtggggaactcaggattcatgtcctgtccctgccaccacctgttgggctgtccttaggcaggactcggtccctctctgggccttggtgtccttgtctgcccatgcaggattgcccctgcggtccccagggttccccagcttggggctccatctctgccttccccccactgccactccctgccccagctccctgggaggtccagacatgaaggttcctggagttaatcagttgttcttagcatcaggctcatgggcaggatggcggtggtgttttcctcacctttgtacctcagcacaaagttaagcaccagttctggagtaacagatcagtttggggccctctgagatatgccgtggtgaaagcaatcatgacagtcctaagacattagggtctagggccggatacgcatcatctgaaattgatgtgattactatgcctatttcacaggcaaggaaactgaggcagaggcaattggctgaggttatccagaaccaggacataaacgtacccagtctcatctcagtggtgtcacccactggcctcactctgcctcctcaacagccctgcctccagcatcaacctctgcctcttcaccagccctgcctccagcaccagagctcaggctctgggtccttcccagtccagcaacgcccctgccctgtgtgagcttgggagcctcacctgctgaccccagccactcttggcagctctccctgttggctggcccttccacgagagcaggacccctggcagggggtgcaaggctaccaccctcccaggctctgctcactgtcagcaggggaggcggggaactctgggctaaaattagattccgggattcttcgtgctcccgcatccgtccgctcttccatctgggcttgggaaaggctgttgtcagaaggccagcgctggaagggcctggatgtcagctcgcaccctcccccgggcttgtctgctctgatcttctcacaccctggactgaccctggccaaaggctcctgcccttggcgtggccttgaggccagcgattgatcagcagtgatttcaggatgaggtgcccctttactgcgcaccactaccccctgggattctatgttcccaccttcctctgctctcccttctcctcccttcctcccttcccctatcctggcccttcccacttccgggtcctcagcgactccccctcctccaagcctcctgttgcctcctgctgatcccctgacccctgccttgcccagggggatggtcctggctcttcctgagcttacgggctccatggagcagtggtgcctgtgaggggactggaacagactggagaccaaaaaagagcctccctccctggaaagtcagggctatttctgtccttgtggcagcccatggggcccccagctctccggcagggcaggcgggggaggtgctgagggtcctgacctttgatttccccggggagagggcaggccccttctggagctgcagagtggaccccaccaatctcagagcagctgggactcagatggaatttcctccccacccatggggactggagctgctttaagagggaagagggctgggctgtggtgtgggggatccaggtgtcctggtgtcgcagcccagcccagcccagccacagccttgaacggagcatgagagactacctgggcccactgcttggattccccagtcaattgctggggagccaagggttaaacacagctttcctcctcccagtgcgggaaaggctggtggagcagccacagcagcaggctccactggtccctgtttgtcaggtgcagctttgatgcagctgttcagctgcaaatcccctcaggctgcagcccctctgcccctgctggcctggcagctggatttgggtgggcacctagctggcagctctttgagggattcctcagctgtctcggagtctagaggctcaggacgtgatcctaggaggcccaccaaattgctgggtggccctgggcaaggctgctcacctctctgggtttcagatgccttcttgtcaagtgagggggtcggacaggagcatggttctaatgatgttttgggtgctgccccaggagagatgaggggaaactgaagcctcctgccccccgctccccccacctttctacttgttgattgttcaggaagcagctctcctccctgctcaccaggcttcctcctctgccctccagcctgcacccacatagcctccatcccccaaccccacctgggctcaagtcacacccctcacctgtgtcctggtgaaatctaggtggctgagccccagaagggtcatcttgaaagacattccccagggcaggtggaagcgggtgggagaggggagtggccacctgcctgggcgggacatggtgtctatagtaaggctgggaggggcactggagttggggggcaacagaggaggaagtgggtgagatactctgggaggggcaagtggggaggtgggctctgggaaagcgggctcccatggggtcatggctcaggatgatgcaggagaagatgcagctcctaacaacagacctgctttcaccccagcagggctgggtctgtgcccagggacctcctctgagaggacagcctgagagggcagggacttggctacctcgtctgtacctgtgctcctcgccctctggcagagcctggcccggagcagctgcccagtaaatatttgttggagaagtgagttttcccagcaaactggggcagccttggttatctaaggctggggaccctgggctctgggagtgtgtctctgatttggggttttcattttctgttttgttttgttttctccatagtttcctagagaaattctgttggaaaattccatcctggccttggctgagctagaggcaggagaactgtccccacagcacccgggatgcaccagggcatctgcagaggtggtggcagggaccagacccagagagcagaggctcagacagggcccgacagagaggggatgggcagagagagggcatggttggggccattcctggagcagcatggaaagagcactggctttggagtcacagctggctctactgcttaccagatatatggtctcagacagaccgctaaacctctctgagccttgacttgctcacatttaaaatgtgccacgtggaccgggcgcggtggctcacgcctgtaatcccagcactttgggaggccaaggtgggtggatcacgaggtcaggagatcgagaccatcctggctaacatggtgaaaccccgtctctactacaaaaaatacaaaaaattagctgggcgtggtggcgggtgcctgtagtcccagctactggggaggctgaggcaggagaatggcatgaacctgggaggcggagcttgcagtgagctgatattgcgccactgcacctccagcctgggcggcagagtgagactccatctcaaaaaaaaaaaraaagaaagaagaaaaagggccaggtgtggtggctcatgcctgaaatctcagcgctttgggaggccgaggcaggaggatcacttgagcccaggagttggaaactagcctgggcaacatagtgaaatcccacctctacaaaaattttttaaaattagccaggtgtggtggcgtgcgcctggggtcccagccatttggggggctgaggtgggaggatcgcttgagcccaggagttcgaagctgtaatgagttgtgcttgcaccactgcactccagcctggcaatggagcaagaccttgtatcaaaaagaaaaaaaagtgagggagaaaataattaaaataaataaataaatgtgataacatcaactactttaagattgaggagcgtgttgagaggtagagatgacatgtaaggtgttcctatagagtgtgagggtacagacgggcacctgcaaatggcagacccattacatttaatcctctggaccctcaggttctcttcaaagtgggtgggcagaactccttgccccagttgtcctctgactcctgctcagaggcctgatggaaggagggtggactctgccctgtgtcctgcctgctctcaccccatgctttcatgggctccaggactctcccatggagagcttcagcaggccctctccagtgtggagctagtaggggaaggttctcaggcagctgtgtcaaatgtgccacatgtgagcctatgcccttcttgctgtgcccattccagacatcagtaatgggccccagagctctctccatgactagagacgaagttgcagggagtcccaggtggaaaacaattgctggtgtgaaagatgaaactgtttgtccctcagatctgtggagaaccccagccttgtccttgatgggtgcaggggaaagggctgcccaccctggtgtgaggggtgtcatccagggcagtaaagagggccatctccggagacctctaggattcctgtgctgctgctgcagtaggggcatccaggggtcaaatgtcagcactcaggaggaccctgatatttgaagaagcctgcatcagaaacacagccagtgagcagagagaagggtaggtgttggtggggtgagagcttcttgagccagcataccttgacttaggctgaagatgggcaggaagggtggtgaagggaggcaggggcacttggaggtcctattctctcagaagcatggaaagcaaggcaaggatggttcaagcaccgcctgagcccacacagttgaatggcctctggtgctgcctgtgagtctgattgcctggttccatggtgggcatcattgctccccatgctccaggagtggaacttgtgccccaattccctccaccagcacagtgctccacagcaatggggccaaccctgcagttcccatcctggcaacacagggggccctcatccatgtgtgtcaagatatttctgtctcattccctgtgcatcccaggatcatgtgtgacaatgcccagcaaatagtgaaaatggaagggctggcctggcttgtcagtggcccctgacaccagtctctcaggggtgcaaaaatatcccaggaaaagtggtgagatggagaaaactatatttatgagatctcctcccagagagggaggaataattgaggcctccagagacaagcttgaacaacaacagatgctgtttgtttcttaagtggcccttgtggagggcggcagggctgagtgcccttgcagcacagtgttggtgttgctgagtaggatgggcaagtttggggctggaagggaattactggagaccttggaggtaggcacgtgccctttgccactgcacccatctcagctgcagaaacaggatggaccgctggtccggggtacacaatttagagtgccctgtgtcaaatctaccttgacactagtctccagtgcactaagctccatgccaggctcaaaggcctcagagagccaacaccaccttgaaccctggctgtgagatggggtcaagccactggtgccaggggcacagagcactgagggatggcgtgagtgacccttggggaaggcaaggatcagcgggtacccgagtgggtgggccttggtggggagcagggaggagggtctgtgggagggtggcaccctaccgagggcttgaggccagcttcacaggyaggagaaggggaacagggggcatgctatccagattgtggcttgggtgtgggcttgctcatgttctgaggtgacttctggccccaggctgccccctcaggggcaagggacagggcagggaggccccaggccagcgaggccccaggccagcagccaggctccaggaggcagctgactaaaataagctaggatatcagagtctcctgtctccaggaagtggagaagagtgatgagtgtcaggagctgccctcgagtgcagaggagcaggggaagttggggaaaggagggagaggaaggaggaggagggggaagagggaggggatgggggaggagggggaaagagggggagaggggggggaggagggggagaggaggaagggaaggaaaaggaggaggaggagggggtaggagggggagaggaggaagggaaggaaaaagaggaagaggaggaggaggaggaaggggggagaggaagaagaaggggagccagagatggagggggaagaggaggagggggacaagacagggaggaggaaaaggggaggagacagcagtcacagctgaaggcgtccaacaaacttgttttcttttctctggcctgaagtctcaggctgttaccccctggatctggtaagggcacgggtcttctggagccctgctgcacacccagcacccttgtgtcctgagaatgtcttagaaacccagtcagtggagggcgggagacaggaccccgttgagtgcaggcaaaaggaaccaggtttccaagagcctgcttggaggaagagaacaacgtggtgctttgaatttgatttctagcccttctgttctgcaaatgaagaaatctggcccaggtggtttagggatgtatcccaggtcctgtgtctgatgatgcttggagccactctagagcccaggtctgtacacacacagggcacagccgtctgcgtggggcatcagcccacactactatgaggagcagcagcaggagggaagggtggcctgcagttgtgagaacaggcctctgggtgtggatgggagtgccgggggcaggcgggccctagctgtcccgcagccatcgggttcacatgacacccatctcagcctacctgccaggcttccagatatcactgaggggtaaatgtgtgggggccccaagccctctgcctttcatggccagtggggagcccccttcccatcctggctccagaccttacctgggtggctcgaacacagcctctcatgtccatactctggcctaggtggagccgcagaagatgcaggctgctctcactctgcccaggccccttgcctcccctgggcacaccagttccccaggcctgggctggggccacctgtgaccagtgcacctcctttccctccacctccctctgttggggtgaaccctgactgcctgagattgcggttcacccgctgtcctggagcctcagtgcagggccacggagggcagctctcgctccgctgagtgcctgttgcagtttacctgcgccactctgatcacagctggctgcgagctctttggggatgttcagcccctgtcaacctagggcatccacagctgcagggacagacctgcatccaggggcatgcaagggagtccaacgcagtggggcagcttgcacgaagggctgtcctgcaggaccttagctccctgcactccctctcctcaattcctcctcttctctttgtttaaatcaaatcttctgttgaagaattctctagaagggctcaaagtcatcagcttggctgggcgcggtggctcacacctgtaatcccagcacttagggaggcggagacaggcggatcacctgaagtcaggagttcgagaccagcctggccaacacagtgagtccccatctctactaaaaatacaaaaaaattagctggacatggtggcgggcacctataatyccagctactagggaggctgaggtatgagaatcgcttgaaccccggaggcagaggttgcagtgagccgagattgcgccattgcactccagcctgggcaacaagagtgaaactccatctcaaaaaacaaaaaaactcacaaaaattagcgggccatggtggcatgtgcctgtagtcccagctactcaggaggctgagccaggagaatcgcttgaacctgggaggcagaggttgcagtgagccaagattgtgccactgcactccagcctgggtgacagagcgaagactctgactcaaaaaaaaaaaaaattcctcagctctgcctcaccgactacagttccatcacattagtaatctctctctctctctctctctctctcacacacacacacacacacacacacacacacacacacacacacacacatcccttcctgctcaacagccccactcctcaggcgcagtcagcttggagcccctggaagcccccagcctctgggctctcttctctcccagctgggtcgcccctcacccctggcctgcctttccaggtccagggtgttatttcagggaggtgctggggtctgggtcctgtccttgaggaagctcccttgcgatgaccctggaggctgttaagagacccctctgtcatcccagtgatgccagccaggcagagatctgggcttggggcaggagccccgaggcatgtgaaaggccagggcttcatcctcccagagcctgggatccaccgacaagcaggccctctgcagaggctgcgccccccmcaccagctcttggctgccccagctcttggctccctctccctaccctccgagctccctagggctgggatgcgtccctcccgtggaccaggcagtcctggggtggatgtccaggaggttctgtgggtgtgaggccaatggcccagaggacagaggagaaagggcagctgtggatgccgcaggcttcatggagctcccctaggctggagggggctggatgggagccttggccttcagggtcccccagacttgagagattccaccaaatagagcccaggccccacagttaccctgtagtatttcccaaatactgggagtgtccagtgggttgcaatagaaataatcatctcaagggccacagtggtgtagtgttgtagagagccaggtgcagaaaacgctttctgtctctccttttcttctcatccacaagtgctgtctctaactttttccagaaagtgctaggggatgaggtttgtaagaatagcctgtctctagatctgcccaggagcagttcttggccctgggaatgatctggggtgggaccgtgtagagcagtttagttgctgtgtgacctcagagaagttactcaacttctctgactcttatattatcatctgtaaaatgaggttcctgctgcatctcactctcagggtcctgaggagagttaggttgagatgcttgtcacggaggcagtgtccatgcacagggcctgggtttgctgtcagccctaggcaggatgggtgaggaggtgggacctgggtgcttggctgtggctcagaaggtctgtcctggggtggcctggcctcagggactaggaaggtcctggctaggctcaggtggagggaagggtctggaatgaggcaggggcgaatggggcctggggctgcctctgagaccctgtttttggactgcagcacccaccagagctgccacctcttctcttggttattcaccaggaattaccctaaatgctacatctgttgtcataacaacatcttacccatccttagataaaagccctgtttgcaggggggtcaggctgtctccagctccccaagctccatcactgtccctcacagccctccttggggttccacagctggtcttcctccctcccattttagttttttagagagatcactcctctgtttctaaatttcttctctgtctccctttgtgttcctgggtctctctccgctccctttccctcactctctcctctctccttccttcttcctggaccctgagcctcctctcttggtttccctcggtcccttctcgctctccctccctccttctgcccgcatccctgcatgcagtggggttgtgggaaggtggctggtggggacaggcggggcctgctgccttggatgggtctgctctgcaggagcctcaggaagcccctcgggctctccagcctggggtgaggtgagcccagggtgggcatgttgctgcacgcccaagagcttccagcctctgtggtgtgcgtggccaggaaggcctaactgctcttgcagaagtgtggccaagggagctgcccttaccccaaccccaaccccgccccagcttcagctcaacagtctctggggttccagctctcctgctgtcctgactggggcttcacacacttgtccagtgccgacttctgctcagcaccatcctaagggcacccacacagaggccacacaatggttccaggaggggtcatctttccattttacagctcaggaaattagagaccagaagggtcaagcaactggctcaaggccacacagctggtcagtagaggaagtgggacatgaaattccactccatagccaatgctcttaaccaggatgctggatggacgacttcttcctctcggtccccttcctctttctccttctcaccctccccctcctctttgtccttcttcccctccccctcccctttctcctcctccccctccccttcctcttccccttcctcctactcctctcccctcctcccattcctcctcctcccctccccttctcttccttctgcctctccccctcctcatttctctcccctcccccttcatctccccctccccttcctccacctcctccttctcctcctcctcattctttcttactgtgtgtcgggccctgcatttaggaacactgggaactcatctagcttcgtagcaaccctacaaggttagagccacagttatctattttatcaatgagagaatcagggcacagagaggttaagtaactttctcaagtctcactgtagttagggctgtgttaggatttgaacccaggtctatctgcctccagagcctgggctcttagccctgagtgctatgcagaggggatggcagcagagagaggactgcatctgtgggacaaggatgtgggctttacacacacccaagtccctccgtctccttgattcctgtcaagccccctgtggtcccagccagaggcatttttgagaatcagaggaggaagccacgtggcacagtgtcctctttgctgaattctatgtaagggggaagcgagttccaggtcaccgggagaggcccacagatcctgtaacaacatgagcctctggggtagctgcagcacccttggaacccggaggcccttgtcactggacctgacacccagggtcttgggaggcaggtagactcacgtgtggctgggatgcctggactgagatgcagggctgtgggcctctctcccagcctgggctggcctggagaatccacagcccttcctgccccacagctcctgtccctggagagtagcctggccttggaacacactgtcccggagcgcggctgtcgggatgatggagaggtgggttatttttaacagccaggattcatcgacagagcctcttccagaccagggtaaaggatttcagggagctggggaccacaaactccaggtcctctcactctctccccaccctcccttctccattcctcttgctccagagagccctgaaggcttggtggcagcctctgaggttgatgggatctttaggcagaaggtggctgccacctagctatcaacccagaaagaggcctggcaatggtgggagcctcagaagtgagccccatccctcatctagaagctgcaggtcttggggctaatcagggctcactgccacactgggactacagagagcccaggtccaggcctggcctgctctgcccagcagccgccagtcctggaccccctctcctgcagggcctttctgttttctctgagggaagtaggttattctccaagttccccagactcttctcaatttgagccagaacccactggatcctgggtggagtgtggccccatcagggccctaatttctttggacacctcagagcttgctactgctggtcttatgaccctgttccttcctcgttctgccaaggaggggtggaaatgccttgtccatccccatctggtctcagaatgaccctctcctgccctcctgtgccctaccagaaagatgcttttaggactttcaaaagatacactgtcaccttcgtcagagcatctttatgagaacagcctgttgctgggagtgagccctgggctgggaggcagggaacctggcttctgccccgctctgctgccctgcactgtggggtgagtccctcctcctctctgggcctgggccttgccatctaggccagggtggtgggacaaaaaacgttcccaaagacctcttcttgcttggggtccacactgggtctgctcctggggttcaggtctgactagccaggtttgggggctaggggatgcttgctgatgaatgtgccagtttttcagggcccccgtttctgactgagacctctacaaacgcctctctaccttgcactcagagggacctttacaaatgattacccagatcagacaatgaatggcagcctttagggtatagctcagagacagtttacagaggcatgcagcaccccgaacaagtggcagggtgctttcttcaccccggcaagtcccccatgccccttctcagtcgataccacccagaaggagcaccattctgatttctaccacatggattaattttgcctgttctagaactttcatataaatgtaatcaaaacagtctcttgtgtcttgctccttttgcttaatataatgtctaggcgagtcatccaggttgtttcagcgtgagttcattccttttcatttctgagtggtatgccagtgtgtggatgtatcactgttgatccattccctgttgatgaacattgggttgtttccagtttggggcaactataagtaaagccaataggaacgttcatacatatgtcttttggtgcacagaagctttcatttcttttgggtaaatatctagaagtggagttactaggtcatacgataagcaaatatttagctttcgtggatattcaatcttccaaagtgagcctaccaatgaacacttccaccgccagtgtttgagagttccggttgctccacatcctcgccagcatttggtgttattggtcttcttgcttttggtcattctggtgagtgtgtagtatctctttgtgggtattttttttttttttggaaaagaagggagtgttttcttcccagttttcttagttgtggtcgaatacacataacaacatttaccatcttaaccatccttaagtgcgcagttcagtggtattaaatgcactcacaacttgggcagtcatcaaccccatccttccctagaaatcttttcatcatgtaaaactgcatctccccacttcccctcccccaagcccctggcagccaccattctactccccgtctctatgattgtgactactgtaggtaccttatgtcagtggaatcatgcagtatttgtcttttaatgactggcttctttcacttagcataatgcttcgagtttcatccatgttctagcctatgtcagaattttcttcctttttaaggccgaatcatcttccattgtatgtacaaaccacatttggttcatctgttcatctgtacatgsacacttgagttgcttctaccttttggctcttgtgaatcctgcttctgtgaacatgggtgtacaaatatctcttcaagatcttgctttcagctgggtgcggtggctcacgcctgtaatcccagcactttgggaggctgaggcaggtggatcacctgaggtcaggagttcgagaccagcctggccaacatggttaaaccccgtctatactaaaaatacaaaaattagccgggcatagtggcaggtgcctgtaatcccagctacttgggaggctgaggcaggagaatcgcttgaacccaggagacagaggttgcagcagtgagccgagatcatgccactgcactccagcctgggcaacagaatgagacgctgtctcaaaaaaaaaaaaaaaaaaaaaaaaaagggaactgcaatactgtttttcccagtggctgcagcatttcacatttccaccaacagaacaaaagggtttcaatttctccacatcctcaccaatacttgttattttcctttctttctgttttttttttttttttttttttttttaacaattgccatcctatcctaatgggttttaatttgcattttcctggkggctagttatgttgagcatattttcatgtgcttattggctatttggatatcctctttgatgaagtgtctgttcaagcctttaacctattaaaaaattgttttatttggtctttttcttactggcttatagaaattctttatgtattctgaaaattggtagtttctcagaatttttttttttttttgagacaggttctcactctcttgcccaggctggagtgcagtggtgcgatcatggctcactgcagcctctgcctcccgagctcaagggatcctcccacttcagcctcccaagtagctgggactatgggtgtgcatcacgacgcctggctaatttttgtattttttgtagagatggggtttcaccatgtctcccaggctggtcttgaactctgggctcaagcaatctgccccccttggcctcctgaagtagaaaatgtatttttaaattgaggtaaaattaccaatacgtgaaattaaccattaaaaatgtacaattcaatggcatttagtacatccacaatgttgtacaaccatcacccgtatctcagtccagaatattttcatcaccgtaaaagaaaacctcattcccattaagcattacttctcatttctgccttgcaacagctcctggcaaccgttaatctattttctgtctctatggatttgcctagtctgcatatttcataggtatgaaatggcatgatttgtggccttttgtgtctggcttttttcacttagcatattttctccaggttcatccacgttgcagcaggtatcagtacttcattcctttttgcaatgaaatgtggatagaccacattttgtttatctgttcagcaggtgagggacatttggcttgcatccaactatagtgactaggactgttatgaacattagtgtccttgtttttaattctcttgggtgtgtacctaggagcggaaatgctgggtcctacgataattctttttttttttctttttgtgacagagttttgctctgttgcccaggctggagtgcaagtggtacgatctcagatcactgcaacctccggcccccggattcaagtgactctcctgtctcagcctcttgagtggctgggattacaggcacctgccaccacacccagctaatttttatatttttaatagagatggggtttcaccatgttggccaggctggtctcgaactcctgacatcaggtgatccacccgccttggcctcccaaagtgttgggattacaggcgtgagccactttgcctggccccctacgataattctatgttgagctttttgaggaactgccagtgttttccaaagcggctgtaccgttttacattcttaacagcaatgtgtgagggttccaatttctccacctctgtaatatcactttttattgtttgcttttaaaaattctgatcattctagcgagtgtgaagtagtatctcattgtgattttaatttgcatttccctaacaaacagtgatgttaaacatcttttcatgtgctgtttggccattcatatattgtctttggagaaatgcctattcaggtcctttgcccagtttttcagttgggttctttgtctttttgttattgagttgaaagagttctttatgtattctggatactagatccttatcaggtgtgtaagtatttgattttcaaatactttctcccattctgtaggttgtcttttgactttcttgatggtattctttgaggaacaagtttttagttatgatgaattctaattacctattttttcttttgttgcttacacttttggtgtcatagctgagaattcatcaccaaatccaaggtcatgaatatttacccctatattttcttccaagggttttatagtttaagcacttactaaatgtaagatctctgatccattttgagttaattcttatagatggtgtgaagttgggcttcattttcattatttagcatgtggatatccagttttcccagtaccatttatcaaaaagactattcttttctcattgaatgttcgggctgctcttgttgaaaatcaatggactatagacatattgggtttatttctggactctcaattctactccactagtctatatgtctatttgctgttccctttgcctggaatgttctcccttcagtctcatgtggctcctttctatcattgagatcttctggaaatgtctccttagagaggcctcccattgtcactctctgccacatgaccttgttttattttccccataattctaatcgtgtttgaattcatataccctctgagaacagagtcttctgtcctagttacttggtgtaagcctcctcctgtacgtaacaggcacttaaatatcatcaaatgaacagtcagtgttctcgagcctggaacgcctttaccctccttctgcatggtaccatccaaaggccccctcctccctgtggcctttccattcattcatggtcagcagcactgttggccccttgcctctgtcgtggtgaagattgggcaagttgtcctcctgcatttgagtggaagctcccrgagggcagggcccccactctgtatccccacctctagcccacaccctgtagctcatacagaatgggcccttgccatggacagcctctgttcctgaccctggtctgaatatggagtgaagggtgaaggggtgaaagcaaatttgagtgaggggcttaatcaaagcgtggtggccacttaagccaagagacaaagttaaagattatttcatagcttttagcctcagcataggggaatgtcattctcaggtcagaaatgtggaagttaagtggaggatctggagtgaagaccaagacaaggagttcggttttccagaagctgacttaaaggctatggcacagtggacagaagaaatgccccaaggtggctgagactctggcaagtcacagtgggagctcccggttgctgagtgccgggtgtggtgtaaactgcccagcatgggatcctcagaaccaccctgaaagtttggctacactagcccatttacacaagaggaaactgaatccttgaaaagggaagccacttgcccaggggcacacagcccataaatgagaggctggacatgcagacccaggcctctgactccaaagggtccctctcctcccctgtgctgcccctagaaaggccagtgctacaggagttattcctgccaggggcctgccccagacctctgcccacaggatgccaccctgtcagcgagagaggtggggcaaggcccaaatatggaggagatgaagcaacagctttgggcacatgcagaagctgtttgtgaaggaattagaatatcaacaattttcacctaggcactggcttgaagctgatacttcattggattacatggctgagtgagtaaagatccttaactaggatcctaaataccatgagcctccttagcctttccctcctctcctgtcttctaagcctgtcccagctgccaccttcccccggccgccacagagcgcctctagggctgacctgcaggtgagcctcccagctgccagcttccctcttgccctttggggatcctttctggcttcttctgccagtaaaggcgggcattggtttcccaccattcctggggcaccaggaaggaagagtgtgtatgtggggcatggttataatatcctcagctccagggaccctgcagtgggagggaagggtggaggtctgaagatagagaggagggccagggcaggagggaagtggcagcaattcctgcgggacacccctgtgagttcatggactgactctaccccctgttgctgtgcgacctcaggcaagctccctcccctttctgggggagccggccatcctctgtagattggggagagcacagggctcacaaggttcatgagacgaggcagggtagtgcaagccaagcctgaaaacaggcatgtcctgggggccagctctggggggtggggtggttgttgcaggaggcctgtgatgggagggaggacgaggacagggaggagccagcagctgccatcagggttgggcactggggaaatcccacaggggccacacccatctccttttgcaaagcctggaagggcctggaggggacagaagagggagaggtgttgttaccaggcagcattgagtgggaatgggtgcgaggaggtttacaggagccagcgtgtaactgcacaccaggtgttcccatacgtcaggaaacgcctctccgctccagctaaggaagccaagatccagggcccgattccctgcctgcctcaccaagcttcccctggggagggcaccacccccaccacctggctcctttcacactgccccgtgcgaccgacccatggctccaggagagggggtttagagtcagggaccagctcctggcagtggttctcagaagctgccagcctcccagcctctcaaatggccctgccgaggtctgccctcggtctcctgttcaagcccctaccctaacgaggctgctgggagacggtttccctgcagggcacatgcagtctggatgactggctccttgccgggcctgagtgatgtccccggcgcctgcaatgaaccaaatgtggttatccgtgcctctgcccctgctggctcccagaagctggcaatagaattatagcctcacgtctgccctccgctgccttcccctcggccttcccctcagctgcattctggggcggagctgggtgtcctgcctattgtccctgttgggaaggcatggctgaggcttgggtggccaggatttcatgatgggctgggaaggaggaggatgagcgctggagcaggggtccagagactcagcctggggtccccaagggctctgggctgctcacaagaactgcaggcctggtcacctcgcccctgcctccccgacgctctctcctcggcagtcttatctctctgcaacccaggcttgcccagggcacttccctcctgaaagcctgttggtggctcctggctgcccacaggacaaagtccaggcgccaccccagttacttgccattccccagggtgcccagttcctccctggtgcatgaagggcagtagcctctggctaaggacacaggcccaggatcagctgctcagggatgtaccatccagagtcccctgacatcctgggtgtccccctcttcctggtgtccccctcttcctgaccaccctgagaccacatttcccagcccccttgatctaggcatgagttgggccaatggaaagggggtggaagagagacgtacgccacatccacttggcccatgaaagtctcccaagcaggatcctttactcagtttcccttttgttgcaagcatgcaggccacaagctaaagatggtagcactagagaataaatagagcctgggtccctgaatcaccacttggattcaccctagactgtgacatgagcaagaaatcarcctgtgctcagctgcagagatctgggattctttgttctagcagttcgcttactctgactcacaaaaaccttaggagtaacggtgtgcaagtggtgtaacatgagaccacttttctcgtctgtgaaatgagataataatgcctacgttgaaaaatgttgggaaagatggaccatcaggcacctggcccttagtaagccctcagtacttaaagctattttgcaatttctaggcctttgcatgtctcttccctatcctggccttttcttcccagccggctgcattctgggcctccttctaggctcactgctctaggaggcctttctgagcccccagcttccactctcctcctgggcctgggacttgcagcctggggacacaccagctggagcacttcccttgcggcaccattctcagttatctatctgtctgcctctccctggactgggtcccacatgcagccagtgcaaagcccggcacaaaacagggcccataagtggctctttcatttgttagcgaggctgagcctgcctgtctcaggccggggctggtgctgtgaggcggactgaggccctgaatgtgaaaccgcgttggaaaatggaaaagtctcccagactctcaggagcaggttccctggcccagagcacactcgagcccctgccctgccacagcccctctctcaggagccccttctgccgcagttcccttttctgcctgtttttctgtctcggagactcagtgtcagcagttgtcaagacaaatggcaccaagcaggactcaggtgaggcctggaatccgcaccagggcccctcgcagttctccacctgccacgctgcagcccctgctagctgctgaccagatgcagctgaggacagccgaatgagaacagaggccgccagagagcaagggactctcatggccagtgctggacacaagccagcctgggggtggtgccgacagcagccttgcttggctctccctcctgctcaccctccaccctccaccctccgtctttgcttcctcccaggtgcagggggtcaggagtgtgtgggctccctcatttgtccctgtgcagcgtggggtgggagcgagacacctaaaggcttgtagggagccacccacaggaggcagggggcggaggaaggaagggaggtggcacctggcccaggtgcggaaagcttgtacccctggacctatggttccgactcagctgtgacctgggcctgtgaaaggactggaggggagctgggcatggggccaagcctggcgtggctgggaaagaggacccagcctgccgctcgaggccactgccagtgcccaggtaagtctgggaagaggagccccggctggaccatgaggccccatttccccctcacgtttcttcctcactccctcgaacatgctctggatcacaggtagtgccggtgtagaggtgctgttgtggagggacaaggatggagaatgatcacaaacaatggtctttgtctaagagacgtttgcactttgggatggggcagtgactccctccagagggagccccgttcctcccggggcgttctaatccatgtcagccccattccagctgggtgaggacgctctatggggtgtactggcagaactccccgctggagctcactggggtccatggcagctgccccagggtagctctgcccatcgggccatctcagaggccggctgaggaatggcttccttgcttcaagtctgcctgaccctcgggctgctgcagcctacaggcagcctgtacacatggatcacacattagggatctacttccagtctgcagtgcaggcacacagacaccatgaaggctacagtgatgggcttctgagtagaagaggacatgctcacagtcccaccactgccaccgtcctgccagctccaggctgtctcggccactgggtttcgtgtcctgccttcagcaaacctcccagcagcagcacttcccgcctcaccagtgtctgcaggccctgcttagaatggcacagctgcacctcctcatttatgtaactcttctcttgttatcggaaactcaggtggcttctggtttttcaccattacagaaaaagctgcgctgaatgttttttgagcatagagctttgtccttcatgaggacggctcctcagtctagatttccagaactggggctgccagctcaaagagccaaaaggccctcagaaatgatcagagatgagactgaggtcagagaggggcggagacctggctaaggtaacccagcaggtctgtggtactgctgggctctggccccagggctggtgatccttcctctccttgaagctttgcgccctggaaaagagggcagagctgcaaatgcctctccaaagaggatttttaaataaacatctttattcagatataatccacttaccatgtaatcatccatttaaagtacatacttcaatggcttttagtatatccgtggagtgtgcagtcatcaccacaatcaatatgaacctatttccaccacttaaacaagcaaaccccatactctttagccaccacctccccctgcctccactgcacccccatctcagccttggacaaccacgaatcttcatactgcctctgcagggcgatttactctgggcgttccttaaaaatggaatgagaccatacgcgggcttttgtggctgcctcctttcactgagcagaatgttttccgggcccgtcatgccagagtgcgcatcagtacttcattccgttttattgccgaatgatattccgtggtatggctagacatttattttatttgtccattcatcagctgatggacatttgggttgtttctactttggggcttttatggatgatgctgctataaacatctgtataccagtttcggtggggacatgtgttttcatttcttttgggtatggacctagaaacggaagtgctggctcctgtgagaactctgtgtttaacattctgaggagctgccagactgtttttcaaagtggctacgccattttatatttccaccagtggcatgtgagggttctaatttctccacatcttcatcaacacttgttattgtcttttattttttattattagagatggggtctcactatgttgcccaggctggacttgaactcctgggctcaagtgatccgctcgccttggcctcccaagtagcttggattacaggcatgcaccatagtgcctggcttgtctgtcttttttattatagctattctagtggatgtgaatttgtacctcattgtggttttgatttgcatttccctgatgactaattaagtctaacatctttttatgtgcttactggccatttgtatatcttctttggagaaatgtcttttcagatactttgcccatttttaaattggaccatttgtcttttyattattgagttggaagagttctttatctattctagtcccttatcagatctgtcccttatctgataagtcccagatcttacatatctgtcccttatcagatatacgatttgcaaatattttctcgcatacagtgggttgtcatttcacttcctttgaagcacaaaagttttaattttgaagtccaattcatctaattttttggttgtttgtgcttttaatgtcatagttaagaaaccattgcctaatctaatatcatgaagatttacatttatgctttcttgtaagagttttatagttttagctcttacatttaaatctgtgattcattttgagttttatatatggtgtgaggcagggaaccaaattcattcttttgcatgtggctatccagtggccccataccatttcttgaaaagactagtcttcccttcattgaactgtcttggcacctttgctgaaaatcaatttgaccataaatacaagagttgattcctggattctcaattctgttccattgattggaatgtgtatccttatgtcagtgccacagtcttaatcaatgtaggttagcagtagtaaattttaaaattggaaatcctccaactttgattttcttcaatattgttttgtctactctgggttccttagatttctgtatgaattttgtgatcagcttgtcatttttttgggagaagctggatgaattttgatagggattacattaagtttgtagatcaatttggggagtattttcatcttcataatattaagtcttctaattgattaacacagggtatcttttcatttatttagatcttcttgaatttatttcaacagtgttttgtagttgtcagggtttaagtttttcacttttcttatgacatttattcctaaatattttattatctgatgctgtttgtaaataaaattgttttctaaatttcgtttttgggcattgcaagagcatagctcaccaaggagattccagccccttttcgtctgctggcggatggtctgtctgctccactctgagccaccctgggttcctgcagcatcatcaccctctgtggccaggatttggttacaggcctatgtgtccaccagactgtggctcctcaagggccccatcccagcatagagcccagtgcatggggcaggctgagctgggaaatgaagagtgaatgagtcagtgaataaatgaatgaacagactgaccacaggatctgagctcgcactgggttctgcgcatcctggggcagcggctctggagctcaggcytgtggagccctgcagcctgtcccaggcctgatatcgaaccttcccccaggtgacttctgcctgtgccccccacctacttgcagggacataaagcctgatgggtggtatccaggtactcccctgcagctgtggaaggcctggatccccagaggtggagctgggtgaggaggaagtggggagggcccagctacccagcagcccagcacctggacggcccgtccctccatcccttggccctggcccttgggcttccctgtgaactctccttggtccctcctgcctctctgcctttctgatgcctcgctcctcatctcaagcagacctggcctctttgatccaggcaggcaaacagagcccttccctttcctctgcccccgtccatcctcacagagagaagcgcggtctgcgtcatcagccacccccgctgcccacagtgacctccaatctccaaaccccagggcctctcagcagccccrtggagatgctgccctttctgcttccaggaacccctcttcactgggcatccctgcctgtttctttggcctcctgaccacatctccatctctctcaccttctgccccttgcatgacgggttcccagggtctctctttggttgctttcccacatccacttgattcttcccatgggcagtcagaccctcttctggggcctctgccatcaccatccccacccctgcccctcagtcccagccctccctctgcagcccaggcctgcattgctggcggtcagcaatgcttcctgtcctgagaaagtgcctggctccactctcttcctggctgctcaggggtgaaacttggcctcataccaaaaggagagtctgggttgcccagcctagctgggcgcctggcactgtcccccaggggtcttcctgcctttgcagcctcagcacctgcacctcctcttcccacatctagacactccaaaaacagactcagggccactccctggtggcttgagcttcccctgtgctgggcctgtgcacacacaattgcctgtaactagaagcttctcccctttctcctccattccacacgtccatcgtctaaaccccacctataccccaaggcccacctcagtccctcgttcttcatgaagcccctgctgagtgcacctttaggctcgccctcctccttgcctcctccagcccagcagcccctggctggttgcaggcagcggcaaaccagagcggggtcctcagggcaggctgctgtggtcgctgctccacctctgggcctcccttagggtttgccggattagccaaagcagtgcaggtggccccggctgccagggagggaggccctgggcctggaggaggtgcccactctccacgaccgcctggaggggcctgctggccagaggctgcccctaccacttctcaggctcacaccgtggtctgttcatttgttcatttgtttgttcagacatggtagacgccccctggcatattcaggctggtggaaagggcgccactgtgacagtgcaaagcatgaggcttgctgagaggatctatcaaacccagccagagggcatccagggtggtctacaaaacccacagcacaggacaaaggcagacacacacacacggtgagaactctcacaagcaagaagcaagggcgggatgatggggtggaacccagggggtgtcctgcactttcaggagagatggctgcttgagggtggctacagggtacccggtcagggacgtgatgtgtgattcatgcggtcaagccagagctggactcagaaacagcgcagacaacccgggggcagagggcatttctcccttaccccgtggctgggacttggtgagcaatatcccaacagcgcctgcacctgctgcagcatccctgggtatcagggcagcttcctctcctggaatctagatatgatggccatgagccccaaatcctatggctcctgggagcgaggcccttctggaggcctttgtgactgctgggttagaactcgtgctcatccattatccccggttttggctactagacagttttgaggatgcacgtgtattcaaggacatccatgggaagagagatgaagagaaaatgaacataaattatgttagtggcccctcatggggcctggaggtcagtgtgggtggtgacaggcatgcgcctaactcaggcactaaggaaggaagagggaggaagtggggaatggctctgaggctagagagggagggtgagcctctctccctagggtcttgcagggattgggggtggcaggagcccagatggggcagcagtgtccaggggtcaggatttgaatgtgcatggcctctgactatgcactcctggggtagggcagggcctgggagggcttggcagacgtggccttctgcatgcctctctgctgaggttggggcacgaggctaggccagccagaatttttgggccacctctggctgagcacagaaggcagctgtccccagtggaggggtgggggccttggcccttggaagcaggtcatgggatgtggatgcttagatatgtgcggacgtgagcagctctgcagtccttggcccctggctggccagccccggcgccaggcctgacttcccctcctcctgacactgccaggctggaggccagtggctgaccgagcaggctctgccttgggctgagctggagtagggagggtctgcaggactaaggaaaagtccactgctaaagctatggcagcctccatctcatcagcctcctaattaaagtgacactgcacagtgcctgccaaattcattggatgttgaccccaggatgtggtggccctcccaggactaggggaagaggcaggtgggcttcctggccacctaaggcagcctgagagctgcccatgagtggggtgggagggagggcagctgtgtaagctacactgggctcggagagacaggagatgtgagtccctgtccctgcctgttccttataagtggtgtggtcttgggcaagcagcttccctcctctctaaggaagttatgaggtcagttacactcttgggagtggagaagcttcctttgtaaactgtgaagtgctgccagaatgggaggtggagaggagagctggccttccaatcgatgacctgatgacctcagctggccaagcaaagaggtcctgggggacaggcaggtgtcttggccctctctccattttgtccccttgcagactagccgtgggctggggtaagtatgagtccaagactggaccccggcctggccaggacacaggcttggagccttgcattttgcaggctggaaggacatccttgagagaagagctattaccaaggcgggatggatctgatagctttgtgaagtgatcagcaaagagtgagcacccaggctgtccaaacctcaggccttggaagaagtgtggcactcgcaggactgcctgctcatggcaaggcaccaaggtacgaccttgtgtgggtcacgggagccgcacaagccaatactcttaccttttgcctggaaaggcctggagatgcaggcccacctgggccacctgagttacgcacaagtgtgttagttcagcacctcctcccctgcagatagacctcttgcccaggatcacagggatggtcagtaatagcccgagccaggactccagggcttagggcctgggcagctgccggaggtggggggttgtctaccttgtggcccctcccagaaaacatgcttgtaatttggaactctggttgtgcagccgccccgttggcagcttgagaggagcacgtgttggtgagaaggaacatggcatcctctgccttgctctggtctggcctctcatcctgcgatgcaggggctccatccacaactctctgtgaagaagaaatacagactttctcagacaaacgaaaattgaggaaatttattgtcagtacacgtgccttgtaagaaatattgaaagttcttcaaagaaaaagaaaaacatgtaagtcagaaacttggatctatataaagaaagagagcactgaagaaggaatgagggaggataaaatagaaagtgttttttttttattctgaattgatctaacaggtaacagtttgttcaaaataataatagcaacaatatattcaattatttaatcgtatatgtatattatacacatagaaacatatacttaagtatgcttatgtatgagtaaaataaatgagagcagacataagaggcaggaggcaggaattgggattattttgttattataagatacttggtacaacccatgaagtagtatttggtatttgaagatggatttgcattagttgtagacgtatactgcaaatctagggaaaatactgaaacaagtgaaaaaaataagaagaaaagtattttttttaaaaaggaagttgtcttagtgcgcttgggctgctataacaaaatacctcagactgcataatttataaataatacaaatttatttttcatagttctggaggctgggaagtctaagatcaagggaagagcagatttggtgtctgataagggctcactctctgcttccaaggtggtaccttcctgctgtgtccttgcgtggtggaaaagatgaatagccccctctcacctattttgttaaagcactaatccattattgagggctccaccctcatgacttaatcacctcctaagggcctcatttcttatcatattggtggttacatttcaacatatgaattttgggggaacatattcagaccatagcagaaatatgctgactatttattttttggtcatataaaatgctcaattaaaaaccacaaaaggcagaaaaagagtgggaggaaaaatagaggaacaaataacaaggcaacaaatagaaaaacagtaacgggtatggtagatattaatctatgtcaataataattttgaatgccaatggtgtaaatatactaagacagagattctgcaaagcaaaagaaactatcaacagggtaaacagacaacccatagaatgaaagaaaatgtttacagcctatgcatctaacaaaaatctaatgtcttgaatctatatggaacttaaacccacaagcaaaaaacaaacaaccccattaaaaaatgggcaaagaacatgaacagacacttctcacttgatcttagccaaaaggccgagaagcgatgaacagacacttctcaaaagacatctgcactggcaacaagcatagaaaaaatactcaatatcgataatcaaatcaaaaccacaatgagataccatctcataccactcagaatggctattattaaaaagtcaaaaaataacagatgctggagaggttgtggaggaaagagaatgcttatacactgctggtcagaacataaattagttcagccactgtggaaagtagtctggagatttatcaaagaacttaaaacagaactaccattcaacccagcaattccattcctgggtgtatacccaaggttatgtaaaccattctactgtaaagacacatgcaggcatatgttcatcgcagcactattcacaatagcaaagacatggaatcaacctagatgcccatcaatgatagactatatatacactatggaataccacagagccatataaaagaatgtaatcaatgtcctttgcagcaacatggatagagctggaggccatcatcttaagtgaattaacacagaaacagaaaaccaaatactgcatgttctcacttatcaatgggagctaaacactgagtatacacagacacatagaagggaacaacagacatccgggggctacttaagggtggaggctgggaggagggtgaagattgaaaaactacctattgggtaatctgcttattacctgggtgacaaaatgtcctgtacaccaaactcccatgacatgaatttacccatgtaataataaaccttcacatgtacccgttgaacctaatataaaaggtggaaagaaaaataaaataaaagagattatcagagtagattaaaaaaaccagacccagctatatgtagtctacaagaaayccattctaaatataaagatgcatctagattaaaattaaagtgatggagaaagatacaccatacaaatatttaactaaaacaccccccagaatatctgtattaattcaggcagagcagacttaaagagcaaggaaagttaccagagataaagaggggcattacataagaaaaaggagtcagttctccaagaagacataacaatcctgaatgtgtgtatgcacctaacaacagagcatagaaatatgtaagggaaaaattgacagaactgcaaggagaaacagatgaatccactactaaagctgaagacttcaacactcgttgatcagaaatcggcagacggaacaagcagaaaatcagtaagaacacagttgaactcaacaacaccagcaatcaactggataaaatggacatctatagactacttcatccaacaacagaaaattacacattcttctcaagctcacatggaacattcaccaagataccacattttaggccatgaaacacaccttaataaatttaaagaatatacatcatatactatctgctgtcagaccacaacagaattaaacctcaaatcaataaaaggaagatagctggaagccatcaaaatatctggagattgaacaatacacttctgagtaatatctgggtcaaagaagaaacatagagaaattaagcaatgttttgaactaatggaaatgaaaatacaactaataaaaatgtgtgggatgtagcaaaagcagtgattgggggaaatttataacattgaatgaattaaagtgattattagattctatattagaaaagaatatcgaagatcagtaatctaagcttccgccttaggaaagtagaaaaaagagtaaattaaatccaaagtaagcagaagaaagtaaataataaaaattagaatagatatcaatgaattgaaaacaggaaatcagtagagaaaatcagcaaaatcaaaatctgtttatttgaaggtaggtgaaactgataagcctccagccaggctaagaaaaaaagagggaagacacaaattactaatatgaaaaatgaaagggtgacatcactaatggccttttatggacactgaaaggatcataaaggactattatgaaaaacttgatgcccacaaatctgataacctaggtgaaatggaaaaattccttgaaatatacattctgtcaaaattcattcaagaagaaatagacaatctatgctgaaggatggtggttcatgcatgtaatcccagcactttgggaggctgaggtaggaggatctcttgaggccaggagtttgagaccagcctgggcaacataatgagaccctgtctctacaaaacataaaaaatttgatgggtgtgttagtgcgcacctgttgtcccagctacttgggaggcagaggtgggaggattgcttgagcacaggatgtcaaggctgcagtgagaggtgattgtgctacaccagcttgggtaacagagtgagatcctgtctcaaaaaaacaaaaamaaaaamaaacaaaaaaaaacaatccgaacaggtctatctgtgttaaagaaaccaagccaataattaataacctttcaaaacataaagtaccaggcccagatagattcactggtgaattctaccaaaaattcaaggaagaaattatatcaatattctacagtctcttccagaaaatataatcagagagaacacttcctaactcatcctatgaggccagcattaccctaataccaaatcacacaaagccattataagaaaataaaactacgggaccaatatctctgatgaacatagatgcaaaattcctcaacaaaattttagcaaatagaatctaacaatgtaaacaaagaattatacaccaagaccaagagggatttatcccaggtatgcaaagtgggtttaatattcaaaacttagttagatatataatttatcacatcaacaggctaaagaagaaaaatcacatgattatatcaatagagcagaaaccacatttgaaaaaatacgacacccatgataaaaaactctcagtaaactagtactagagagaaacttcctcaacttgataaagaatatctgcaaaaaacctacagctaacattgtacttaacggtgagaaacagctttcctgctaagatcaggaacaaagcaaggatgtctcctctcaccactctttttcaacactgttcaaaagtcttagctaatgtgataatacaagaaagagaaataaaaggtataccaattggaaaggaagaaaaaatatactctctgtttgtggatgacatgtttgtctatgcagaaaatctgaaaagaataaacaaaaaaattctaggctgggtgtggtggctcaagcctgtaatcctagcactttgggaggccaaggtgggtggatcacttgagcccaggagttcagagaccagcctgggcaacatgacaaaaccctgtatctaccaaaaatacaaaaattagctgggcatggtggtgcatgcctgtaatcccagctacttgggaggctgaggtgggagaattgcttgagcctgggaggcagaggttgcagtgagcctagatcacaccactgcactctggcctaggttacagagtgaggctctgtctcaaaaaaaaaaaaattaaaaattgaagaggacataaaaaaatgaaatgatattccaggttcatggattggaagaataaatatcgttaaaatgtccataatactcaaagcaatctacagattcaatgcaatccccatcaaaatactaatggcattcttctcataaatagaaaaaacaaccctaaaatttatgtggaaccttaaaagacccagtatagtcaaaactttcctaagcaaagagaacaaacctcgaggaatcatactacttgacttcaaattatactacagagctatagtaaccaaaacagcatggtactggcataataacagacacatagaccaatgaaacagaatagagaacccagaaacaaatccatacacctacagtgaactcatttttaacaaaggtgcccagaacatacactggggaaaagacagtctcttcaatatatggtgctgagaaaactagatatccatatgcagaagaatgaaactagatcctagacctctatctcttgccatatataaaatgaaatcaaaagtgattagaggcttaaatctaaaacctctaactatgaaactactacaagaaatcattggggaaaatctccaggacattagtctgggcaaaaactttttttcctttttcttttctttctttttgagacagagtcttcctctgttgcccaggctcgagtgcagtggtgcattgtctgcccactgcaacctccactcccaggttcaagtgattcccatgtctcagcctcccgagtagctgggattacagatgtaccccatcacgcccggctaatttttatatttttagtagaggcaaggtttcattattttggccaggctgggctccaactcctggcctcaagcaatccacctgtcttggcatcccaaagtgttgggattacaggtgtgagccaccaccgaagaatattatttagcactaaaaaggaaagaattcagcactaaaagactttagtgctaaagtctctttagcactgaaaagaaagcacatgagcttttaagccatgcaaagacaagaaggaaacttaaatgcctattattcaatgaaagaagccaatctgaaaaggctacatactgtatgacttcaactgtgcaatcttctggaaaagaaaaaactgtggagacagyaaagagttcacaggttgacagaggttaggagggagggagagatgaacagatggagcatcctggatttttagggcagtgaaattactctgtgtgatactataatggtggctacatgtcattatacctctgtcaaaacccatagaaagcacgccaccaagagtgaatcttaatgttaaatattgactttggttgataatgatgtgaatgggacttaattgtaagaaaagtaccactcaggtgggcaatgttgatagtaggggaggttgtgtatgtgtgggacatagggtataaggaaactctctgtactttctgctcaattttgctgtgaacctaaaacagctctgaaaaataaaatctattaacaaagaaataaacaataatgtctattaacaacaagcaaatgtaaactctagatctgaaaaatacagaatctaaaatgaagtattcacttcatagggttgacaacagattggatacaagcagaagaaaggatcaataactcaaaggcaggtcaaactaagttctccaagtggaagcacggaaagaaactaacaacaacagagcagaggaagggtcagcaaactgtgggcccatggaccaaatttgacctgctgcctgctattgtaaataaagttttatggatcccagacataccagacattgtttacagaaaagctgagtagttgtgacagagaccatatggcctgcaaagcctatattaagtcttgccctttagaaaagtttggcaacccttgtaatagagcatcaaaagctatcaaacaatatattaaatggcatgttgtatgtataactggagtcccagaaggagaggagaatgagaatggagcttgactaaatatttgaagagagaatgactgaacacatcttcataaaactcatgaaagacgtcaacccacagattcaagaataaaaataaccctaaactacataaatacaagaaaggctatacctagagatatcatcatcaagctagaaaacaaaggcaaaaagatcttaaaatcatccagaaaatacaatcaggttacatttaggggaaacacaataagaattgtagctgatttctcactagaaacaaaggcagctagaagacaattgaagaaccactttaaagggtctcaaggaaaaattctgtgagcttagaagtctatatccaataaaaatgtcattcaaaaataaaggccaaattaaggcatttttagacaaacgaaagcttaaggaattcattgcaacactataaatagtactaaaggaatttctgaggccaaagggagagaatctcagatggaagcccagactacccaaaagaaatagaaaggaccaggaattgtaaatatgtggaaaatataagagattatcttttgttttttactttaaaaaacacttttggccatttaaagcaaaataataagcatgtggaagtaaaatatataataacactagtgcaacaggcagagagagatcaatacaattacaccgttgcaagttcctttgattatctggatgcaagtgatggttacaggtgtatgcatttgtagaaatgtatcaagctatagcttaggatttgtgtacttcactatatgttaattagcctgcactttagtaaagtactgttaccaaagaaagagaatggacacgacagagctctgtagccaagtcaggactcacagatggaacaaatatttatgtttgtcacgggagagtcagggcctcctgcttggcagaggctgctgagagctgaagatggggttggctggggctcagcccacctcctgcattgccgaggaggcagcgttttcctctgtgactgactcctgctggagccttggctttgtggagatctgtgacagggcttggcccatgagatgaagagcccagaggcctggccttcctgtcctgagcctggtccgcttctggggaccctctcctacggtggagaaaaccagaatgtcatcctggaagggacttctgattcaagtacttgatggctgccattttatagagatgggctctggggctcagagtgaatacattctagaaactggactggaaaccagatctcctctttatactgtagcagctgtcttgggcccattcaagcttgtccttcctaggtccacaggtattcctctctctgctcttttctttaaaatcctcatgctactaatgctaaataactgctgataaaactaattcatactaaagtgtgagtgactgattccctgttaaagtctccccaagaaaggcatgcgtagtaaccatgtccaagaaaccattctaatggtgtgatcccattcagcacccaggctgaggagaaatgttttgggatgaagcaggcagaggtgagaaagggttgccagtctggagctagcatggtgcaggagagaaggcagggttctgtctttgcccgaactcatcggctcatcttggccacattctctgacttccttgggtctgtttcttctgctgttaaatgaaggctggacactcagatagcccagggccctttagctctcatgtcccaggcctgttcacttacagccttctggagcttttgctttacaataagcagtcctctgatcatcactggctctcacaatgttcttagaagcagattagaggcttgggtgtgtgggtctctgtgtcacaggtgaggaaatggggcagagagggcaggtcagtggcccggggccactctgtgggatgccactgcattcctcctcctcccccagctgcctcatgaacggggctaaagaagcctccccttcctgacagaacccactgcttctctggtcagcccaggacagtggagccctccctgggcaggggtgggggtgcagagccagccccactcaagtccccacgggaaagtacggggcccctgccagaggagcccttccctttcattcctccccaataggaggccacccccaatgccttcaccagctcccaaatgcctctcacctctgcaccttcgagcctttgcccaggagccccctctgcctggatgtccttcccttcttctctgcccagcacactcccaccaaagcggccccccaaggcaggatgcagctcatgctcccagtggtggacggctgttccgatcttacctaagggtttcgcttgctgcctgcagcctcctctgggggaaggagcatgtcttgtctctcctgtccacccacttcccaatgcacggttcctggcatgcagctgggtcaggacacgcgttctgagcgcttcagagggctggtgaggcacagtgtccctgaatgtcctcagagtccaggtctggcccagccacattcttgaggatgggaagctagagaggtagaaatatctcsgctgaacgcccagctggtcacataagagctggggaactggacacttcacctaatgcctccgagcctcaccttaacatgggagctcagctcctcctctgcagcctgtggtagtgagcaggtgaggtcgtgtatgtgaagacttagaccacatatgcctgggacataggacatgctcaacttcttcctgttaatcctcctcttacatccgagggaccctggccaggccacccggcgtcctctgttttctcaaggtcaaggagaataatagccccagcactgcccagcccctaagggatggtgagggtgcagatggttcatgatgacagttcctgggagctacaggagaagtgaggagggctggtgggcctgtggcaacttcccacagctcacaggagggctggagctgacccggctgctccgctctgctgcagaaacaacagctgctgctccctgggctcagggctgtgtctgcagtagcctggggacaccagagccccaacccagtggagcccctgccctgctgttctgtgttctccagtgcgagccccaagctggtgtgcatctctcttgctttagggatataaaactgtttcatttccaaaataaagagaacaaagcctccttgtggcaacaattatgcagtcataagaggaggcttaatgggcgttcattaagagttgcactcagggaatgacagctctgacagctgccagtactgactgtcrtagagtcatggcgctgttccctgagggagcatcaccccctcccctgagctgcagctgctcctccgggaatggggctcacaggaaaaaagacccaagagcagacctctggagccgccagagctagtctggtctctcagagcggcctcggatggtgtgtggccacatttgtggcacttgctgtctgatcagagaagcaatgaacatatgccaggccgggatctcacaggcatctaggctggtctgacaaatccttggccacatctgaccacgtctgtgcccgtcatgctgtgtttgttcctactgagccaaggccgtatcagaattcttcaaatagccctccagacagccaggctagggtggccagggagtggtgactggctctacattccccatagagtccatttcgcctcatccctggatggatgtcaccctgggacccagaaaggggtgtgacctgaggaacagccattgccagatcccggtgccctcgcaccctggcgtggttgggtctgtttccacagctcacttgtccatggggagaaagcagtgattcaggcctggctgagggacttggacagacactcaggatcttcctcctgagccctgtttcctcttgctcaggagaggagtttgaattgctccctcattcccctagaagtccatgtaagcccatgccactgccaggtggagctccaggctcatgattcaggaaggccagagcgccatacgcccctttattcctgtcccagctgtgtctctcctggttgatctgtgccycgaaagcataaggattcatccgttttagtcccatggatggaagccggcccctctgcatagagtggcacggggcaggagtttgaacacccctaggagtatggcacaggtcacctgtggggtgaagacataagtgtgtttgcaagtgggtgggtggctgggamctggargatttggctgagccaaagatgggctgggtttgcccatcttagggttgtwggcctggagctcaaattgctctgtgatggaggarggtgactctggagctctcccaggcaagggcaggggcagagggacagagagaagaaagggacgtgagaaagacaacacacaaccccttccatgaggctcgctggatcttcagtcgtgtggttggaactccgggagatgtcccctgagcccgggaagcaggataggtcaggagaaggccctaaggaaaggctttggatactacctgtggccacactctcctacaggccaaggagagacagacagagaggggctctgggcagccagtrgcactgaactctcagggtcgaggtctggggcaatatccgggctccactttcattccgtaatggcaacataatagagtgcagagtgctggctaaagagtgggtagcttccctggttcaaggccagcctctggcagctgccactttttttcagttgagcagtggccaacctgcacaacaggccccttaccacatgccaacactgggtacagcctgtgtggaggggtcttgggaacccgaatgttgaatgcacccctttgctctgtctctcgctggggaaccctcactgggctgtcttggtttgtgctccgttcactgggccagctcctccctatgcccccagcccagccttggcactgcatctggaactcagatgggggatgatcgcagctttcaggaaactgcccagtgacaggactgggcatcgtgcagggggtgactcatgttctagtctgtagttttgacagaatgcttctaaaagtttcctgagaaaaggtgcaatagaagaaaggatgtctgcaaatgtctttaatgcatccccacatttagccgaatgagtggctgccgtattcaacgacgtctgagctgcagacagctgtctccagaggggctggtgggttgacccctttggcttccagttgctaggcagctcccctgacttcgtggatacccccctctcccccactcaccacctctgctgcaacatcctgtcactcaggaactccaacaayccaaccccatctctactaaaaacaaaaaattagctgggtgtggtggcagacgcctgtaatcccagctgcttgggaggctgagtcagcagaattgcctgaaccttggaggtggaggttgcagtgaggtgagatcgcgccactgcactctggcctgggcaacagcctaaaactctatctcaaaaaagaaactccagcaatcctcacaaacaaacaagataacaggcaaagaacatgctaacaaacggcagctttgatgaccaggaaagcgcatggagctcccattccaggaatgtattttaactggatgtgcctccttgggaaaaaaagaacaaaaaagaaactcctagtaagaaaaaaagccccgccctgcttctgacagactcagctctggcagcagctgctcctgtttggaaagacctacatcccaggaatataaattttttattgtgattttattttatttgttgatgcagagggtttttattttatcttttgaaccagtagcagcagcgggagagggagaaatgggggagctgcaaagctggctgggggtgttctccctcctctgctgggggtggagatgacacctgagcccccttcgctgggcttgctggccacacaggctcctgtctctgccatggtgtggggacttgtggtattgggagggaaagaagaagtaaagagggggtgggggcagaggagcaggggtgtccaggggtgtttggcccagagcaaacccctggtgctcccacattccgggtccgggtcatctgctaggacaggcacagtgggaggggtgtgccccctgcccatccttggggaggttcgaatggactagatccagtccaaccccccagctgcagtggaggaagcagaggccaagtccctgcggaagctgcccaggacccgctgagtggcgacctcrggggcagwcaccctacatgcacccaggactgagggtatgygygcttctcctgtgctgcctgggaaataacaggaaagaccacgggcgtccacccccagggaaaagggtgaagaaagtgcggggccctggctgggtctctctgggtgtgcaaggagaagccgaggcgtcacaggaacccaggaggtggggaggatgcagagcaggacctattattcctatcattaagtatcgattcttatttatgagaaaacaacaaytatctggtgcctgaatatgawtatgaattttaaaagatccagaggagtacccgagaaattgttcatgattattagggaaagggaaacattttatcttagacattwggtatggcttgaagtgtatttttttggagggtgacatgtattatttttattaaayggtagtagctgaagtggttacctctagaaacagawatttgttttgtgggagggttaggtggttaagagacatattaacactgcctgtaatacttcagggttttttttctaacaaaaagagatgttcttgtacaattaaaaaaaatctctaaactgcaataataaagaaaaacaaagcaactcctggctgcagcctgtggccttttttcccctgcacaccctgcctgggaactcaggtcttaggaaggcaagcccctgcctgcagcttgccttcctaaaaggcctcactgacttctcagcatctgtgtgctgtggccagggtagctcggcacctggatcccagctccatggggctccaggaaggctcagagggcacagcacttactcaatcctgctgtccgctctcagaggagcagggtgggagcccaggagcctggcccagctccccagcaatccatgatgctcctggcaccgctcccggcccccgagacagacaaagcaccatcctattctccaaagtcctctaatccctggtcgttgtttgctttccaaaggagccctggttgaccctgagccagcagtccacacctttgcccagggtgagctctgactcagctctcttgctccttccccctcacccatggcccctctggttcctgaggctgagggacatgggcttgtggggggagggttcttgagggaggcgtcccaggcccattcccggtgccaagctcccctccgtctccccccattcccccatcccctctgctcctcagtggctggcaggtggcattgttcagcacctgacagctccccmcactcccacagctcctgcctcctgcactgttttgtcaatttggacagctgtcrtgccagctctgaaacacacccagtgtttcctacccaattctggaggccccactctgctccaagcagcctggtgaccttggatgtcctttttcctgtctgggccagggatcccacctgggttgaagagagcagggacagtgtggtgcagcaggagcctattcccatactgtgtcctcactgagagcttgtttcycctgggacatgagagatgcaccaccttcctgcccagctgggcaagaacatcaggagagccaagggttacaggaggcctggrggaagcagtrttttcagtaatgcaatatgcagcattgaccagcacctgcagcataccaggtgcaatgctaggggataacagatcayrgagaaagrgctgcrgcacmcaagagctcacagtgcagcagastggccagcagacaagtggctggagaatgatgtgrgaaattccacagtgaagacatttgaaggcagcaagacagggctttgagttctgcctaggggagctcagaagcctttgyagaggtrgggraatttgagttgggctttraaggatgactaggagttcaccaatttgaggasactagaggggcctkgcagttagcagccaaagcaaagagaaagcaacacaykgttcaccyagagaggcatcaaagagcagtggtggaaaatgaggctgraaagactccccagacagtgctgagcctttgtatttgtgagggtgcttttggctgtcagtaaacaaattgtccaataaagtgtataaacatrcatcatgtcttaccgtgtgatatagtttggatggtccctccaaatctcatgttgagatgtaatcctcatgactgccagagccttgaatgtgaagacacttaggccacagtgggagggagaaccattagggctcagagcccagggtgtctggttgagaaggaggcactgatgtccttggttgctcccagcacctccctttgagtcctcactctgttcctaggaagcagcagcagagctgtgtctgagctgcagcccttgaggttcaggctgaggatggatcagcgatgcaggcagcagggccagagcaacagcctcatggattctggcctttcctgagtmcccagggagaggcccctgcactggcagcactttgcagcagcctggaggagtagagctggccttgtgctctgtggagtgccamgcgcaggccctgagcaggtgtgctgcacagatgacctcatcgaatcctcaaagtgaccacctcctagagtggacactatcactacacccacttcaccgacgaggcagctgaggccccgtgaggctccacacatggctgaaaagtgcaagcagagggaagaaagcaggacttctgcatgcgcctgyccccaccctatgctgcctgggaggctggggctgtgyggtgggggctccctccacctctgagaccccttcccttgccagcaagtgctctgagcttcccacagacagataggagagagaaatcaacttccatggtattcagctgctgttactcacagccgaaatggatcccaatagacctgagccccttaccgtttggagtcctgtaaggtatggccaagtgctgttaccacaccatctcccacaggacctgccaacacccacaggattccctgggcatcctcattgagcaggtaagaggaccgaggctgggcagtgttcaggtggcctgcccggagccagawgccatggggtggttcagccatggggctctctgccctcattcagccygtctccttaaatgcttgagtggcagcatttgtaaactgcttatttctgagttctctgcagacatgytgaagcagaatctctagtgacaggcccaagaacatgcatttttctgcagtcctgagtgaggctgaagagcagagcttgcctgaggcagagaggagaagtgagctttccaaggccacgcagccagctaggggcagagctgaggtcagagactagatcagaccagatcccaggccatgttggctggagctgaagtgggcattgactcctggggcccccagatctagaggtggaggggcgtaaaggcctaggggcggtggctgggcttggagggctgccaggttgctgtgttccaggccagagcctgctcatcccaccctggggcagggattgcaaggccagcagagcacttgctgctcctctgggcagctgggacagctttgccacacagcacacactcttcctcctgctgggaatatccagaccccactcaggcaggttcttgctcctcagaggctcccagtctcagctcctgactctggccactggatccacccctgggctctaggcttctgctgctgctcccagggactgccagcacagaaagctcttagtagttagtgcagaaaacactaatctgggcgaagaatacccaggccggacacctggccctgctcttaccctgccaggtggccttgggcaagtcatgccattccctggacctgaggcctaacctctggatggcctgggattcggcctgggtcatccagacttgaagatgatggctggtgggctctacttcccttctccaggtgaagaatctattcattcattcagtcatttgacattcaacaaatatgtattcaacactgactttgtgccagcttttaggcactaggataccacagggaacaaacctagcagtaatccttccccctttaaagctgatgttccaggagacccatgtgcacagggtgacatcactaagcattctgagattagatggatggatgtgtggatggatgaagagatgaatgaatagatggatggatggatgtgtggatggttgaacagatgaatggatatgatggatggatggatggatggatggatggatgaatggatggatagatgggtggatggatggatggatagatgggtggatggatggatggatagatgtttggatggatggatagatggacagacagatgaatgaatggatggatggatggtagatggatggatggatggtagatggatagatagatggatagatgaatgaatggatggaggaatggacagataggtgggtggatgcatagatgggtagacagatgaatggatggatggatgaatgaatggatggtagatggatagatggatggacagatgaatgaatggatggaggaatggatagataggtgggtggatgcatagatggatagacatataaatacatggatggatgaatggatggatggtagatggaaagatggatgaatggatagacaaatggacaggcagatgagtgaatgaatggatcattggatggatggatagataggtggatggacagatgaatgaatggatggaggaatgagtaaatgggtggatagatgcatggatggatagacagaagaatggatggattggtgggtagatggatggatggatagatggacagacaggtgagtgaatggatgaatggatggatggtagatggatagatggatggacagatgaatggatggatgaatggatgggtagataggtggatagatggacagacagatgaaccaatggatggacaggtaatgaggaagggaagaagcctgggcccctgctctcctcctgctctcctcctgctctccttcctgtggccgcatttccatctcaggacagagctsactggctggctgggtctcctggatagaaagtgaagggggcagtggcctgactgaggcagggcttgggatgacagtagttgggctctggggagactttggtgatggatgggctcgatgtcagggaaggtggccggggaggaggtggtaggggatgggctgagtgttatgggcacaggggacacagttcaaccacgtgagcctgcctctcttctgcctctgtctaggtgggagactctctttgggtttgaaaaccccagtctgagatgtgctgtttcccttgtgcccyaccagggcccagtgtgtagcgttctggggacaccgggtgttgctgagaaygaatcagggagccatartcagggggctcagtgcagggcagrggtgaaaggagcaccggaagcaagcaggcctgggagtggggcatttatttactatttgttggggccatcctgaagggggtgcccagcaggctggggtggcctgccacagccctcagtcctctcagtaagtctgcagcaagaacctgctggaagctgcaacattcacagctgcaggatgggcaattggctctatgagtcgggctctgcttccatctacaggcctagatgtgagggcagaggagcactcagcctgccgaaggtctgcacagctggscggcagcgggcragattggaattcactcaccatgcagctactggstgcctggctactgctgggaagcaagctgagggcaaagactgccccacaggggcaagatcggggcccaccacaggaggtcaccccccaggcatgcagggcacagagctggggggaatgagctccctccccatgcrcccctccccagctgtccctgagtcactagcgcccttccctttcactaccarggaggctctggagctgcttcctatcccccactgtcctgtgagtcaccgccccaccctccaagtccctcccacatggtgtgatcagcatccctgcctctgcccacgraagtgatttcaaaaggcagaagtgacrsgtggtgggtggttaggcgggcagtgcctctcacctccccatccatctctcttctgtcaagtggggcagcagcagggccaagaagactgaattcaaagcatcctggaaggcctcaggttgtcaagggccccaggcagcgcatgaggctttgagaggggcccctgccttgtgcctgggcaggctccttccctgctctgcacactgtgtcttgagcaggctctggaacccacctttccacyatyagartgatagacgggctggatgtcaggaaggtggagtgtgttcctccaggtcacagccctgggcctctatgacagcccctttgagatgaagagacctgggtgaggagtctgcagcgggggcggtgggggcatcttcagtgctctggcatgggttcattcctcaggatgctcctgcagccaccccaagctgaggacaaggcccagatccacagtggcctgggaagtgctcccagcagagtgagcagasctgggcttcggtgctgtctgccctctgtcctgctgcaaggctaatcaccttctggttctgggccttgaatcccttttacagcatgggggctggatgctctttgagcttcctcctggyttcgatcctggaaactgacacctacttgtttgcagttgtgtgacttggtcaaatcgtgtaacctcttgagcctcaatttcattctgtgtgaatgaaacagtgaaagccctgaagattagatttttgatagaagaattgtaacagcagtgaccccatagccctttaccatttgcaaggtgcttcagacaaaatatctcactggtccctcccaacaattctgccacaaaagstggtattactttcatscccagcttacagtttgaggaacgaaggcccagctatgggggcaggtgcagaggtgggcctcgcttccaggtctcagtctctggatgaagggcaagatccctgcagctaaggacgagggagtggtggcacagaayrtccggcctgctggtctttctttcccagcctggggcatctctgtgaaggcmratgagyggmggcccctccccaggtgctggtgccaggcggcggggagctgcttctgayagctgtgcagagaatcatcacttctccatcgctgctaatagcatgtttagcttgctgactcctctgtttgcctggtgcctcccacrgacccagagcttggagtttcttcattgcctggggtggggcagggtggcagaggggcatctctgctccctggccctggctgcagccagcagctccacccagggccctgaacttgggaggcgactgcagttccatgccttggctcccagcaccccagggaagtacatctgggctctggaacagcagaaatggcctcctgcaaatctcctacccgacacaggaccaagtgtgggaaggctctggtccaaggggctttctccaactctctggaccacagggagccggcaggatgggggccagtccaccttcagattacacctttacctctgactcagaccccttcacctcccaggccaccatacgacatctcctgcttgcagatctggccatgctggaggcaggatggatccccagcccctcagttgtgacccttcctagcttgttaggttagtagaaaactsagctcayagtctcggggactgctcctcccctggttcatgcacaaacyccaaaggttcatgggattcctaaaagcagcctgacaaatttccctcctgtggggagaagaccctgtggtctggcaggacccactgcccttggccaggtgcccctcgctttgatcctgggtctggctcctgccttaggagmctgcagacctctgtggggccactccctggtgacccaccagcccaggaaggatggaccccgcagtggacaacactcggttctgtccatctccctgccttggggaagtacttgcctgtggttttaatttacctttgaccctatggtgcacttctggaatgttccctccacgagggcgtggacttggtcctgttcatggggatctctctggcacctggagcagctgtgtagcccagacggggtgctcagtcattgwctgctgcctgaacagatatgtgcaagtttgtcttctcactgctgttaacattattgtatgagtaattttacaagtttaccatttttcttgtamgtataataaatatcccaccttattgacccacagttccccctcccamaacttgcaaagtattttggctgacttgacttgtttactatgataaatartgttgctataaacagctgtgcacatatagctatttttccctttgcaattatgtttttgggaggaattccaaacagtggggttagcgggtcaaagggcatggygtatttatggtcctggatgtgctgggactgccgaattctcagcccccaggccacccctgttttccctgaggtctagctctgggtgaacacccacaaaagtgtctgtctgcctgaggctaccccggcctctgtctggctcctgcggtcrtggagcagacctcayggygcrggagctgraggtggcygtgggagtttgaggaggggcargaggaggcagctgtgggagttgtggagatggcttcayggagccaggagccctgttccgggagggcagtaggaccccctcttctcccagagccctggccttctcttggatggctctcctctcctggagccatcccrccccctgcagctaagcttccacccccagtctctgagagggggcagtgccccctgtaggcaggtgtgtttgggagaagggaggggacccagtgcctcagcctactccggactttctcctgtgggccctgacgtggtgtcatgtgggggagaagtgccgtggaagctagctgctgagcaaaaggtctttatcactgcagaaaatgtgcctgagatttgcccgccttctgcctccatccactggctctgcccckcctcwgctgctggagccccctttccccaccattagccccagacctgcaggcctggatggttgaaggggaggggtccacactggcccctcatgggatcttccggaacctggctsctactggagggcagggtatccagggtggcccctccctaagtaaatcttcccatcctgggaataggacagacctattctctgtctggcgatgcctgcattttatggggaccccaaggctttcccctgccatggggtagtgtcttggaggcggggcctgctgtctgtaagggctggtgagccccggcccaagcagggctaggcagtgccctgtggctcaggcctsagtggcatgggcgtagcccgtgctgggagggaggaatgagactccctgtgtcccgaggctctcccttggagcaggctctctctgctctctctgtacctcctgccctgtcttttctggctgcaggtccctagtggcaggaagttctgggaagcagtgcagaaagagcactggactcgggcgttctcatccagtctctgttaccaatgggctgtgggatccagcccctacctcagtcctcagccggacatttgcctgtggccttgtgcagcacctgcggccttggcagggtggctgagggtggctgaaacccaggttgtgggaggatctggaaggagcctggctcctgtctccccatgtccatgtcagctcttggcctgacaccaggagaccctcagggttgggggtgtcacccccccttcctgcagcctccgcatcctcctcccatgccccactctgcttttctgctggctggtgcaggagacaatggctgtggggcatgtgggtgcacgtagggggggtcctgcgtgggttgtgtgattttcccggacaggcaggcgtgagagggagaggaaattattctgtctaaaacctcagagatgagtccttgagagctggcagagtgactgcttcccgtctgggtggggaggcaggagacagggtgggccgttcccaggggcaagagcaaggcagggcagggccagtcctcagggagaatcccaagaaggccacagcagcacaaagataagccctcatatttcccacgtgtcacctggacaaagagccgtgatgccccccataacagccggtcctcacgagaatccagagagctcgctagggaggcagacattatgataacccagtttacagatgaggaaacggaggctctggaggggttcattgacctgcctaggtcacagagccagcccgttagcgacagagccagagctcgaaacccagatcccgaggcacatcttcctccaaaatgacccagagaggtgatgtctctgaaagcaaagccagggacagccaccaaggcagacaggggccgcagttttgttcaggcagaaaatgccaaaggtgccacactcccacctcacccccacccggccttcactctcaaaagtgcaactttcctgctggaggaggggaagggttgagctgggaagacatcttccctcctgtgactctgaggcccagaggctgggctcggcaactctctgggattcacagggcgcctcctgcgggacttctacatctctgccatgacaatgtttacctatttattgccacagaaaaggagccagatagcaacagctagaaactgaaccctccatggactctctccctccttccctggcagcattcacctgcacagtgggaagtcctgcagcgatgggccaggtgaaatggagtgggcaggggctcttggtgaggtgtcattatggtagtcatccrggctgttcacagatgttcaagtctcctttaygccaggcccayggtaggagttgacttctccatccacttcaattcaagyatggccatgtgagttgctcttaccaacaaaatgtgggtggaagtgggtggaatgtcactttcagacagaagccttaggagcccttgtgtgggccagcatgttctctattcctgtctctgagatcctggacacwcctgttgagatgaaactctgtcagactgggtcacccagtgactgtgatgcccagagccctcctgctgactcagtggtcatactgcatatgtcagaaataaacttcgctattttcatccattgaaacagtgggctacttgttacctacataacccagcctatcagcctcgatgcagtcaccaagctagtcagtaagatccctgcccaggactttagaaataggacctgcaactctctagagggctgggcccataaggtgtaaacctggctgctgtgttttgagatgccctgaacaggctaagtgtgagcaacaggctgtttatccactsagatgcaagtgggctgagtccgaaaagaaagtcagtggagggttgtgggagtggagttagttttataggcttggagtaggtagtggaaagytacagttaggggcagttttttcgggcaggggaagaatttcacaaggtgcatagtcacgaggtgggggaggtcacaaggcacaatatcacaaggtggatggattagttggggcaggaacatatcacaatggtgcaatgctgcaaggtcagttcatcagttaaggcaggaactagctgtttcttcttctttagtggttctcctagtgctccaggctttgtgactccaggaggcctgtacgtgtgggtcacaggggtcataatggcttgaccatggtgcagcccattcagaggaccttacaggaagcaggcacacagtaaggagacgtgcagagccctccccaggattctctccgctgcctaaggtctggatgcataaaaatccttgtgtcccgggaaactcttccccttttcttagacaagcttgggttggtttaggttgcactcaaccacgcgtcctaatccagagtaaaaggggacatgggagaagcctccttcttacagatgaggcactgaggctcagagtggccaggcgccttgttcaagatcatagggcctttgaggactaatgctcgcctgctccctttctagtgaaataatccaaacagtraagatccattgtgagtcctccctctccctctcctctcccactctccagaagtagccactcttagtaagagtttggtggggtttgtatcagaccttttaaaaaaggtgtttatcaacatatatgtatacaatattcatacagttatattggaaaatgggatattgacctcatttttctgaaattcacttctttttcactcttcagattgtcaatattgccaaattctaactgtgcctggagaatctggtgatgtatctgggagggaagtggtgattaaggtcggggccaccttgagccctcgtgtgtccagactcaaaggactgaggtcagaaaatcctccgggcagggctgagacttagagtcagggtggacccttccaggaagtggtgcagcccctctgggtggccggcccctctggctagctctgacctggagragttcagcctttggtttcagtaaaatctgctaccctgtggaatcctcccactggcctgttatctcccccttaatttctggggcaaattgcattaaatgctttccttcctcccacagtgggccaggcaggagagaggctgttagctgcaggctagggagtgtagccccggattctcacctggcaaccccagtaatgagcactgcagagacagccacagacacccttattgaccaggaagaagtcaggagcccaaaggcagagaaccaagggctgcgggcctggagggaacccagggaagcctagacagccagaggcaggcaggcaattaaaggagggggtggagttttcaattaacagctcttctgctagaagcaggtaattaacggattagcaaggctgttagcaaggctgcttgctgccagtgaggaacctggcaggtgctgccttggagaaggaggaccagrctccagattccacaggaaggaaaggactcttcrgaggcaggatcctgagggcagctgagagtcatgggactcagcagggacacagtgagcaggctggaagggcgggaggcaggccagaggggatggggcagtataatcccactgtcccctggcctcgcagggtccctggtttgcagagccctctttgcctgggatgggctaaggaggcagtgtatgagaatatctgggggtcatggtgttgacacccctggaattggcacattaccacacagctcacacgttttcacagtggtttaggggggaagctgcataaggcggggctgacagcaaggactttgacattagacacgcttcagttaagcctcgctcccacttcccaatctaggggactaggggatcctcagacagcccagatgttcctcagactactcagcacctttctagttaggcaggatcatgccaaattctaaagaagccagtacgcacctccatctgtgtcttcccctgccagggagttggcagaggccactgttccagacagcagagcctcaatcagcctgaatccctgagcgacctgcatggagcagattccctcgccagcccccatgagtgggagtgagaggtaaactactgtgttaagttatgagatgtttagagctgtgtgttacagcagcgtaaccaagcctaccctgactattacacagggtcaacctcacctttgtaaaatgggtaagaatgataccacctggaatgattattgtgaggttgagtgagaggatatatgacttggctgaagggtacacttagctcctggaccccacaccctctccaaaagcaaggaatgttgccatggaccaagagccaagcccagggacatttgattggccacttctagcagaagaactcctgtaatgcttagcaaagtgttaaagggttgaacacacaggggaggggcctgacctgtaatgcttagcaaagtgtttaagggttgagcacacatggggagaggatggtggaggcctgggctgtgccctccggaaatgcttggccagctccctctctctggcttctccagttctcttttgtccccaatatggggagagaggctgggggctgctaccccaagtcttgctggctggagccgtgagcattgcttgtggtggtgctgggctctgggagggcttcccttggttcttgaaggccccakgccataagtgactcttgtgaccccattagcagcacaactttccctctgccccctctgtcccatagcagcccccagctttgcctcctgtcctgccacacctggaccccaccatctttccgtcataagcctccagcctgtcccctgagctggccccacttccctccatttgggagaagccgtggaagctgctgactgttcycccctcrtttttcagcctgttccccactgttcatgtttggtctacaacatcaaacccatttctttttcagctgatctcatttctcctgagtttctgatgctctgagtccaaagcctaaacaaccgtattcttttcactctccaaatacaaagccctctcaccctggctcrgcggttggctccctgctctgagccagctcacctgatcctttagaggaagaatgttcgaagcacaggctttaaaaaygtccttcctagcttgtgcatattctatttgcacttccccactcactcaagaagatgccatttcccccacaaagctgggagccttaatgcccttctccagcacccatcctgcccaccrtggctgaggtcacagctctgggctttgaaatgcacaaacacaatcagaggtcaactcctgtcatttgaggatccctgattagaaaagagcttgatatacaagcagggtatgtatggaaataaaaaaattagaaaaaagagaaataaaactggacacacagatcagcaggggttagcggtctccttgtcattgtcacaaacaaacccctgttctggttcatgccagccactgccacccttacaaccaaaagtacagtcactaggcctgtgctgtccagggcagcagccactaaccatgtgtgcctgatgagcactgaaaaggagctcagaaatgttgagatgtgctgtgtgtaaaatatacactgaattctaaaactggggattaaaaagaatgggaaacaccttctcaatattttgtatattgatgacacattgcaatgatagtattttgaatatattgggttaaaatatgttattgaaattaattttacctgttttttttctttctttcttttttttttttttacatggagtctcgctctgttgcctaggctggcgtgcagtggtgcgatcttggctcactgcaaactctgcctcccagattcaagtgttctcctgcctcgcctcctgagcagctgggattacaggcacccaccataactcctggctaatttttgtatttttagtggagacagggtttcaccgtgttggccaggctggtctcgaactcccaacctcaagccatccacccacctcagcctctcaaactgctggtattacaggcatgagccaccacacccggcctctttttctttcttaatgtggccactagaaaacttaagatccccattgcagtgcatgttgtatttctgtcacacaccgttgcactgggcaccactctgtcactcctgccatgcggagtcctgcccttggaatgccgtgtttttgtttctcactgctgctgtaacaaattaccaccagctcagtggctcagaacaacacacatctattattttgcagttctggaggtcagactctgacctgggtgtcactgggctacagccaaggcgtcatcggggctgcgttcctttctggagactgtggagaagaatctctttctgtgcttctctgagctgcccacatgccctggctcacagcccccttccatttccaaagccagcaattgttgtgaggctttctcacactgcgcaccctcacgcggactcgcctacctccctcttgcacatcccacctgaataattcaggataatctcctgacatcgaggtcagctgattagtgaccgtaatcccatttgggcccttaacttctccttgccatgtaacctaacatattcatgggctccagaaattaggacttgtacatcttcagggcccttcttcagctgcccacatgccagtgccccgtgcgtgtgttttcttgttctgtgctaactggccagctcttggaaatgactggtgtgggaacacttgcttcattttctccctgttcttgattatagtccagagatctgctgggggatggtgtgagcccaaagaagccgatttccttcttgaaggggstgagaagaagggagactgtgacttgaccaagccaatcggcaaactaccttccytcccaacagragttgattygttcaggagggggcatgtgacaaaagctgggccactcagagcccatctaaggacttcactgaaatgctgacataaagcagccacttgtgccacagggggaaagccagcctcaaatgaaactgtctcacaaagaaatagagatgaatgacttgtagagaactggaaacagaaacaaaatgaaacttgcagagaaaatattgcaagtaaatgttgaacctctggatcgaaccatgcctgagtccctcctggctctgacttttcagttaggtgggtccacacattcyctttttcrgccaagccatttgaatggsattttctgctctttgcaaaataaagatttgcgatgacttagagaggggttaaagccrtatttgatctggacacatgagagtacctgaagcctgtcctcacccagctgtctcttcccactggtctttgaggcacaagtcctaaaggaatgccctgtctctctttcccccagatctccaagaggaccctcctgcctctgcttctcttcctcccctgaagtcaattttgcagtgtgctggtcagcctcatccagcccctcttttctgggaactgctctaactcgatggctggattgactggccaagagacagacatcagggtgagctggatcatcagacagtctctcctaggaatgtgaaatacgaattcagagaggctggcagcccattgttcacgggaatgcagaagctgtgaggctgagaaacccctttccatccagagggaaagaaggtatagtgggtgaggggagaacagcagaggcaggcaaccctggggccggggagcmagraggagtggctgcctctgtctccaagggcttgctagcttgaggtcagktccttcctgaggtctgactgctcctcttgcccattgggtctgaaataaattaattatcacccgccctttttccctatagatgagttgaatcaatttctatcacttgacatcagaagagccttgaataagccacacttcccattcccatgcttgccctaggacccattgccccagatggggagaaggccaagtgaacacccggccttcaggaaccctcatggaggcagttctcttcccccactttctgccaggcaggagaggctgctgaggctgcagcaatgacctgggctgcctggggttactgaaggcagcaggaagcagtgttgggttgagtcccaggtttccggactccacacctggtggccgacgcagctagctacctagtccacagccattctccccttcctctccctcaaagccaaaggtggttacacaacacagtacagcccatgacaggcatcttcagagtggggcttccaggacagctactgctttcctgttgggcctggtggctcttcactgtacctttccccttccctatattcctccctggggcacaaagttctgcctgaaggtgtagcagcaggtatttgtgaccctgaggatgaaggcacctggtgaggatgtcaacacagggagctggaaggaccctggtcccctatagcctcaccacagccccagcagtgggaccatcatggatcctgacctttgggcttctcattactcaaggaatagaaaaaccccaaaccgtgtttgcttaagaccctcttgtcaggtttctaagtctttattatttgcaattataactgataatttcctatgtcctctgggaatttgggtcatgggtggagttttctggcgagaagaagggctcagggactctctaatttcatcattttgcccagggtccagtttcctctgaagtttgcaaggacacatggaaggtcagcagaaacttggccatctcagtgtcctggtgggtgatttttacgaggatttctcatcacagaggatgggaacccaaaggagaatggccgccattggagcctttcctgtccctccactgcccagaacaactgaactctgtgtcagttgggctgcaagtaaagaaaactcaactaatggaggcctcattgaacaggagttcattttactcacgtaacaaacctatgtggtcccaggattgtctcacggcccagtaaaggcaaagcatggcgttagcaagtctgagatgttcttgaatttccccccattgctgcaagatggcccctacagctccaaacatcacatcctcaatggtgaataaagctgatctccaactgggaagaacttctgtctcctggtgtggtgaaggctgttggagcatctgcaggagcatccaaaccctgtgctattggggtagtccatgcccttcaagccagtcatggctttcctgtttcctctgtcaaatactggctaaggataggtctgtgatgcaattctggccagtgagacatgatggaagagctgctgggtgaaattctgggaaaagttcccttactctttagaagatggatccaggagaagagagtctcttttgctgggtgttgtcatatctggaggtgatgcctggaactgtggcagctgacttgtgattatgagggaagctggcctgaaaacagactggcccactgaagaggagggcagcatggaatgtggaataaacctgggtccctgttggcttcctgcggccctgatctaaccagccctgagctgtcctacctctgcactgcttggcacaggagacacatcttgattgtttaagcccctttgagttgggttttctgttccttgcagctgacagcactctaaccaatccacacatttccctctgctcgatttcctgctccagagagacaggcacagaccagtaccgggcagccccactctggggaaaaacaacagtgcttattgtttgccggcacagtgggagctctgcctcctggcacagtgggagctctgcctcctgtggcaggctggccattccaaaaccacactgcctgccactgccataaagaggccaggactgtgttcaaaaccccaggcagcaggaggagtggtttgtgggaggtgttgtggtagtgcataaaggaaggtcatttcctgaccctcagaacccacactgccctcagccccacacagccctacccagcccagcatcgcccccagtgcccctggagacaataatggcagccacccactggctgctcctgtgcgggcagggcaggaaagctggtggttaagtgctggagaacccccaggccctggggcttggccggaaaggatttctgtagagacagcgtggacattctgtcctctgcaggccgcctggtacaggatgaaaacaggccggctcagtacttttttggcaaccgattatatagatttgcatccacatgagctccctcttgcaatgacccaggcccccacgagggctctccccacagtcatttgtgttgagaacgctctgagcccttgagcctccttcctctctgggaaagggactttttggcagtgagaaggacctagagggaggcacttctggaggcatttcctttctgggaggaaatgctccagggctctcctccatccaccaacagcctccaagttgagtaagtggcagcgaaggtcacgcctgagctggcagccatggaacctcacctcctgcttttccagcttygttcccaaagacgtccctccacgagcttgtgctcatgccatgcctatgctggaagcccttgctgtctgcaggtggcgatgtgacccgggcctggccctggggatttgttcaggcgtgtcactctttctgaccaaaggggaccagccttggggcttttgtggaaacctctgagaaagggaggtccacaattctggtttcctagctggagagaatacgcctggccctgctggcaaccatctttcccacccaagggagtcagcctggacattttagtcacttgagtcaataaattctgtttgcaaagaaaaaaaaaatcgctttgagccgggctttctgtggcttacagtggaaactcattagtaatataaatgcagatatccctcttaggccaaagtaatctctcctttcttgcttgctctataccacacacacctgcttcattggcatttactgtttccccacctgcacgggtgaccttagcccccctgcacaaaggcctggacgtcgctgcctctgcagctgccccagatccaggtgccgttaattttaccctcaagttgcgctaaactactcagtgaattattgttggtccaataaaaccacttttgttttatttattcttttgtctccacactcactcccattcccttcccctgcatgggcaacatgctccccatagattcccccacctcctgtgctgctttaaaaatgctctttcaaaagagatacagtctttatgtgttttttaatgtctgcaaatggtaatgtttgggttcccatgttgcttcttcctttttaaactcagccctgtgttcaggcccatccatgtggctatgtgtgcctttcatctctccttgtggctgcataattctccatggtgtggaccattcccattttgtctctccattctccccaggatagaaaccctagggtgcctcccgcagcccccatccccacactaccacaaagaactctgcagtgaacatcttggtgtgcatgtttgacgaatctgtgtcaatttcttttacatctctacctggaaatggaatagcaggggtgtaagggatgcatactattgatcaaaatccctccacaatggtggctctggtctacactccacaagcagtgccctcatcaacttccccacttccccacccaacatgaagacttcttttttttttctttttgaggcagggtctcacttgttgccctggctacttasaggtgcgatcatagctcactgcagccccaaactcctgggctcatgggatcctctcacctcagcctcctgagtagctgggatgacaggcatctgccactgtgcccagctccaatacttgtctcttcctagattagttttgcctaaaagattgcattagttttctacagctgcagaacaagttaacacaaattgtgtggcttaaaacaccatttatttttcatctcccattttctgtgggccaggattctgggctcggcttagctgggtgctctgctcagactgtaacccggtgttggccaggctgcattctcatcagaggctccactggagaaagatctgattccaggctgcctcaggtggctggcagtattcatctccgagtggttgtagaactcaaggagacttgcttcttcaatgtcagcaggagagatagtctcatacctttacatccttttttaaagggctcacctgattagatgcaccctggatgatgtcctttttcattaacataaagtcaactgatcagggactttaattacattggcaaattcttttccccttttccatatggcacatcatcacctttgttagaatctattaattagaagcacatttaccaggagaggattacagaagtgcttgcctattggagttcagctgagaattttgcctaccatgtatgtataaggttgtatctggttcaaattgtagtaaagcacacagaacataaaatttcccatcttaaccactgttaattgtacactttagtggtatcaaatactttcacattgttgtgcaaccattaccaccatccatctcaagaactctacttttgtgaaactgaaacactgtgtccaattagatactaacttcccattccgtttttgccccagcccttggcaatcattctattttctgtttctatgaatttgattattctaggtatcacatgtaagtggaatactgtctttttgtgactggctattccacttagcataatgccctcaaggttcatccacgatgtagcctatcacaggattctctccctttctaaggctgaatcatattttattgcatgtatagaccacattttgttcatgcattcgtctatcaatggacacttgcttccactttttggttcctatgaatgctgctgctatgaacttggatatacaatatctctttaacatcctgctttcaatccttttgggaatacgtccagaagtggaaattcttggtcatacggtaattctatttgaatttttttttaggaatggccatgttgttgtccacagtggcggcaccattttacatacccaccggtagtgcacaagggtctaatgtctcactcctcaccaacactcggtattttcgggttttcttgacagtagctattctagtgggtatgaagtgctatctcactgtagttttcatctgcatttcccttattctgggtgattctcagcaccttttcttgtgctcattgaccatctgtgtatcttttttggagaactatttcctcatatatcttattgttagaatgtgtatttctgtactaatgatcttagccacttcctcatatgcttcctggcttttggggtttcctctcccaaaaactgcctgctcgtgtcctttgtctatttatttttcttgttaattttcaggagctcctcgtatattgaggccactaatctcttgtcagttttagactgcacataacttctctcattttgccatgtgtcacttgcaacagatctatttgattgtaacatcatgaaatcccctccactttttctgccttatggtttctgctttgaaattttgtctaagaaatcttytactccttttggtaagttcccctgtgtgttttgttttctaacatgttataatctggctattcatggtggtcatcgtgaaaagcaatcccatataaggtggatgctcagattacggattaaagaatcaattagtcacttccaagatggccaagtaggaacagctccgttctgcagcttccagtgagattgacacagaagatgggtgatttctgcatttccaactgaggttcctggttcatctcactgggactggttggacagtggatgcagcccatggagggtgagccgaagcagggcggggcattgcctcacctgggaagtgcaagaggtcaggggatttccctttcctagccaagggaagccgtgacagactgtacctggaaaaacggtacacttctgcccaaatactgcacttttcccatggtcttagcaaccagcagaccagaaaattccctcccgtgcctggctcagtgagtcccatgcccatggtcctttgctctctgctagcgcggcagtctgagatcgacctgcgaggtggcagccttgtgggaggtggtggaggggcgtctgccattgctgaggcttgagtaggtaaacaaagctgccaggaagcttgaactgggtggagcccactgcagctcagcaaggcctactacctttatagactcaacctctgtgggcagggcatagctgaacaaaaggcatcagacaacttctgcagacttaaaacgtccctgtctgacagctcggaagagagcagtggttctcccagcatggcgttcgagctctgagaacagacagactacctcctcaagtgggtccctgaccgctgtgtagcctgactgggagacacctcccagtaggagccaacagacacctcacacaggcaggtgccgctctgggatgatgcttccagaggaaggatcaggcagcaatatttgctgttctacagcctccccttgtgatacccaggcaaacaggtctggagtggacctccagcaaactccaaaagacctgcagctgagggtcctgactgttagaaggaaaactaacaagcagaaaataatagcatcaacatcaacaaaaaggacatccacaccaaaaccccatctgtaggtcaccaacatcaaagaccaaaggtagataaaacaacaaacatggagagaaaccagagcaggaaagctgaaaattccaaaaatcagagcgcctcttctccaaaggatcgcagctgctcaccagcaacggaacaaaactggacagagaatgactttaatgagttgacagaagtaggcttcagaaagtcagtagtaacaaacttctctgagctaaagaatattctaacccattgcaaggaagctaaaaaccttgaaaaaagattagacaaatggctaactagaataaacagtgtagagaagatcttaaatgacttgatggagctgaaaagcagggcacgagaacttcatgacgcatgcacaagcttcagtagccgattcgatcaagtggaagaaagggtatcagtgattgaagatgagttgaatgaaatgaagtgagaagagtttagagaaaaaagactaaaaagaaatgaacaaagcctccaagaaatatgggactatgtgaaaagaccaaatctacatttgattggtgtacctgaaagtgacagggagaatggaaccaagttggaaaacactcttcaggatattatccaggagaacttccccaacctagcaaggcaggccaacattcaaattcaggaaacacaaagaacaccacaaagacactccttgggaagaacaaccccaagactcataattgtcagattcaccaaggttgaaatgaaggaaaaaatattaagggcagccagagagaaaggtcgggttacccacaaagggaagcccatcagactaacagcggatctctcagcagaaactctacaagccagaagagaataggggccaatattcaacattcttaaaagaattttcaagccagaatttcatatccagccaaactaagcttcttaagtgaaggagaaataaaatcctttacagacaagcaaatgctgagagattttgtcaccaccaagcctgccttacaagagctcctgaaggaagcattaaacatggaagggaacaaccagtaccagccactgcaaaaacatgccaaattataaagaccattgatgctatgaagaaactgcatcaattaatgggcaaaatagccagcttacatcataatgtcaggatcaaattcacacataacaatattaaccttaaatgtaaatgggctaaatgctccaattaaaagacacagactggcaaattggataaagagtcaagacccatcattgtgctgtattcaggagacccatcgcacgtgcagagacacacataggctcaaaataaagggatggaggaagatctaccaagcaaatggaaagggaaaaaaagcaggggttgcaatcctaatctctgataaaacagactttaaaccaacaaaaatcaaaagagacaaagaaggccattacataatgtgtaaagggatcaattcaacaagaagagctaactatccgaaatacacaggcacccaatacaggagcacccagattcataaagcaagtccttagagacttacaaagagacttagactcccacacaataataactggagactttaacaccccactatcaacattaggcagatcaatgagacagaaggttaacaaggatatccaggacttgaactcagctctgcaccaagtggaactaatagccatctacagaactctccaccccaaatcaacagaatatacattcttctcagcaccacatcacacttattctaaaattgaccacataattggaagtaaaacacacctcagcaaatgtaaaagaacagaaagcacaacaaactgtctctcagaccacagtgcaatcaaattagaactcaggattaagaaactcactcaaagccatacaactacatggaaactgaacaacctgctcctgaatgactactgggcaaataataaaatgaaggcagaaataaagatgttctttgaaaccaataagaacaaagacacgattaccagaatctctgggacacatttaaaggactgtgtagagggaaatttatagcactaaatgcccacaaaagaaagcaggaaagatctaaaattgacaccctagcatcacaattaaaataactagagaagcaagagcaaacacattcaaaagctagcagaagacaacaaataactaagatcagagcagaactgaaggagatagagacacaaaaaccccttccagaaatcaatgaaactaggagctggttttttgagaagatcgacaaaatagaccactagcaagactaataaagaagaaaagagagaagaatcaaatagacacaataaaaaatgatagaggggatatcaccaccaatcccacagaaatacaaactaccatcagagaatattataaacacctctatgcaaataaactagaaaatctagaagaaatggataaattcctggacacatacaccttcccaagactaaaccaggaagaagttgaatctctgaatagaccaataacaggttgtgaaattgaggcaataattaatagcctacaaaccaaaaaaagtccaggagcagatgaattcacagctgaattctaccagaggtacaaagaggagctggtaccattccttctgaaactattccaagcaatagaaaaagagagaatcctccctaactcattttatgaggccagcatcatcctgataccgaagcctggcagagacacgacaaaaaaaattgaattttagaccaatatccctgatgaacatcgatgcaaaaatcctcaataaaatactggcaaacggaatccaggcaaactgaatcaaaaagtttatccagcacgatcaagttggcttcatccctgggatgccaggctggttcaacatacacaaatcaataaacgtaatccatcacataaacagaaccaacaacaaaaaccacatgattatctcaatagatgcagaagagggcttttgacaaaattcaacagccctgcatgctaaaaactctcaataaactaggtattgatggaatgtatctcaaaataataagagctatttatgacaaacccacagccaataccatactaaatgggcaaaaactggaagcattccctttgaaaaccggcacaagagaaggatgccctctctcaccactcctattcaacatagtgttggaagttctggccaaggcaatcaggcaacagaaagaaataaagagtattcaataaggaaaagaggaagtcaaattgtccctgtttgcagatgacatgattgcatatctagaaaaccccatcgtctcagcccaaaatctccttaagctgataagcaacttcagcaaaatctcaggatacaaaatcaatgtgcaaaaatcacaagcattcctatacaccaataacagacaaacagagtgccaaatcatgagtgaactcccattcacaattgctacaaacggaataaaatacctgggaatccaacttacaagggatgtgaaggacctcttcaaggagaactacaaacctctgctcaacgaaataaaagaggacacaaacacatggaagaacattccatgctcatggataggaagaatcaatatcgtgaaaatggccataatgcccaaggtaatttatagattcaatgccctccccatcaagctaccaatgactttcttcacaggattggaaaaaactactttaaagttcatatggaaccaaaaaagagcccacacagccaagacaatcctaagcaaaaagaacaaagctggaggcatcacactacctgacttcaaactatactacaaggctacagtaaccaaaacagcatggtagtggtaccaaaacagacacatagaccaatggaacagaatggaggcctcagaaataaccacacatctaaaaccatctgatctttgacaaacttgacaaatacaagaaatgaggaaaggattccctatttaataaatggtgctgggaaaactggctagccatatgtagaaagctgaaactggatcccttccttacaccttatacaaaaattaactcaagatggagtgaagacttaaatgtaagacctaaaaccattaaaaccctagaagaatacctaggcaatatcattcaggacataggcatgggcaaggacttcatgactaaaacaccaaaagcaatggcaacaaaagccaaaattgacaaatgggatctaattaaactaaagagcttctgcacagcaaaataaactatcatcagagtgaacaggcaacctacaaaatgagaaaaaatttttacaatctacccatctgacaaagggctgatatccagaatctacaaagaacttaaacaaatttacaagaaagaaacgaacaaccccaccaaaaagtgggtgaaggatatgaacagacacttctcaaaagaagacatttatgcagccaacagacacatgaaaaaatgctcatcatcactggtcatcagagaaatgcaaatcaaatcctcaatgagataccatatcacgccagttagaatggcgatcattcaaaagtcaggaaacaacagatgctggagaggatgtggagaaataggaacacttttacactgttggtaggagtgtaaattagttcacccattgtggaagacagtgtggcaatttctcaggatctagaactagaaataccatttgacacagccatcccgttactgggtatataactaaaggattataataaatcatgctactataaagacacgtgcacacgtatgtttactgcggcactgttcacaatagcaaagacttggaaccaacccgaacgtccatcagtgatagactagattaagaaaatgtggcacatatacaccatggaatactatgcagccattataaagaatgagttcatgtccttttcagggacgtggatgaagctggaaaccatgattctcagcaaactatcacaaacacagaaaaccaaacaccccatgttctcacccataggtgggaattgaacaatgagaacacatggacccagggcagggaacatcacacaccagggcctgtcggtgggtggagggctgggggagggatagcattaggagaaatatctaatataaatgatgagttgatgggtgcaccaaaccaacatggcacatgtatacgtatgtaacaagcctgcacgttgtgcacacgtaccctagaacttaaagtataagaatgaaaaaagaatcaatgtatgattctttaatccatcatctgagcatccatcttataagggatcacattgtttttctccatatagtaagagtttttccaacaagaacagcaactctttcccactgacttgtgatgcaccttttatcatagatgaaatttccctctaaccagggatctcccctctccatgctgagttgtctgttggttcactgtcaccatactgcttaagacaacaacagcacctttagagtgtacctgagtatctggaagagcttcctgcctaccctcctttggcttaggcatctgtggacctttatccctcctcgcatgattcagagtgagtttctaaaactggaatctttactgggactacagtgaagtgatggatgaattgagggagaactgacatctccatatatcaggccacccctcccaggagcaggagatgactttacctggggagtatctacacccccattctactcccacctaccaattagtcggcaattgatggagttgctcaatcaatgctagggagcagatctccagggaggaagacagagtgggcctggaatattcttcagcatcactgcttccattcccagccacgcctggcaagagggaggaaacatcctgtcacagaacctatgttttctgggtggacgaaaccaggtgtcctggaggaagcaggtatggtgggaagttggggcaaggggcaaggggacacagagcaacagaacttctggctttccctagcatgggccaaccctcccggccagcatcatgaggcggcactggctgcttcccccttgtcccggggattgggaggattgttgtgcttcattcagcctgtctacctcatgacttgactgagctacacctcaacattgtcaagtaagtagacagattatcatccccattcaagagaagaggagaagtcatctcctgctaaggtccacagagaaggaagttcactcattacctgaaaaacatttatccagacctcacagtgcagcagcttcttggccctgggatgtggcagagaccagacaaatggtcaaatggatccagtcagcattagacaccatggtggacatgttgttcatgtcagccagcaccattccctgagaaaaccaaccccgtgcactccgtttctcctaggctggtcaatcatggtgccccctcaccaaagacaggaaagggggcaatggtgtgggtccagtcactacatcaggacatgccacaccccctagccacagggattggtcaagagggtatgaggacgatccttgcagtaccggagtcttccctggggtttcatgtgtatgttgagggacagaagtttcttcctactaaggttgatgaggagggtggatataagtcttgggcggttggcagtcaggtttttatagaaaagagccttcaggaagaacaaaaccaagcagagacaagcagtatggacacatgagagagaaccggaggcctgacaatgttgctttagcacttaggtccagccatgcctagagttaacacattcatactttctcgttatgtgagccaacccatgagcttttggcttatgcatacttgagttggaataagtggaaacaaagagtaccactggacagagcccctaccaacaaatccaactctctgcccactctacggaactttcccctcaggttccaccacactctttcaggttggggcttattttgatcataattcccctgttctcaaattgtctttgaatccagattctgtcagtaagtaccctttattccttattggtttatgacatctgctagaaggccaagcctgccttctgtgtcatcccccaagttggtgttgaagataccgatgtggaggacagaacactgtagcatgcagcaccctcctccctcaggttgtcagcccttgaatctctcacgctgtccctggtcttcacagaatcccagatccccagtattagaaaggatctcgggttccccactcactctatcccagcctcttggctcaagttttcatctatagaagtggtgccagccttggccagaggaaagtggcatgtgtggtcagtgtctgttggcagcttcccagcatcaatgttcccattctcctgccactagcacccatatttgacttctccattctaggctgccatttgctgcagtgcttagcaagacattatggaaggttctggtataacggaagggatctacaacatagagtaccaccaatggttacctctggaggtggctgtgctcagagcacctgggcctgggagggaaagggtgtctcagaaagaggcatgtctcctcctttaatcagggttcctcagagattggcatttgaaatctccagactgagtaaggaatattcaccttcaccccacgggggcagacaccatccaatcagtcgagggcctggatagaacaaaaggcaatggaaaagtgaatttcctcataaccctaactaacggaggagacatgcctccctctgagacatccctttccctcccaggcccaggtgttctgagcacagccaccttcagaggtaaccattggtggtgtctatgttgtagatccctattactccggaatcttccataaagtcttgttcaacattgcagcaaaccacagcatagaatggagaaacagaaccaagaatataggtagggggatggacagatgagctttattatgggaattggctcccgtgattatggaagttgaaaagccccaccatatgccttctgcaagctagagaaccagggaagctggtggtgtagctcagtccaagtttgaaggcctgagaacctgtgggtgggggtgctgctggtccaagttatagaacccaaagcctggatctaatgtccaagggtaggagaagatggctgtcccagctgcaggagagagagagagagagagagagagagagagagagaagggaagagagagagagagagagaagggaagaaagagagagcctgcatgcaaattctcttttcctctgccttttttctatcaaggccctcaaccgattggatggtgtctgcccccattgggtgaaggtgaatattccttactctgtccagtgattcaaatgccagtctcttccagaaacaccctcacagatatacccagaaataatgccttgccagctctctgggtatctgggtatcccagtcaagctgacacctaaaattaaacatcacatctccttttctctgccccgctggtggtccccagacagactggcaagagcccctctgcccattctaatgccagctcaagtccttttctccaggtgatatacaggagaaaggcctgtcagtgccttcagggaacacctgcccccagccacagggagggcctttgtccctctgggcgcaggcagtcagttaggtgcatcaggatattctgggtaatgcattctggcatgagtccaggatggggctcaccaagtccagtccaggttgggcagggcccagctcaaatcagtttatgtttctctcagggtcgggtcagtcacaatcagtgtgtatggcagctggcctacaggtcttgctgcactgcagctctgcctctcctgcaaactgcttgagggagaaagagcacactgagtcctcggtcccagacccaatctgggtctgagagggatgcttcttttcaaatgtccaaattgcagcaaacaaccaccaccaccataacaaaatacgtttcttccaaagaagcagcacatctgacagctgaactctgagatgctgcgcctcgtctctacagtcaatccatgcaaccttctagtctaaagtctctgctttggggctacttctcagcatgagaactccttaagaggtggggacgtgttcacaacggcaaaactcggctgcctgtacagatggtgttcccagaactaagaggcgtcagccttcggtaaattcaagtctgcactcttaggaggcaacttacaacttcgaagtgaaagtctatatttttcgtttttcagcgtcagagtctcaggatctcgatgtggacaggcaccctgatacaaaagaacggtaagatggggtacaaaatggattctgcaggtaccgggaggacgttgcaaatcccaatgaaggtgagtggatgcacacacagcctggatagacacgaaatggcacaaagggagagaaaggctacatcccggaggggcagggtgtgggagtcacatcagggctggtgagtcagagacgagggaggatgtgaacacgttctgtgctgtcttgggccccgccaggctcatgtgtggctttgctccggcacacgtgtgtcacatgctctggaactgtggaatcctctggcatgtcaggcgggctcattccatgggggcaggaacagagagcccagtcattcgcacgttcatctgttctatactgcttgcctcccactggctggtctcctgctgggtgctgggaacacagttacaacatgaatgaacccataaggtctttgtttacgcggagcttagggccgagacaggagtcaggtcttaatcaaataaccacacgaatgaacacaccggccacaggcccagctgaaaccttagcaccgcgcggctgctggaggtccctgacggtggtctaggcttcacattaacaaaggaaatgacactgggaggcctgacttgtttttcatgactgcaactgtctcttgatgatcttctctcctttctaatcgtccccagctcagaattttgctagagccgaaccccagcttggaggagcgtaagccctgggataacttctttaatcagaatctggcctgagtccctgctcgaagctcaagcacccggggcctcgcggccgcctgcagtactcccctcccaccgcgggccagggccgactggaaaacggagcaggccatccccagagcacgggtcccgtggccacgttgagtgtcgcagagtacgggacgcagggcggggcttctggaccagcgcgcatcccaattggctctcggggctgccttttagccggacgcgcggaggtgggcaatccgctccttcccttgagcagtccacgccttgtggcggctttgcggagctgctgctttggcgggagttggaagctggtgtgaggtgagaggcgcggtggtcgctccccggcgaggccaggtcagaaggggaccgggatcatccaggggctttcctgcttcaagagcctggtctgagcggcctgttggggactgggcggaagtcgaaagggagggagtgccggccatgcgggtcttgtggcgggaatgagtccttgtggggcgtggtgttgtggagagccccgctttgcctcttcctcggcatcccgttcccctacatccagagagggcatccaggacctgatgtcgggcaggtgcccttcgcacatcttggggtagctcggggagcgcctgtcacgggtctgacgaggaagctgaggcctgaggggccctgggcgggggctgtggggcgccgaggccatgtttgagcagagccgggaaggtgaagttctcttgcggctctctgtagggcacaagcattccaaacgtgggggcaggtttagagttttacccttgatcaagggctgaacgctcagatgtgcacaggctcaggcgtcagtgataatcaaggtggaggcaaacgggagggctcctgctgtcgggctaaagggacagtggcggccagctgagccctgtggggtgtgtgctcagagatgccagagctcagctttttccattacagccgcgactggaaaccttgattttcaaaaaatgtatatgtaacaagccctctgctgttcaacgttggttttacatcataaggttttagcacgttgtgtagtcaaagaagtgtgtgtgtgtgtatatatatgtatatatgtattatatgtatatatgtgtgtgtatatatgtatatatgtattatatatgtatatatgtgtgtgtatatatatgtatatatgtattatatatgtatatatgtgtgtgtatatatatgtgtctatgagttgaatttgccctcggggtgccagtttgcatcctctgctgtaggagtcctgagctgtgttgttaactggcagatgggaataaccccttgccatggctttgactctgcttccgtagagctagcacagacctaatggggttagatttgggggttgggggtggtctgcagctaggggacagacaccctccttgcaaagcgggcgtgggtttgtagccttcctgtaccatgtgtctgtgaacagggctatgcaacattttcaagataacagagtgcctttgggatgagcctcccgtggcccccgagaccctgggcactgcagggatcctgatcccattactgcttggcttcctggctggaaaccgagctgactggggaaaggaggaacgcgcctggagaattcttgggaggaagttattgtgggtcagctggctcttcctggttccctcttgcacaccgggcagactgctggacatacagagatgagtccctgccctcaggacactctgaccacgtagggagatgaaaccatagccctggaggagggcttcgaatggctctttgccgggcaggcttgggctggggaacccaaggaggagagggagggcttagagggtgttccagaagcatcgtggacttagaaccctgggcagaattgggtgggtggctgggaagggagaggctcctagatgggcctgatcgaagtgtggtagggatggggaaacatgattagaccagcccactcatcagggtcgtgctgacaaatagggaagaggggcttttaggcccaaatttttgagccaggagtcgttcagtgctgtttgaaggaacataggtatttattagttcagggaaatattgtggtgggaaggaggggctgaggagatacaagtggcgtcttctgtggagaacgttaatgtgagaggggagtgattgtggaaaagtctgtctttgtccccaactagatgctcattcctggtgagtaggcctctgtgttctgaccctgagttgtccctcttctattagccagcccacattcccgtaatgtttgggtggttacagggctgtctcctggtgaggaggggagggcagctgagtaggacctggtggcctcatggcgatagtcttcttcctccttggcagtcttgtgcctccttccttccaatccagccctcattctttccctctgcacagaaaggatcagcatctccggtacagcccccatctgtgctaggagatggccgggtgggtgtggatgctaagacaaccgatccccctcatgttggcccgaggagggccctgacctggatactgtgagaccttttgaggacagctggctcctttgtgggatcagttgggtgtggggcagggccttgacctgagccagcccctagtttccagcctaggttctcctcaccactaatggcctaagtgatgtctgtctgtcctgtgatggggggttgcagttaccgcaggaggccctggattatggctcagattcttatggctccatccttgcacctttccccggctcaggtttctgtggggagaaggagagtgccagaggtgactggttcgtggttcttctaggctctcatggccaccatgttggaaggcagatgccaaactcagccaaggagcagccccagtggccgagaggtaatgtgtctcctcccattcctcaaatcctctctgccctgccaccccttctgctgtgcccctcactcctagagcctccattgctccatctttccctctctcctgccaaggactttgagtcctctcatctctcctcatcgccctttccaggctagcctgtggtcgtcaggctttgggatgaagctggaggctgtcactccattcctgggcaagtatcgcccctttgtgggtcgctgttgccagacctgcacccccaagagctgggtgagtgatggtagggccaggccccaagcaggaagcttggttctgggagccgaagctctgggaagctgcttcctttatgtccctgcaagcttggctcttccctgccccatgcctctgcttctgtctttcaggggaatggatgcactggtattggttgtatggttgggcggtggcttgttcccaggcctgggagagttgggtgggagaagtacagaggggcctaagtggtggtagggtgtgcccagagggctgggttcttatcatgcctgtgtcagttttgttgttcagttttgtggacatcacccactcagacttccccagcactcagcacatgcttgaagacctcttttttggtttgtgtcatgtgatggtggtgagggagcccagatttctcatggagacccaggctgcgttttctctgctgttgagaagataacttctggagactttcatataccactctgaaagagggtgattctgtacaggatacagcacttcagttttgagcatgggcccctttttcctgagccagcctagaatctggggtcaaacaccttttgtgaaatactgtgctgtaatcttttctcctggaagacttagcaggccaccaggcagagccagaggggcagtacaggggcgtttctttaccagtttgcaaaggccccccaggacatgctgtctctccccctgtcttgcaggagtccctcttccacagaagcataacggacctaggcttctgcaatgtgatcctggtgaaggaggagaacacaaggtagtcagagctatggactggagcaggcttggggacagggacccttgggtgcagggctgctggggccctgctttttggtgccattttcttcctctgatagagaaagaagggccccgtcctctgttccatacacaagcctgcagggaggggcagacttggagctctcttgcagttccttctgtgagcatgtatggattgcccaccgtgtttcaggctgtgaacctgtacccgactcaacagggtgaggggtgggaatggggcacagatggacaggcagctcttcctgctcaggtgttcctagtacatgggtctggggtgtggtccctttctgattgaatagccttctgtgagtcctagtggaggtgggccctctctgaaggatcttccctcctgctctgggagctgtgcccaggtttcggggctggctggttcggaggctctgctatttcctgtggtccctggagcagcacatccccccctgccaggatgtcccacagaagatcatggaaagcaccgggtgaggaggcagggagtgaggtctggctggcatttctgggatcctgaatgggatgacaatgacactaggtaggggtgtttgagaggggtggctggggcaaggcttctagagcatgagctttgcctgggacccttccttaaggaggagagtgaagactggaggctgtgccctgctgcagcctcatagcactccttctaaccccctcacagggtgcagaacctcctctcagggagggtcccaggaggcactggggaaggccaggtgcctgaccttgtgaagaaggaggtacagcgcatcctgggtcacatccaggccccaccccgtcccttcctggtcaggtaactgggctgaagggcactcacccttgggctggggactctgtccttctggagagcgggtgttggccgggcttggggaagtgctggactctcctcctgggttgctggatagtgtttaccagagtgggctgcagcctgccttcaccaccgcctcccatccccacattttgccagcacaggttggagcctctgttagatgcagcacactgttccagggaaacggagggtaaacgagatatgcgcggctgcaaggaggaaggaacagggctgagacagaataccaggaaggggacaaagagcctgtaagccagagccaagaggaagaaaaggcgaacaagaatgaggcgaacagtcttgctagagggaatagcctgagctttggccctgggcaggaaaggactaggtttgctccagaagctgacgtggttggaagccagcaagtgaggggtcgagagctgtgggaggtgaaatcgagaggcagaagggatcaaatcatgtaaggccgtgcaagtttggactggatctccaagtgcagtgaaaaccagttgcaaggttttaagtgggaagtgacatcatgaattggggtcaagagtggagaccagaagggcatctggaaggctgttttgttaatccaggtgagagatcatggtggacagtagaggttgaaaagtggattgagaggtcgaggtgatattaacaggactcactgagggattggacagtgggaacaggggcagtgagagaagtaggagaagttacaggacagccccgtttctagcctactttctggtggtatggacagagaacaggctttgggagaagtgagttggcccaaaaaggtagtttggagagagagagttttggtacctgacatgcttgtggagacactgaggaggcagctgcatataggagcctggagctcagaagagaggttggggccagagacactgcgaggctttagcatacagatggtgtttaaagccaaggagatgaatgagtccctgagtacaggtgggcttgggggcagcatgtgtcaagctcagctgtcttgaatgtgctgagtggccaactgagcaaggacagaaagtagaggttgttggtgaccttgaccagccctctgctgttctagtctcttgatctgcctaccttgacatcagccatcagcctccctttctgtgtttccttccctccaagcctagctcagattgcaggctcggggtgctaataatgctctttcgagggagtcatgggcatgaccccccgctgtctaccttctctttgcacctgagcagcccagcgttgccagagaaacacacaccagtggactggtttccttgctaagtgcaaatgtcacagggacacatggcactctccagggctcccacccagcctgctccttcttagacttatccactgtcaactgattccccatctcatgcttcacagaaagataaaagccatcacatggggacttgctgcttatccagcacatttccctgctactacagctatgtgtctgtcctaaattaaagctggtcctatgccggtgcagtggctcacacctgtaatatcagcactttgggaggctgagcggggtggatcacccaagagctgaagaccagcctgggcgacatagaccagccagggcaaacttgtctctccaaaaattagccgggtgcactgttgcgtgcctgtggtcctagatgcttgagaggctgaggtgggaggatcgcttgagcccaggaggcagaggttgtagtgagccaagtttgtgccactgcacttcagcctgggcaacagagcaagaccctgtcctaaaaaataaatagagctggtcctcctgttgggctgcagggacaaccccacccacctgcccaccagggattttgcccctgcagttatcccctttccttcttctattactaatccttcctttttatttcaccttttctggtagattgtgaagaccaggctgggttctgcctggagagaggcttggtcctctagtctcctttagggtaaattgaggcagatgctctgattctgatgtgaggcagctccaccatgaggtcgtgggagagtagcagcgtctggtgggcatgaactctggtgtcagaacttccagtcccagcactgctacttcttagcgttcactaccaggaagcagttctgtagcttccctgagtctcactttccttcttctgtaaaatgaggatagtggcggggcctgccctaaggagcactgggcagccctccaagtgccacgggccgagcgtcactccttgccgcacctcaggcctggtgtccctccccaggctgttcagctgggcgctgctgaggttcctgaactgcctgttcctgaatgtgcagctccacaagggtcagatgaagatggtccagaaggccgcccaggcagtaaggcccgccctccattgggttggggatggtgggagcagaagagcagaggctgggccaagcccttaagtcaggagcagtccccatctggtcctgcttcctggcctctctgttcccagccatacagcagtccagtccccatcagctggtgggaaaaatcccctgctctttgccgaccttcccttatgtctcacggccctgctcccatggggcttcctctaacgtctttccatcatggtcttaacaaccatgacgtcagtgcgtcggtgcagttaccttaagagttgtctaaaggctcctttgcttttgggaaatgtgctcagaggaagaactctgcagctgaactgtccctccctctggggctgccctgggtctttggctgcctgtgtcctcagggtggggcaggttggcacttccctctggctctccccggagcagggcttgccgcttgtcctcctctctactcacaaaaccctcctggatgggatcctgctgccctttatgctgctctcccagggcctgggtgtgcttcgtgtggcctgggactcccgcgcctgctcccctgccctcaggtaaaaaccttttgcctctagacatacatgggagaagtcgcaggctggggcggggtgtgtatcggggtgtgttggcagcagctccctactaaaggccctcttcgtggcctctctgctccgagccatacagcagtctagcctgtggggcttagatggaggtgtcagccacagggcctagggccatggctttgcctcagggtattcaagtaggacacaggctggccatgggggagctgagactctcactagccccttactcattcacatcttcagagcccctttccttatcaggctctgccctatgtcccacagagctctgctgaggaagcttggggggcttttcctgcccccagaggccagcctctccctggacagctctgaggggctccttgccagggctgtggtccaggcggtgagtgcccccagtggttacatatgggccaggctaaggggacaggggtctgtttctgctctggccttaacaccccctctgacccctcctattccaggtcatagagcagctgctggttagtgggcagcccctgctcatcttcctggaggaacctcctggggctctggggccacggctgtcagccctgggccaggcttgggtggggtttgtggtgcaggcagtccaggtgggcatcgtcccagatgctctgctggtaccagtggccgtcacctatgacctggttccggatgcaccgtgtgacatagaccatgtgagaatgtgagaccttccagccccttgggcccctaggtggacaccagctcccgataggaggcacaatattgtgtcctgtggctgagccccacttagggctgtggggggcacaaaggaatcgtccttacaatcatctggcagcacctgtcaaggccattaccatcatctcatttcatcctctgaagaccttgatagggagggatttttcctgtgtcatggataaggaaagaggagcttgggacaaggtcacgcaccagtttgggcctgagataaaactgagcagggtgggaccagaggatacctctggagaccaggatgggtgggcagccctgatgtccgcccgagagcagtgtcctcggcgagtatagttatcctttccctccttgcaggcctcggcccccctggggctgtggacaggagctctggctgtcctacgtagcttgtggagccgctggggctgcagccaccggatctgctcccgggtgcgcctagctcagcccttttccctgcaggtatggagccagctggggaaggctgggagtacctggggtgtctgtcctaggcatcctggcagcctggccctcaaagccactgcagggatagctttgcctacttccagtgggctgtgtgcaagtttcctggtgggcccgagcaggccacctaagagccttctcttgggcaggaatacatcgtcagtgccagaagctgctggggcggcagacagaccctggagcagctactgcagcccatcgtgctgggccaatggtaggggcacaggagcgtggggtctcagggggcaaggcaagcagcccttcagcaccagcttatgtatcccccatatacacacactagcagccctccctcaccaagtatcctggggtcatctagaatagttccaggtactcgccttgccaacagtctgagtgtggggtatggcacagaggcctggatgggactgggggttatagaagccatcctctgtcctggggctgggagggggaaacaccctcaccttttagaaagctctaggcattcccacagctgtttttgtgtttggacccttcatcctgtaatctgtgtctctatctcagtactgctgtcccagacactgagaaggagcaggagtggacccccataactgggcctctcctggccctcaaggaagaggaccagctcctggtcaggagactgagctgtcatgtcctgagtggtgagggtgaaccagatctgggcctttgmgggtgggtcactgaaccgtcccctctcggggtcagccagtcaccagggttctccattccaagtgtctgcacctgaggtsctctgtgataccttggggacatctgaagaagaatggaacccttctcctacaggaggagcaggcagccagggccatcataagggagcagctaagtgcatgcacaaagatggtggcctgaggccaggaggctgcagctgcttccccaaggccacacccagccctgccttctgagcggagtctccttagctttgggtggagatggtgttaactgaatggaatgatacgtgtaaggggcttagcacagcgcctccrcagagggcccttatagggagatccatctgtatcttcttcagtgcccctctagtagaggctgtgggttgatgtgtgggccctacgatgagatccaggggaaggcccccagctcctggcctgctctcagcctgtgtgatgataaacaccactgctccgggtgtacgttcctcatccctggggtggagttgggatgtgtggctaggaagacttgctagatcatggagggaccaggctgctgggcctcaacctgaccagcatctccaccccccgccccactccagccagtgtagggagctctgcggtgatgagcacggccattatggcaacgctgctgctcttcaagcatcagaaggtagggggtgcaatgtggtggggacctgggcggtggggggggtggcgatgtgtggccctgctgcctagccctgctctgcccacccagggtgtgttcctgtcgcagctcctgggggagttctcctggctgacggaggagatactgttgcgtggctttgatgtaggcttctctgggcagctgcggagcctgctgcagcactcactgagcctgctgcgggcgcacgtggccctgctgygcatccgtcagggtgacttgctggtggtgccgcagcctggcccaggcctcacacacctggcacaactgagtgctgagctgctgcccgtcttcctgagcgaggctgtgggcggtgagtcttgaggtgcacggggtaggtgggatgtgtgtgcagtggtgaagggaacggctccttcttcataatggaccctccgcccccagcctgtgcagtgcgggggctgctggcaggcagagtgccgccccaggggccctgggagctgcagggcatattgctgctgagccagaatgagctgtaccgccagatcctgctgctgatgcacctgctgccgcaagacctgctgctgctaaaggtcaggcctcccctacggcccacttggtcctaggccttcccctcttggtggtaggaatggcccatccctgcccatgctctacctctgaaacctcctgggtagtaggtgtggccttgcccggtctttggctaggcccctgcccatgtgcctggctctcctgaggccacatgggtgcctttttctcccagccctgccagtcttcctactgctactgtcaggaggtgctggacaggctcatccaatgcgggctcctggttgctgaggaggtaggcagggcagttggagacaagatccttgcctggagcctggcctcctccagcctcccaccctgagtgccagctgccccaggctcctcctctgccccgtgtgtgctgtgggggtgggcagcccctggccttgcagcggggaagcctagctcgcacctctgctccctgtgccttgggatatggccacctatgccccggttctgtgtgtctctctggatagcactggacatgtgtgcctctgaggttctctgcacacctcctgctccccacatttcttggccacagggctactgcccttgagggtgggaattcacttcctctcactctgcaagttggsccagcaggtgctggggcatggctctggccatcctcttgggtctctaggtctgcttttactggtttcacctgcatgtacctggtctgggggtgtagggttgatccctggccagcttgtcagagaacaatggctccacggcccctagaccccaggctcccggccagcctgtgacacagggcgacagcgattgagcagaaagctgctgtggaaaccgagtggggactttactgatagtgacagtgatgacttcggagaggctgacggccggtacttcagggtgtgtttcaaaaagctgcccctggagggaggtggtagggaggcggtggggagctgcactcaccccggcctgtcccctccagctcagccagcagtcacactgcccagatttctttcttttcctctgccgcctgctcagcccgctgctcaaggcctttgcacaggctgccgccttcctccgccagggccagctgcccgatactggtgaggcccttgttcccttgcagtcctcgaggcaggctgtgtctgtgctgggtgccaggtctaggtcttctctcttctgcagagttgggctacacagagcagctgttccagttcctgcaggccaccgcccaggaagaagggatcttcggtgagtcccaaccagtcagcccaggctcctgcaggcagtggtgtttgctggtggctgctgccccctgcaggacagtgacaacccaactctaggaaggcaggctgcagagtacagtcttctgtccagtcagagctctatccctccctgggcttctttaaacaagaggagagaagcctgtgcccagtggctctctgttctccctacctagagccttcacttctctcttctttccagagtgtgcggacccaaagctcgccatcagtgctgtctggaccttcagagacctaggggtgagaggagccactgtcaccatcttctgtccccctgctcccaccccaatagagtagctcagggaaacccagctatgtccccatcactccacagggctggcctgatggtgcctcattaagaccctgggatttacttggtgtcttccagcaacagatttggtgatgggttggagaaggtgggatggtttcctgcctcttggtctcccaaatcactggctcatctttctaggtggggtattgggactgctttgcggcagcatttgcacgcaaacattgaggtctaaggggccagaggtctcaaggcaggtttctgggggacaggcctggcccctgggccatgtgtacacagtccctgtggtgagcgcactcacggcttatcttccatggcccaggttctgcagcagacgccgagccctgcaggccccaggctccacctgtcccctacttttgccagcctggacaatcaggaaaaactagaacagttcatccggcagttcatttgtagctagaactgtgaggaggagcctgtgctgagacttctcagccccagaacacagctgtgtcctagagccagaagatggagaggaggctgcaaacccttagctgctctataaatataatcattgaggcttgattgtcccttgccatctcttgctttttcccttctttgatgtgataaacaaggggacgagacgagttgtcttttccccagcccagcagcatctttttggtgtatgtgtgtgtatttgctctcttcttccccagtcccacaaaatgccctaacttgtcccatgaaacaaagcccaaacgaagacaaacagcagaagccaagctgctgctttgacccgacgaatttattgaagagagctctgtccttctcccttctaccgagaagaggcggcttgcagggctggcacctgtccacacctgtcactgggcctttccctgggctaggctgagtgggagcagatgccctcatcctatgtcgggcctgtgcaggagccatcacaccaccttgttgatgatgacacctagttcttcaatctcacactggacttcatcccccttctgcaacagagcaggccatgagagtgtcagcccttccgtcagacacacgtacacaagcctgtacttctcaagtctgagccaagcctgccagccctttggggcccttgctctctttgcttttcactaacctaccttgagaaagacaggaggtttcctgaatacaccgacacctgggtggaggtgggggggtcccagtcaggatgacatcccctgggtaaaaggtaacaaacctggagcaaagcaaaaggacccggtgagaccaggggctggctgaggtggccacagccaaaggtggagggctcaggtcagcctccacatgtgtggcaggtggagcggggctggcaggatagcccctgtcactcactgggacacccaggctatcaggtcctctgtcttgaataccatctggttggtgttgctgctctggaccacttccccattcactcgacagcagatctttaagttgtgtggatctgaaatgcaaagatggtaccttggagttatcccttttccccttcaaaccccccagtattttacaaacacaactataggggtgcttcgtgacttggcaggtgaaagggctttaaagtgcccacattgactcagtgcactatgttagaactttctgtatagacattggccttctcaggcctccctgcatccccaagagcaccaggcagtagtcacttggatgagttgagaggatgttgcagactctgaaggagaagagaaaaatggctagggtttttgccttgaaaaagggcatctgtctacagcataggaagatacctgtagatacaaaaatgactcctgggcagggccaagcgtggtggctcacacctgtaatcatagcactttgggagggcaaagcaggtgagaactgattaagctcaggagttcaaaaccagcctgggtaacgtagtgagtgcttgtctctatgcaaaataataaaaacattaggcatggtggtgcgtgactgtagtcccagctactcaggaggctgaggcgggagaactgcttgaacccaggaggttgaggcttcagtgagctgggattgggccactgcactccagcctgggtgacacagtaagaccatacttaaaaaaaaaaaaaaaaaaaaaaaaaaaagacagcatctataaagcagtgaggcaatggttctagccaggacagagaagcctcgtgtaccggatgctggcaggggatggattactgtaagaacatcctggctaaccagcacttttaactgttggtgttggtcttagtgttctaccacccttaagtagagcacctgaaacacaatttaactttgccgaggactctgtgtgggtgctgtgaggcactggggtctttggtatcctggcatggctggcccatgtggacaccccccacctccaccacagttgtgggtggctgtgtgttaagaggctgcgctctgccctctggcacactgcctccaacctggcgctgtcccctcactgtgtgtggtcaatgctgttgtttccacagtggctgggtgagtcacactggctttcatctgtagtgtggaaaatgcctgggccttgcgatagctatgctccatgatgctcaacttagattatttcagatggtggcagccgcaggaagcccgatccacccatcagctcagtgttctttgtaatttacttcacgcatgcagtttcacatcctctgcagttgtgttccctctagggggcttgggaaggaagcccatgggagaactggtggctgaggataaaagactttccctgtatggagtcagcagtcaaagggcagccagggagggcaggtgccacatgtacctgaacccatgctcctccctggagggctgttcatctgtgcaatggtaggtaccagggggcagggaccagggacctacctgctacactgtccttggtcaccaaggcagggcccagagggcagaaggtgtcgaaggtttttcccagcagccactgtttcccattgcgtcttgttagccagtcacgagcactcacgtcatgagccacagtgaagccggccacgtgggccatggcatctgtggcctatgggggcaggggatttggccatacaggaggttagatcacgggtgacaccaacacctgtggcaagggatctcaaagctgttatcccatgttagtagccagagccagccaaaggtgggtgaagggaaaggcagtgtcagggagcaaggaggctgactgcttcctagtgtcagggacagctggcaccatgtgtcggtgagtgaggtcagaactaggagaggcaggagctggggcctctgctgcactctggcctgggagcccaccctttccacctcaccttgatgtgcttgcctttctttccaatgaccacggccagctccacttcccaatctacctcctgtagggtgggagaggaatagtgagccgcagtggcttcggggcccattatctatgctcagaggctgtacgccatggatctctgtcagtatggcttggctgccatcccacgtttgccatcaccctgaaccagagcccagtgaatgacaagggaggtgtgacttgtagacccatacattttgggcagtggcagacagcatcatggaatacaggcacaggtccccacaccactgtgactgcagaagagcaacacgtgtccagggcactgagtttaaaagtcactctggatacttttaacaaaggataaatacgaagtaatatcccctagcaatatgtaaccttactgtgtgtcaggcactgttctaagtgttttaatctattaactcactttagtaagagaaagattgacatgccacaaaggacttgagtaagcaattcacaaaaaggtaacggacatggccacaaaacatgaaaaaatgctcagcctctcccataatccataaaatacactataaaatagatataatttggccttcaaaattggtggctctttctaataataaccagagttggtataagtacacctgacatccagatgttggtctctaataccactccccactaaggagcactgggttccttggtccaagacagacagtacatgatgagcctggaacgtcttggccagaaagcaaatatatgctaaaagcttggggatggaacaaacttgaaggtccctcattggccaaattgaggtcacctgaagaatgtaaatgatggattacaaccaattgaataaaaacaaaaaggaattcacagtgatattgaagacacaggaataaagagcgaggcagctttttttctttttttttgagatggagtctcactctgttgcccaggctggtgtgcagtggcgcgatctcggctcactgcaagctccgcctcccaggttcacgccattctctcacctcagcctccggagtagctgggactacaggcacctgccaccacgcctggctaattttttgtatttttagtagagacggggtttcaccgtgttagccaggatggtctcgatctcctgacctcgtgatccacccgcctcggcctcccaaagtgctgggatttcaggcgtgagccaacgtgcctggccaggcttttttcatagaagaatgccagttaataaaaactgcatgatttagaaaaatcattgttcttggccgggtgcggtggcttatgcccataaccccagcactttgggaggctgaggcaggtggatcacctgaggtgaggagttcaagaccagcctggccaacatggtgaaaccccgtctctactagaaatacaaaaaattagccgggtgtggtggtgcatccctgtaattccagctactagggaggctgaagcaggaaaattgcttgaacctgggaggcagtggttgcagtgagctaagatggtgccactacattccagcctgggtgacagagactccatcacaaaagaaaagaaaagtcattgttcttcatcccccaatgcaataatggattcagtaaggatgactacaggatccttggatgagaatctacggggcaataagatggttatgtgatctcaaactaccacatagattgcttgttaattacaaaaatggaaatgcatcttcacaatggagggacttagtgaacgtcagctaaaccaagtggtcaaattctgggatgcaatgggaaatgtataacatctttgtagatctcttgataaaaatgcttaccctgacactaatcatgaagaaacaaccagacaaacccaggatgtgaaacatgctatgagacaactggattcttcaaggaaagggcaggggggattgtttgaggtcaggagttggcaaactatggccagctcaccgtctgctataatcaactttgattggaaacccatcattcatttctgtatcgtccctggtggttttcacactataacagcagagttgaattgttgcaaaacagaccatatgacactcaaagtgtaatatttactaattggcccttgatatggtttagctctgtgtccccacccaaatctcaacttgtagctcccataattctaacgtgctatgggagggacccagtgggagatgactgaatcatgggggcaggtctttcatgtgctgttctcatgatagtgaatgggtctcatgagatccgatagttttaaaaatgggagtttctctgcacaagctcttttctgcctgctgctacccacctaagatgtgacttgctcctccttgccttctgccatgattgtgaggcttccctagccacgtggaactgtaagtccaattaaacctctttctgttgtaaattgcccaatctcggatatgtctttattagcagcatgaaaacagactaatacagccctttaaaacagtctgtggaaccctgttctaggttaaaactactaaagagatataactgaatacagtgtgtgcccttggttgatcacagagcaacaaagtaaccaaattaaaagtcatctttggggcaattggatttcatattaaatatcattcaagttaattttcttggctgtgataatggtatggtcatgcaagccgttgtccttataaaatgtctatttcagtttttatgacaatatttgcaatgtgtcaccccaacccctgccaaaaaaaaaaatgtgtgtttgccatgtgaagggcagggagagggcaagggagagaaagcaaatacagcaaatgtctacagtgaaaccaggtgaaaagtatatgagcgttcactgtattatttcagcttttctataattcccaagacatttctaaaataaaaatttgcgaggaaaagtaaccagtgttagtaagggtatatacactaacgatggatgtgtaagttgctcttacaatttgcttaaaggacaattgggagattttctcaagggttttgaaatactgcctgtagtttgataatattcaaatcctaagagttcattcaaaggaaataataaggccgggtgtggtgactcacacctgtaatcccagcactttgggaggctgaggcaggcagatcacaaggccaagagactgagaccatcctggccaacatggtaaaaccccatctctactaaaaatacaaaaattaggtgggcgtggtggcatgcgcctgtagtcccagctactcgggaggctgaggcaggagaatcacttgaacccaggaggcggaggttgcagtgaaccaagattgtaccactgca

SEQ ID NO: 96426 - DNA, 55214 bp, Homo sapiens
aagatgccctgaccacactccctgaagtagctctctaatccttctctatcacctaaataattttttttttcttgagacgggatctcactctgttgcccagactggagtacagtggcatgatcatggctcactgtagccttgatctaccaagatcaggtgattgtcccacctcagcctcctgagtagctgggaccacagatgagcaccactacgcccagctaaatttcttaaattttatgtagaggcggagtctcactgcattgcccaggctggtctcagactcctgagctcaagcggtcctctcgccttggcctcccaaagtgctgggattacaggtgtgaccctttattgaatgtttaatatatggcagggttttttacatttacatttattatctcatttaatgttcccaaccaaaccctctgagctaagtaatggtactgtcttttttttttttttttttttttttttgagacagagtctcactctgtcacccagggtggagtgcagtggcgcgatctcggctcactgcaacctccgcctcccaagttcaagcaactctcctgcctcagcctcctgagtagctgggactgcaggcatgagccaccacgcccggctaattttttgtatttttagtagagacagggtttcaccttgttagccaggatggtctccatccgcccgactcggcctcccaaattgctgggattacaggcatgagccacagtgcccagccctgtcctcatttttgcacgaggacactgacatacaaagaggcccaagatgaggtcttgcagccactaagcagcaaagtcaggattcaaacccaggtcggcctggctccacagaatgagtttccaagcaggctacctcacagtttgtgggggcttggtggcttcccccaaccatcatcacccagcccctcaccttcattactgtgttgtagatggagatgaagttggtgaacaggtccaggtacctggtggtgaagacgagagcaaacaggatctggctcttcccagagatgcctgtggccaagggtagacaggagacaatgaggacacagactcccaagcctgcccaccctcaagaggtgcacagcctggagctggggaggcctctagagtgtccactcccactcaaagacctcctgtccagggcactgtcgctccctaagggccaggaaactcacccttcccatcggatcacttgagtcgtcgttcctctcattaaactgtaatctgtctcccagtctccaaataaagacacgaacaccgagttcccagtccccctgcgtgtgcctgcctgggctcttgctctggggaggatgtcgggggtggtgtgagtcgggcttggtgggggttgttgaggcttctcttcactccacccccagagttccactgacagtccccaaagctcagtcttaggaggaacaactcactgactttacaaggtgttgattcaccagggagaccagagcaggcagaggaaggttcagggccaggggagcattctattttatttttcaaactgtaagatttaaaaagccttttttcttttttctttttttgagatggagtctcactctgttgcccaggctggagtgcagtggcgtgatctcggctcaccacaacctctgcctcctgggttcaagtgattctcctgcctcagcctccgaagtagctgggattacaggtgcctgccaccacgcctggctaatttttgaatttttagtagagacggagtttcgccaggttggtcatggctggtctcaaacttctgacttcaagtgatctgcccgccttggcctcccaaagtgctgggattacaggcatgacccaccacgcccagccaaaaagccttttttctagttacaaaagttatgcctatatttactctttgcaaaacaaaaatcaaacaatatacaaagatgcaaagataaaaatattccaaacccctagtgttcatccttccatatctttgtgaacatgtacacacatgacacctatgtgtacacatatgatgcacatggatgcactgagttgacaaaaaagggttcatactctccatgatgtttctttcttttttatttttttctttttagagaaagggtcttactctgtctcccaggctggggtgcagtggtgcaatcatagctcactgcagcctctatctcctggactcaaacaattctcctatctcagcctcccgagtagctggtaactacagacacaaaccatcagactggcaaattttattattaattattattattattatttttgtagagacagagtttcactatgtcgcccagcctggtctcaaactcctgggcccaagtgatcctcctacctcattctctcagtgttgggattataggcgtgagccaccgcgcccagtctaaatgctgtttcttgacccactttggtctctttctttttttaactttttattttgaaagaatgttagatttacaacagagttgtaaagacagtacagagaatcccacatatccagctatatctagtgttaacatcgtatttgggccgggggcggtggctcatgcctgtaatccaacactttgggaggccgaggcgggcagatcacctgaggttgggagtttgagaccaagcctgaccaacttggagaaaccccatctccactaaaaaatacaaaattagccaggtgtggtggctcatgcctgtaaccccagctacttgggaggctgaggcaggagaatcgcttgaacccaggaggtggaggttgcagtgagccgagatcgtgccattgcactccagcctgggcaacaagagcaaaactctgtcttaaaaaacaaaacaaaacaaaacaaaaaaacatcgtatttagtgacagtactttatcaaaacaaagaaatcaacatcagtagagcactgttgactgaactccaggctttattctgatttcaccagttttcccactgctgccctttttccattcctggattccatcccggaatccatgctgcattttgttgtcatgctccttagtgtcctttggccactttttatttatttatttattttttgagacagagtctcactctgtcacccaggctggagtgcagtggtgcgatctcgactcactgcaacgtctgcctcccgggttcaagtcattctcctgcctcagcctcccgggtggctgggattacaggcgcccaccatcatgcccggctaatttttgtgtttttagtagagatgggttttcaccgtgttggccaggctggtctcgaactcctgacctcaagtgactgcccacttcggcctcccaaagtgctgggattacaggtgtaagccactgtgcccggacagcagtcttggttatcagatggaagaaacagtatatatatagggtttggtttaacccgtggtttcaggcatccactggcagtcttggaacatatcctccgtggataagggggaactactgtgctgtctaattcagggtctggttcccctgtacccctgaactgtgccttctctaaccatccctctggttccagacatttggggtgggagaacatttttttttctttttttgtgaggcagggtctcactctgtcacccaggctggagtgcagtgacacaatcacagatcactgcagcctcaacctcccaggctcggatgacccccctaccttagcctcctgagtagctgggactacaggcacatgctaccatgcccagctaatttttatattttttctagagacaagattttgccatgttgcccaagctggtctcaaattcctgggctcaggtgatcctcctgcctcagcttcccaaagtgctgggattacatgggtaagccactgcacccagcctgggggaacatttttaatgagcaagaaggaacacccctgaagtccctaacattctggagaatgtgctggctttagggcgagcctcggtctcacattcctcacctgccaaacggcccctcatgcagagtggcaggactgagctgaggaatacacagtgctcagtgagaacctgagtccctctggggggtctagcacgcgcgcacgtgcactagccggggtgagggcaacagtggggctggcagtgggtaatgaaccccactgggggaggccatactgacctgaggccagctctgggatggcctgatgttcatctcactgagccctcacacagactttgacagagaagccctcagccccacgaaggactgcctgggaggcagccctggtgggggacgcttggtcacccgcttgggccttcccctacccctcttttctcttcatcctcagcctgccagtcccctgggttttactcacattttccttagcactttgggaacccttgtgatcttcagttttgttttgcttgtttgtttgtttgagacagagttctgctcttgttgcccaggctggagtgcaatggtgcaatctcagctcactgcaacctccgcctcccaggttcaagcgattctcctgcctcagcctcatgagtagctgggattacaggcacctgccaccatactcagataatttttttgtatttttagtggagacggggtttcgccacgtgccaggctggtcttgaactcctgacctcatgtgatctacccgccttggcatcccaaagtgctgggattacaggtgtgagccactgtgcccagccccccggtgatcttgagcacaatagttttcacacttttgaaaacaatcatttccaccaggaagctgcacatggagacccgggacacagaggacaatgtgagcctggactggccagagtccctccggggtccactaagcataggtggaccccactgccaggggcagccctcactcccatttgacaaatgggaaaacacaggcccagggtcacacagcgagtcaaggggaggagtgagagtgaagcccaagtctctggtctttggggctgggtctgttgaggtcataccaggccctgcctccatcacctctgacttctctctgtgcacacacaggcccatccctgccacccagctgccctttttctgttcccatagtactcactatggcctccaacaaaccgtgtcatttgctcagtttcctaggactattgtttattgatggcttcctaccactagaaagtcaggtccaccacttggccgggcatggtggctcacacctgtgactcgagcccaggagttcgagaccagcctggccaatatggcgaaaccccgtctctactaaaaatacaaaaattagctgagtgtgatggcgggcgtctgtaatcccagctacttggaaggctgaagcaggagaatagcttgaacctgggaggcagaggttgcagtgagccgagattgcgccactgcactccagcctaggggatagaacaaaactctgtctcaaaaaaaaaaaaaaagaagtgggcgcagtggcccacgcctacaatcccagcaccagcactttcggaggccgaggtgggtgaatcacctgaggtcaggcgttcaagaccagcctggccaacatggcgaaaccccgtctctactaaaaatacaaaaattagccgggtgtggtggtgcgtgcctgtaatcccagctactcaggaggctgaggcaggagaatcgcttgaacctgggaggtggaggttgcagtgagccgagatcacaccacagtacttcagcttcagggacaaagcgaaactctgttaaaaaataaaaataaaaaataaataaaagaaagtcagctccaccagggctgggcctctgctgtccgggctgtattctaggtgcccagcagtgtctggcagacagcggccaggtaccagtgtcccctcttggtcatggttgctcactccgtgcagggccttctgcaaaagtgcaggaagaggttggagctgattctcccctcaccagggcctgctgctccgggtcccccactcagcattcctggccacctcccctgaggaagaacctgaactgtctctgtacctgtctctccagagaccccaaacccaaatggcctccaggcctagaaccactccctccacaccgtactgttgctcatgtctgcaccaacccccaccctgccaggcctccccctgctctgtgccttttctctcaaagcttgcaaagcaacctgttcaggcccccttccaggccccttcccggctcccaaaccatgaagggctccccagacccaactccctggcctggcagaaaaggccctttcacatctggaccagcctccctcctggactcatctccctccagaccaccccaaatctggctgcccacccttcccgggggatgcccggtgcttggtgacctccatgcctcttcatccccggagccctccacagcacacacttcctggattgacacctgctcgtcctccgggaccagcacggagctgctccttccacagggccttcggggcccactctcagccttctcagcctcctcagccccacgaggagcctgagctcactcctgcctctgcacacccagtgccaggcacagggagggcaccacgaggatgccggtggacaaagatggctggaggaggctctggcagcctttcgtggctctggatctgttggcgaccgcgagtccagcctccaagcttctccaaacccccagcagggcagccagaatgcaaacaggggacccctccagccttccccggcttccgtttagaggcagctccatacccgcctgagcccggctggtgccctcctgccacatcacagccaccggtgccacacatgcaggcaggggagggacgagggctcactttggggggcggggtggggtctgggaaggggcagggaagagaagaccttgagaatcgtgggccgttcctgagtgcatatctgcttctccccacagtcgatggtggaaggaacaatgggtgtaactggtgggagggaggggttgtcacctcccttataaccccctcttccaaccagcagtgacactgccaacctgagggggcgtctgtgcaggaacaaacccacccgcctcccatcatctcgaggggtcctcctcctctgattttatacaactttacattgtttttggaagtggagctcygcaaagtttcaaggacccccacgccggagtccccaccctgagcagacacctggagcgccctgccctgcacgcaggggcatgaggctggccagagagggggtcccgcacctccctgccaggcgcccctcacccttgcagcacttggacctccagatcttccccagcagcaagatcatggccaggaggtggctcaggtcgccgaggattcggaacacgttcatggtccagccagtcagtcgtgcgcccgcgcccagcaaacttctaggaaactttctggcgggcagggcggctgccacgtctccggccccggtctctaggtgccccagagccctgcctgcgcctcacagctccgcgatcgcacccgcgcgccgccgcccacgcactcttggccgggcggtgacgtggccagggcggccgccggcgcagggtggggagccaggaagcggcgcggcccggagatcccgcctcccgcccatcccagcgcccggctcccggactgggcggcccggcgacgcgggggggcttctggcctgcgcccggctgccgtgtgcgccgggtgcccgccacgacccatgtcgcccatgccccaagtgccctctgccttccctccgcagaaactggaggcctgccaccaagccccaatctctgcctcagtttcctcatctgtacacaggccccataacactggtgccagcgcttggcaggagccagcacgtggaagtaccctgtggggcgattcctgctattgtcctcatcttcccggagctggagctccctccctgggagagtggggtggggcggggcgagccggaagcggagtccccacctccgtctgttaatttggttgtccacccggtcgggacccgatcttgctgcaggtggacaatggtaatggcacaccactcagcagcagaatcagactgacctcggctgcagcctgggtcggtgggccttcctctctcttggtctcaattttctcacctgtaaaatcgggttgttgtgggtaggcaggaggtcaagctggtcagggagatccagggccctcgttcgtgccttccctcttcttggtgttactaggatgttaaacagggacacacaggacaggagagacccaggagggctgagcaccaggaagggtggggagtgaagggtccctggtgggagggagtcctcccagggctgtgtggtctgagcaggtccaccaccccctctggatataagtctctgcgtctgaaagagtggaccaggtgagctgagggcccttagcctcccctccttgacctgaataagccctcctcccattcagcgccctcatctctctctaaataacggacctcctcccactcccacctcctgccacagataaccagagaggcttttccatgacaaatgtatttaaacagagatggggtctcactgtgttgcccaggctagtctcgaactcttgtgctcargccatctgcctgcctcagccttccaaatgctgggattacaggcataagccactatggccagcctcttttctgtgataaaaatctgtcacttcagtggtcaagacccttctatggctccctatgccccctactttccctacttttcctcccagggaaaggcagtccttttttttttgagacagagtctcgctctgtggcccaggctggggtgcagtggcacaatctctgctcactgcaatctctgcctccctggttcaggcgattctcatgcctcagcctcccaagtagctgggattacaggcgcccgccaccacgccaggctaatttttgtattcttagtagagatggggtttcaccatgttggccaggctggtctcraactcctgacctcagatgatttgcctgcctcagcctcccaaagtgcggggattacaggcgtgaaccaccgcgcccagccaaggcagtcctttgagaccccaaacgcagtccaaagaccagcagcattgctaccgcttgttgggaatgcagaatctcagcccctccccaggcattcccgggtgaatcagactccgatgtgcacacgaatcccctggggatcgtgtttaactgtaaagttccaaaggcactcatctaaacagcactgtgaggaagcagtggcctcattctcatttcacacatggggaaagcgaggcagggaggctaaataacttgcttgaggtcacacagacaccaagcagtcctgtagcccagattccaacacacggtctaccatgaaatcattcccttacactgtgggttgccatggcaggtgatgagcaccctgtcgcgagaggtgggtgagcggccggtggacgctcatttgtcagagactcagcagcaggccctcctgccctggcagggaggtggtgaccccaatagccgtcaagtactgagcatctgggtgccaggcatgggtcaggcctgttactcaggttctttccatcaacaggcacgtggttcagcggccttcagagcctcgctttgcaggggatgaacctcgaggtccagggaggtgaggtgcctagaccaggtccctctgggaggaggagccaggcgctcatccctgagctgcggcaggttccgaatggcccttctgttccccgctcccctccaaccctgcccagatgcctcctcctcagccggtgcccagagaaggcggaggctatttaaatccctcaggtgtggctgcggttgtctctgcccaaccagctggcatttccttctcagcgcccacctcctccccaagccagagaaaagcacgtgcaagtgccatttggtgaaaacatctgtcctcctgggaagcagcccccactgtgtgtgttgggggggacgtggggctggaatgaggctggatcctccccttccctttatttcctcaagaccacagggaaactggccaaggccagggagagtctgaggagggaccgtggtgctggaggggaaggaacccaagctgaatggctccaggggctagaccttgtcccaggcctgccactgtggccttgagcctgccacgtcccctctctgggcctcagctttctcatctgataaatgggaaaaataaagacagatgtaggccagtcacggtggttcacacctgtaatcccagcactttgggaggcagaggcagggggatcacttgaggccaggagtacaagaccagtcaaggcaacacagcaagacttgtctctacaaaaaattaagaaaacagaaaataaaaaaaagattagccgggcatggtgacaaacctgtggctccagctacttgagacgctgaagcaggaggatcgcttgagcccaggagttgaacgcggcagtgagctatgattacatcactgtattccaaactaagtgacagagtgagaccttgtctcaaaaagaaaaaactaaaaagaggccaggcgcagtggctcatgcctgtaacctcagcactttgggaggccaggtgggcaaatctcttgagcccaggagtttgagacaaacctgggcgacctggtgaaactctattgctacaaaaaaaaaaaaaaaaaaagacaaaaattatggccaggcacagtggctcacgcctgtaatctcagcaytttgggaggctgaggtgggcggatcacctgaggtcaggagttcgagaccagcctgaccaatatggtgaaaccccgtctctactaaaaatacaaagattagccggattagtgkcgagcgcctgtaatccaagctacttgggaggctgaggcaggagaatcgcttgaacccaggaggcagaggttgcagtgagccaacaccaggccactgcactccagcctgggtgacagagtgagactccgtctcaaaaaaaaaaaaaaaaammmacacacacaaattagccaggcgtggtagcacgtgcctatagttacagcttcttgagaggctgagttgggaggatcacctgagcctgggaggtcaaggttgcagtgaactgagattgmgctactctacttgaaactgggcgtgggtgacagtgagaccctgtctcaaaaagaaatgaagtattgcaggtgcttagccattgctctttgcatccagttttcctgatgtccctatgaaatggatactatgtccttattttacagatgaggaaatcggggctcaaatttgtctcttgctccccaaggtcagtcacatggctctcctctccccaaagtcctaaggctctgtccacagtaattagccccacctcttttgtgcccactaggctcccaggtggagactttcaaagctccccatggagaaaaggggaaaccctttactcacggaaaacatttggctctagcccctgccagcactctggccacctgcatggtcattcacgatctgtccctgctgctgggtggattccagcaagtccctcacgtctctgarcctcaatttcccaacactcaaaaatgtgcctgctgcaggggaaagcaaagagggaaatttccyttagctcaaagggcaaggactgttttcttctcacttaacaaagcaaattctacgttcaaagtcagatttatggaagagagaatgggggacttgctcaattattttttaaaaataggtatatataatctctctcgctcgctctctttttctggtcctagccctttcttatatttcaccactgtttggaatatcctgcaaactgcctccaattctgtgtggaaggaaataggggtgtaaagtgaaaatcactccacttaattggctgtctctcaccgggcaggggcctggaaggaaagctatgtcccgggcttccggggctccctagagcttcctctaggccgccaagtcttcctctggcctaggcgagtggacgctcccccgtggaaggaatgacctcttcccaggcagcccctgaggtcccgcccgcccggaggcgcggacgagtccatttcctaaccgagtgcggggtgggcccagccttcctctccctgcggttccaccccaggtgttcgggaagctctttccccagctcaatatattttgagtgacaggaggcaggggcagcgggccgcattttactgacacaccaaggttataaacaccaaggttcaaaacctctcttcccgttttagttacaaacacatttactgaagaccagctgggcaccaggcgccttgagggttgaacttaggtgcagcctccaggggcctttctggtgctgtgggaggtgggtgcctgtgcacggactggaccgcacagaggaaaaatggcaatcactgtctgttggagggagtccctgggaggactgctcttaaagaaggctttagggcaaatgatgctctagtgggctttggagggtgtgtaggagcttgcctcggagacaaaaccttggggaagagaagagagtccccagtagaaggtactaattgcacaaaggcgaggagatargacgtggcctgccccccgcccctcagtgccttttacttgtaccattcwttattatttattattattattattttcagacggagtctcactctctcacccaggctggagtgcagtggtgcgatctcagtttactgcaacctccacctccygggttcargcgattctcctgcctcagcctccggagtagctgggattacaggcgcctgccaccacgcccggctaatttttggatttttagtagagacagggtttcaccatgttggtcaggcgggtctcttaagtccttacatcaggtgatccacctgcctcggcctcccaaagtgctgggattacaggcgtgagccaccgcgcccggcctgtagaggccaaggaagggaagaaggaaaagatgagcattaaggttagacagatgagttaggccctcaaactccaccacctaagagctatctgaatttagactagctaatctctccaagttatagtgttcacatcattaacctgggtataaaccaagtaccgacctcatacaatagttatccgggttaaagttagctaaatatctaaagcgatttgcaagatataaaccacgcaatgcacgtcacctcagctccttgcttcccttcacaggcaactgaggcccaaagagggtctgccagagcagagaggggcaaaaacagacaactccagggtttcagatggtgacctctccctcactggtttattcctgaagatrtgagacttctagggcctggaagtcttctgtgtcttgatcatggtggtggtaacacgagttttatgagtatgtctgaaaaattaatcgagctgtacctttttttttctttttaagagacaggktctcgccttgttgctcaggctggaggaggagtgcagtgacaggaatgatagctcactgcagcctcgaactcctgggctcaagccattctcccggctcggcctcccgagtagctgggactacaggtgcacgccattacactgttatttttttctaaaagacagggtctcgctatgttgcccaggctggtctcgaactcctgggctcaagtgagcctcccgcctcggcctcccaaagtgctggattacaggcgtgcgccaccgcgccccgcagagctgtacttttaagatgttcgctgtactatttgtaagttacacctcaattaaaaagaaaagcataataacccgggccgcgacgcccccacccctcgccgctggcgacaggtgtctctcggtgaccaaaacgcggctctcagcgcgcggagtcgtgcgcctcgcggaggccctggcgaggttcctacggcaaccgcaagccgctcgcagcgtctccagagtgacgaggcgcgaacgaagacccggagcccggattcaggagtcacagagcgaggctggagagagaccgcggctggccaaacgaggaggggagaggctgggccacccttcgtccttgcgctggcattccgaggacttccggcaaacaccactccccagccctgacggtggccacaagccgctgcttgaaaacacccctggggattcattctcagctttccaggtgggaagatggagggcctggctgcccccccagtaactcggggctcatcaggggcagagctaggccctgcacccggtggcctccttccaagttcgtgcagtgcagccaagtgccaggcactggggctgggtgctggcacccccttgggttatgggtccagctctgctagtaacttactgtgtggtcgtggagttctctctcctctctgagactcagacatggggacacctccaccagtatctcagagtagctgttaccaagcgtgtgaaataatggagtgtgaaagcggctcaccaactggaacgtgccttgcgcatgccacagaccatcacagttgccacccaattgccatcttgtcctctttatcgccccagcccctggggctcagaaatctctgtgcccagaagtttcaagtctgcgggtgagagtctactccactttccccttcgagaagtgggtccagggcagctctcctgagcaccagtcatcatctagtccccagacttaaaggggttcagagagacacaacccttcatccacctgcctgccacctcctccttaccctctgccctgtggttgtagaagttccccactaagtaaggatttctggaaaccctaagacacagcaccccagacagagtctactgggtaacacaactgattgccctttagatgccacaggctgggcatgtgtttggacagttgtgtgtatctgtgaatatgtgtgtccatgtgctgtgagggtatatgtacactggtgtgtgtgtgtgtccgtgtgcctggcatgcatatattggtgtacgtgtgtatttgggatgggtgtgtgaatatgtggatataaaagcatgtctttgcggctccatggtgtgtgtgtgcaggtggatgttgtgtagttgtggcagacgtttacccgtgcatctgatgcagctttgctgatgtgtgtgtacccctcggtgggcatgcgtgggactgtatttgtggtgtgtacagtggatgtggagaactgtgataacctgtaattgtgtatgtgtgggagtgtgctggggggtcttgggtgcgggggttctgctcccccctctcctatcacctgagtgaccttcttccctagctgaggactgtgactgagatcacaggcatgcatgggacagctcctgcccttccacagacctgtggctgcccaggtcttgggccagggtgggcaccaggggccagggtgggtgggtgagcctagggcgaacactcatgtgccaccccctccctgcctggtctcctcccctccccacagcaggagcagcagcgggaaaggttggcggaggggggctattttgggagcgtctccttagcaacagctgccacggccgtctgtggcggtttttctataggtgctaaaatattccaccctggtgactactgagtgctggggggtgggcgagggtggaggtggagggcaggagagacccctacagtcctctgtccccagggcacagcctgctgggatgggttctgggcctctggccccccagtgtccctttaatcacctctggacctcaccccctggaagctcctgggactttagagctccgaggcaggccagctgtgtcctgatctgatttctaatctaagtatctgggctacctcagtttgcctcatctgcagaatgggctggctggaccttttttttttttttttttttttttttttgagatggagtcttgctctgtagcccaggctggagtgcagtggcgcgatctcagctcactgcaacctctgcctcccgggttcaagtgattctcctgccttcgcctcccgagtagcttggattacagatgcgcaccacagtgcctggctaatttttgtatttttagtagagtcgaggtttcaccatgttagccaggctggcctcaaacacctgacctcaagtgatctgcccgcctcggcctcmcaaagtgctgggattacaggcgtgagccaccgcgcccggccctggctgaactttaagacactctctaggacaaaaacctctggcctctgtgactctagcattttgaagtggccttttccgtctcctccccagctgtccacctgcctggcccaagttgccctcccttccactcctctcagccctctacacaggctctcagggcccctgtaggacccaggaggtgtgagcaggaccccacagtaaatcggttagtgagtgctctgctagcctggaatgacctttccccagaaagtggaagttgagcctggttcaaatcctggcccagacagttgcttactgcctgaccccagacaagccacttcccctctctgtgtgtcagttcagagtcctcacctgtgaggtaaagacaggcatagcccgtaccccacggagatcttgtgaggatcaaaggagagaatggagaatggagatggccaggacgttttaccaaagtgtatggtggacagaggttttacaagcattctcctccaaacttcagagcgaacctccttcctccagaccattgttcctggccacaccrgccctgccactcatggcattactgcccgtgcctcagtttccccattggtaacaggtgcctggagaattcttgcaagaatcaaaggagacaatccctgcgaaggtctggatagtgctgagctaggggtacgagtgcaggggaagcaggttgtcctcattccgtctggtgggggggcgcatctgtggtggatcatgacaaagcccacttacccttgggagacctagtccacactgtcccactacagacgaggcctctgaggtccagagaggacacgcatcttgcccagggtcacacaggttctgacacccaagacttttctcaactccctcacactgcccccaggcctctgcatgcccatttccatctctgcccccaacctcacacagggctagaggctactcacacggaaggtgaacaatgtgaagtcttcctttagtctttgattatcctcaaaacagctgctcgaccacgtgcggtggttcacacctgtaatcctagcactttgggaggccaaggaaggtggatcgcttgaactcaagagtttgagactagcctggacaacatgacaaaaccccatctctacaaaaaatacaaaaattagcctggcatggtggcacatgcctgtggtcccagctactcgggaggctgaggtargaggatggcttaagcccaggaggcggaggttgcagtgagctgagattgcgccactgcactccagcctgggcaacagagccagatcctatctaaaaacagcaacaacaacaaacacacacacacacacacacacacacacacacacacacacacacaccccgaagctcaaagtgggtattatagttctcattttacatatgaggaaacaaaggcccagagaggagagttgagctgcccagggtcacacagggctggagaggagagaaagggctctttcctggggcctccgaacctctccctgcctggagctcctctgcttgcctctccctacctcctcccagtccagtctccttgcaggatgaacagcagccccagggtgcggcccaggcccggcaagctaaccctccttgccccagagcccccatcccatcttcaagtttgtgcccagggacttggcatcaggagactgattctgtgacagtagatgctttggatctacagacatctctgtctgcattttcccctccttcctgccccttcctcctctccctgcaccccacactcccaggatggctaccaggtcaggcccgtggccaggcaggtcatttgtctcaccctcatcctcccactttccatccacrgaaaaggtgaaaaagaccaggcacacatctcttgcccacagggcactcaggctgcttgagtctcccctgcatccacgcactgagcattcatgtgatggaacatcagtcctggctgtctgcctgtgaggacacagcagggtaaccagggagaggcgtggaacaggacgtgcgttctggaggtctgcacagtcggagagagccgtgagaaaggatggccacatttattgagcgcctaccatgatctgtgtatttcttgtgcatccacctcacttaatctaccccttgggaatggaggacgttagggtcctcaatttacagacagattaaataaaaacttgttcaaggtcaagtagctcctaggtgcttttgagcctaggttagcctgactcctcatcccactaagcaagaaccatacttgtgccccgcccaggggctggtatgtggtgggtgcctagtgctggttgaatgaatgagtgggtgataaatgacttctgctggggtcatcaggaggccttctcaaggaagtggcactgaggctgggcttggggaacagcaggaattctctgggcaaaaaaggtggaaggatatcttagtgaggaggaacagtgcgtgcaggcagagaggtgtggaggcctgtggcgtgttctggaatctgtggaatcagggtgtacctgtggatttatgggatgtgggatgccggataaggtggggcctgactataccacactgaggagttgggactgaatccttttgagtagggagagcccacgargaagggaaacacttgtggtggtttgtgtgttgctgttcttatgctgacatcctcgaggctcaggagagccagaggggatttcagatttcatcagttctccacctggctttggggtgcctcggtctctccctctctgtaatggggctagtcggtgatggccagactcccagggaagttttgctggctgtctaactgcaggtgttctctcgtcctaccaccctggaaggaggagcactttccctcctgtctcctcggagggctagagtgacgtggcaggatggtcaggatgtagctggctagacaggtgctgtgggtgctgggggttccctgacaccccagagtgtggggcccaggcctgacagcttggggtaatggagagcgacagagaataagagactagggtttggcctggctttgtcatctctgggtgaccttggccgagtttctgaccctctctggtacccagtctcgccatctgtaaaatggggcagtggtgactgagtgatcgygagggtccctccaatagggccccctcagactcccagagtgaggtgcttcgggtccttgaccggcggtactttgggagagtacgaggaccgctaaggagaggggcggactccgtgggaccccagagggaccagctcccacccaccccccttcccggctcggaggaaccctctccacctgcccccttttggggggggggcacaaaacccgggagcggatccaggaacgggttctgggaggagcgctcctggggcgaggaggaaaacccgggcaggatccagggcaggagcggggccagcagccccccgccccagcccctgctccgcgccgcgggccccgcgggagggggcttgaggccgggttaggccgaggggcgggcagggcggggtcccgcgggcagccggggctcccgggctggggggcgcgcggcctccgcagtggggcgcgggtcacgtgtgaggaggggcgaaagtctcgcaaagcggggcggcgtgccgcgagttgggagttctcggcgcgccgcgggcggcgggagctcgggctcccgggcgagccggggacgcggccraggcgggggccggggtccgagacagagggggccgcacggagagtgggagggggagagacagagaaggacaggggccgcgagggagacggacagagacgcgcaggggagagaggcagcgcgggcagagggaggcggggggaggccggcgggcgaccgcgacggagacggagaccccgcgggcagagggcgagcggggccgcaggaggcagggaggccgggagagggaccgggacgcgagcgcggcggagaccccggcggcaggagagagacgcgagagcggtcggggaggtggcgacagagcccggccggcgggggcggggagggcgaccccaggccgggaggccgaggggtcgcggggccggggccgagcgcagcggggccgggagtggagcgcagggccgggggcagagcgcgcgagcaggagcgggtgacagcgarggagctgggcgcagcgggggacggcggcggggagggcgcctgcagcgggggtggggggcgcgggcggcggggcgccccgggcccccggacccccgcgctgtgagcccggccgggcccgacgatgctgacgccgaggcggcgccgagggcgcggcgcggggcagcgctgaaagttgggcggcccgcggggagcggcgcgggacggccgggacgcgcggagaccccaagacccacgcgcagaccgagcggcagccggggaggggagcgcgggccggccggccgagttcgcgggcagggggcgccgggactcccctytccgcgcccgggacgccgcccgccggatcgcgccttgggatgtagcgcccgctcgccgcctcccggactctcgtcggaccctccgcccagcggtaagccgcgctcgcccaccccgggcgctgtccgtcagtttgtcccgccgcgtgcgtgtctgtgtgtcccgggcccgccgctccggccccgcccgctccgcacctgatccggagccgggtcccggctgcccggcgccgcgcgcgcggtcccgtgactccccgggagcgggcgggctccacgggcgggctctgtccgtctgtccgtctgggagcgtcgcggtctgggttgtggcctggaaagggggagagaggtgggtggaaggggtcttgacctcctgccccagccatgacctttccctgcctccacccaccccagttgtcatgccggggagcttcaaggcaggtgacttgtggcaaggtgggggatgccgcctttccgcctccccagctgcatcctcgttgcaaatggccctgtgatctgaagaacgaaatctcacttctcatgttttgagcacctacttggcgccacacgaccccagggcgcaggggcagggattggtagaggaggcactgcacgttcacagtgatagacacaggctggggagggaggcagaggctgctttttcctccgtgtgtagggagcaccccaaggcaagagaggtctcaatgagcctcccgcagggagaacttcccctgcaacctgccaaatgtccccccaccagtgtcagcctccctgccccctacccacatttctgcccccagtgtccctgcttcaggatggacaggatgcagggagttgggaggtggcaagctgggtggggtggagcggcgggctagaggcagggcagcctggccagctgacagagcagggcctcaagagcagtagaatgttcagcagcaggtttgggggaagtggggaactcagggagggaggcccagagaagggttggagccgtgtgtgtgtgtgttctcccccacatccagtcccatgacctccatggcttcaggccttttgggggcagttagcaggactttaggggcccaagagcctcrctgtggccctggcttggcctgtgctgaggggagcaaaaggtggaccagggcagctggggtaagagatgggtgcagcatggtgggaacagagactgttggccactgaactgacccatatcccaactggagttggaagggctgagcctagaacattccactccattctcactgggaggagggactctttctggggtgttccacactgrgcagtgggtctcatatgtcctccattcagcctcccagaaattagctcaggtggctgggagagcagccccctgggctggtcactctcctcccaaccgtcatcttccacrtctgtggcatggggacgtcactccctgccccagtgacctccaaggcgggccctgggctcaatgagcagtgggctgttcacaggctggggaaagcactggggagatgggagtaaagactcactttaccttaagagagatgaacagctagtgggtggaggtgggcgtggggcagtgggaatatggcggaaatagctgacgaaggaggagtgtccaggattagagggggaatctggggtacaattcctcatggccctttggattatccttgaaaagaaagctcttctctcagaaaatcctctggagtggctgtgaccaggcagagctggttgagtttctgctgggtgaccttgggtgggtggcttgacctctctgaacctcagtttcttcaactggagaataggtatgatgatactgacttcatcagggtgttgagcagtttccagactgtgtcaggtctgtgaaagccgcgtgcgccagcctggagcatagtaggttcgtagacatttgcgaaagagagaatgaagtagctctgggagatgctgtgagaagatgtcttagcttaggataagaaggaaggggaggaggaacagtgtaggcttacagggcgggctggttcttaatgtggatctgggggaggcgggggcgagtgctaaggggggtgtgaggaggagggggcccmtctgcggggaccactgagtcacgaggacatgtaagcgacatgacaaccggcaacatggtaaccaggaaactagcggcggtgggaaacagagctggagcagtgtggggtgggggtggcgggtaggcctggcagtgccgggctcaaggggtccggggagaagccaggctggcccctcagagtgaggaggggaggccccagggccaggctagctggggaagagatgggggccctgaggggagggaggggaggcacctcggggctgtagggcagggggctcctcctgcaccaccccaggctcctctctgctcctccacatctccacttttcatgcctctccccctaggatgccaaatttggctcacgcaatctgtcgtctctcttctgagattggcaccgggacgaaagccgagtgcattacatcaccaccgccgccgctccccctgcacgaggagagcagtaggggagggccagagggcygggggcaagtggccagccctcaactttctttcctgtcttcctgctcactcttcccatctcagccctagatgctcgggggcttctgggggcagcggctagaggcaggacgtgggctccagtcttggggagatcccaggaccagggcagaaagtcaggtcatgttgccagccccctgtctgggtggagcctgggggcagggaggcttggttcaggaccctggtctgtcagtgccttgctctgtgaccttgggcagccccttgcctcatgtggagtccacatctgtatagagaacggctggccacttaagatcttggcgatyctcctgaaagaaggtgcccttaagttctgcggctctcctgggcccagaggagggagccctggatttcaaatcaccytctgtgaccttgagcaattggcttcaatgcctcatgcctccatctccccacctgtaaaatggggatgacagaatcctcaaaggcaacagctatgaaagcaggagacaggagtagagataaggcctctgactctgaaaccatagacactcaggggcccgtggatccagcatgctgggcaggggttggacagggtagagtgggagggtgcctggattcagacagaaggtttggagcttaaatcactggtctgatgccttcgttttacaaaagtggaaactgaggcctgagggggaagtagacccatcagggtcacagtgatggtttgtgggcggaggaagcagagccagggccattgttttacaaaagtggaaactgaggcctgagggggaagtggacccatgagggtcacagtgatggtttgggggtggaggaagcagggccagggcctgaatccagggcttctggctcccagctctayctggaagcagacagacagatgtccctgtgtaacactgtggcaagcccagacaggacccaggagctttgagggcccagctctgaattcggccacctcctttctccctcccttctctccagatcccctcaccccactgtccttgggcactaatcccctccctctattggtctctttgaagaactcctttcagtctcattttaaagccagtttcaggcagtcccaggcaaggacaggttggatttggggttaactggaagcttatgctccattctagaaaattcccagagctggaggtggagcaagatagggagcagctgtggttgttttgtgagatagtgggctcctcaatcctagaggtattcaagcagagccagatgagcacctgccaggtgactctcgccttacgggtgaggccgaataacatccccacttccaaaatcctaggagtctttggtgtttcccaaagaggagctgggaagcagtgcccatcgcttccccgcttcccagcgaggaaacacatttgctcgccaggcactgggctaggagcttttgcaaattcccatttaattctccatggcaatgttgatttgatgtccccgtgttatagatggaagggccatggctcagagaatctatgtgatttgtccagggtcacacagtaagacagcagaggagcctgggtgtgagttcagactagtctgattctcgggggctgtctctggggcttccctggggaaagagtggaaaacgttcctcccyggggctggggcttggcaggagatggtctagacgcccccacagcgtgacaccccctcagggatcctctggctcctctgggggctccattctgaagacagataccaccatgcatcttaggggagaactcatttcatagatgggaagactgaggcccagagacaaggaatgacctgcccgaaggtgcccagagagttagattagggccaggctgcctgtctcctggcccagggctctgtcccctgtgccagtgagtgaggaggggcctttgggctgacggtggtggcatgaggtgtgaggtcgggaatgcagagggctgagagagggctggctccaagctagggctgcaggaggaaagttatcggcgcagggagaggggagcagaagggaaatggcacatgtgctacagagcctggtgaggtcagtgggacctggctggcaggagagggtcttggagacaacttccttgggtggctctctgtgtgaccttaggtcagtccctcaccctctccgagtgatgtccacccatccatgtgaacctgggctgaaagatctatttccaccgagtagctgtggttgggctgctgtcgaaaagcgctcctcccaacgatgggaggactgtgggtcctggcaaggggcaggcgggaatcctaggggttggcataacctttaagcctcctctgcggactcagccctccttggggtgtgggggatcgccagtcacagcccttcttctccttttcatctttatttttctcctgttccctcttcccctcgctacgtgggctgatcgctgctcaaacttttaattcagatggtaattgaaataataatatgggctgaggcccctctgcttgtgacgctgcagctggtggagctcggctatgaatagaccttgagtcacacacgcgcgctcctgcaggcgcgcacacgggcgctcacggggtggtgggtggggtgcagcatggggagcaggggtgagctcacgctctggcttgctctggtcttggccccccactcccaaaggtcttgaccaatcctggccccgtggcccaacacggggtccctgtcgtgaacctggaagactttggacatagatgattctyatttacagaaggggaaactgaggctcagcaaggggaagtggctggctggaaacaggctggatttgaatggatgggttttgcctgattctaagaccactgttctctgttgggacacacagggtgggaaaccggtggggaggagtgctggcgtgtggcccctgcccctccctctgcacccgttgccccacctgctcgcagccccctttcagcctgcgcgtgcatgctcaggcacagacacaggcacacacgcatgcgcatgcgtgagggctgctcagatggctggtgccgttgcttggtggctggggtgagagcagtgttctcagggtattgctgcaggagggaagctgagtgccaggctcagcgctgggcttcatattcatgatttcacttaatcctccaccaccctgggagaaccatcacccccacttctcagatgagaatactgaggctcagagagaagcaaggattggttccaggctcctgggtggaaacagccacagatgctttgtcctactgtgcacccagtgccagcccctccaggaccctcattggccacctgaagggaggtgggtacatgtctgccagcctaggcctcccctttccttccatgcaacagctcagccactcctccctgtggctgctggccagtccctgaccagccctggtgccaacagctgggacgtctggccttggcaggcaggggagggtgaggtgccccagagagacattggcaggtcaagaggtccttaggggctaccaggaaagggggtccttggtgttcccgaccccagcaggagctgtggagggagaagtcagcgttgtaatggtgacctgtcagctgggagctttggtctaggcctggggggcccccagcakggcagaggggagctggggcatgggaggtgcasttgggcggaggagctccctgggactgggatggaggagaagcccccaccaagcctggcccagcagctcctgtctgcsgctgcattggccttctctccatttcctctcctgggagatggagaaaccgagtccggagaccaccagggtttgcccaggrtcactcagcaatggtggcagagcctctcaacccggagctgctcctgactcctctgtgtcctgatggctcccagggctgccggcccctcctctctcactgacactccccagagctgtggggtctgtgggaggcgagcagggtctgggtctctttaagctccttctccccagaaaatccccagatcggagcgaggggaagggcagcactccctggtcacagcagtaggaagggtggcctgcgtcaggggcctgggatcgaatcccagctcagcccctcactggctccgcatgaccttgactaggccactgtccatctgggggcctctctttgcccctctgtgtatcgggggccacccatggggatggtggggcgtgctcagccttttcctgttttgcctgtcctgggagaagctcacacaccagcgacccgggctgcagggatgggagggttccttttttttttttttttttttaagacggagtttcgctcttgtcacccaggctggaatgcaatggcacaatctcagctcagtgcaacctctgcctcccgggttcaagcgattctcctgcctcagccttccaagtagctgggactacaggcatgcgccaccrtgcccggctacttttttcttttcttttcttttcttttttttttttttttgagagtctcactgtgtctctcaggctggagtgcagtggtgcaatctcggctcactgcaacctccccctcccagattcaagtgattcttccgcctcagcctcccgagtagctgggactacaggcgtgtgccaccacgtctggctaatttttgtatttttagtagagacgaagtttcaccatgttggtcaggctggtcttgaactcctgaccttgtgatccgcctgcctcagcctcccaaagtgctgggattacaggggtgagccactgcacccggacgggagggttctttagctgggccacagsagagggtgcatgtgctgtggggagctgaccccattttactgatggggagattcaggcctaggggaggggtgtgcccatcttcaagttggtggcagagttggcccctgggacacctcagtgaagcttcccccaaccccctgcagctcctctcccagcccccaccctagactcccccaggagcctcccctctcctcataggcctgagaagcccaggaccctctgccctgtgagtgtgaaggtaccactcagcctgggagacaaatgggatggggtccgcaattaggggctccttggggccatacaggggaggtggtgggcacaggctggagaggccctggctgggggygaaatggagcaggcagaggggctttgggcatccttcaaacctcgtgcccatggatacccttctgcagttatcctgagaaatgggcctcaagtccctcctcactgttcctcacggggagctccccatctccggggaagcccactcgtgtctggaaggttctgctaattgatccctgactccctctttccttcgccctgccctctggggcagagaaacccagcctgctctcagcaagacaggaggagtggcccacctccccctcccctaccccaaggctcctccagcctcagttgtcccaggcgaggcccgtgactgggaaacagaagatctgggttcatgtccagctccaccccttagcagctgcggaatctggggcaggtttttcacctctctgagcctttaccccctgccccgtaagggtgggcgtttgcctctgtttctttttttttttttttgagatggagtctcgctctgttgcccaagctggagagcagtggcgcgatctcagcttactgcaacctccgcctcccagttcaagcaattctctggcctcagcctcccaagtagctaggactacaggtgcgcaccaccatgctcggttaatttttgtatttttagtagagatggggtttcactatgttggccaggctggtctcgaactcctgaccctcatgtgatccatccacctcagcctcccaaagtggtgggattataggtatgagccaccgtgcctggccctttgcatctgtttctgagggtgactgggaagatcctgtgagcctgtgagtgaatgaatgtatcatagctcgttgatatgaactactttgtgacccaaccactcaagggcactgctgggcctgatttccagacccccatcaccagccactgccttggggtaccacttctctggacagctgagcctcccccggccctccctcacccaggcccccagaactgctttggtgggcaaggctggctgagtgccagccccgccatgaggcttcagatcctgagcccacctgaccttggaaagggcctctctctggctgggctccaagrctgcccccaacagacacccggcagtggctgggcagcagagagagagaactgggtggggcagagagaggaccacttgccagagctgtcccggctccctgagacaacaggctagaggacagaggagaatggccagccagccacgggcggggccccacttagcagctacatcagcagcccggcagagcttactcctcacagtcragtgggctgcctgagaagtgggtgagcgccctgtcctgggagatgtgtaagcaactgctgaatggcatctgttatcagggcaggagggggctctattaaaagacccggggaaraaattggaaccagaccccaaagagtccctgttatttgggctgcagagtggcggtcctgtgagctggggggtctaacagacttttcccagtattcccccataacatccaacaattccccacatggttgtgtgtcacaaagcccggagtccaagcaccgcccgtcacagcttcaagacacacgcyggatcccatttcaccgctcctaacccccactcaggccagtgctttaaaattgcacacaggtcctgccccgttagtgggttgggaaattgacttagtgagttgcactacttgttttccgaaaatgaaattaaaaagaaaatttcaaaatactatgcatgtagtgagggtaaatattattttgtgacgctcttacttcagctttaaatatatagccgggtgcagtggctcacgcctgtaatcccagcacgttgggaggccgaggcgggaggatggcaagaacccaggaggttgcaattgagctgtgatcgcatcactgcactccagcctgggcattggagcaagactctgtctctaaaaaataaatataaagtaagttaaaataacaaacaggatgtttgcttttactacggattttggtcaaaaaacttgaaagctactgtcctgtgtagaaatccaggaggcgccctgatagaggttctgatgctcaggttccgatttccctggatgtttggttcctaaagayataggtgccacaacttccaggatgctgctgtcctgccctcagaagtagccgcctgtcccttgctcagtggaccacccaggtccaggcacccatgctcctccagagccaccacctctccccagggcctagatcccaggccgggccaaattccctgctttccgctcagcccaggcccagccctgctctgtccttgtgccctcctgcttgccctcatcttcctaggaccttctctttatgccctttcacacacacacacgcacacacacgcatgcacgcacacatgcgtgcacggagctcagcaaagccggtttgtgacttacctgcttcccttcagcatacagtaggtgctcaataaatgttcactcaattatttacagaccgccctccaaggcaaggcactgcgctgtgttgagacacatctggcacctggcaggaaggcagatgctgttccagctcaggggacatttagggtgatgaatgaatggatggatggatgggggtcggctggagttggagattctctggcctgaggagccagtgggaaggtggtcagcagtaaagaggggcatgcagcccgtggccccccccatggcaggcgttctgtcagtgacagtcccttggggctgtggcccagcattgagtcatgggcaggggctgactgttcctcctgctgtctctggtccttctgaggcctgtctcccatgccctctcccactaggtcctgtacacatgtccctgccacccatccctgggtgaggccaggacatcctcccccgagcccctgacacctgggggacacctgggaagagaagcccatgctccgtggagggtgaggcagaggcatgagccctctgacatcctgtcctctgtcccctctgctcatggccattgtgctcatgtacagtgacacagagggtctcctggtcactgctcagaggccacctccgctgggaagttctccctgactaccgtgtcaaaaatagcttctccttggtcacaatgtgtcacatgacccagttagaccctttccgggaattttgacgggctgggttatcttgtttgtcagtcgttagatatttatgaagcagctactctatgccaggctctgggagtcrgggtgaagtagggaggcaaggttcctgcctgtaatgatgttgcagatgagactggtttgactgctaagggctgccaggaagatctgagagctggatgggagggagggyctcggggcctcttggaacaggcagcctttgaatcaagacctgaatggtaggaaggcacaagcggtggagtcttggagaagagaatttcaaccagaaagaacagccagtgcaaaggcccagagacaggaataaacttggtgcgttaaagggacgggaaggaaggtctcttcccgtggttggagagtggagggggtgcagtcagagagggcaggacctctctgaggcggggcgttcatcccgagtgccctggggagacgagagctctgagcagggagtgatgtggagatggactgcgggaggtgggtggaggctgtgggaggaggtggtgggcagagactgtgggctgcaatagtgatgtggctctttggggtggatgactaggtgaggggacgtgtccggggccccgaggttcacccgctttgggcaagctcccaagcccactgtgggatgatgatgacagcacctgccttgcaggtgtggaccagtcagtgcatggccctcagtgaacactaagtgcatgttagttattaacccattgttattgcggttgggcttagggagggctggaggatgatgcctaggtgtcaggcctgagcgacctcctgggaggagtcacagactgagatggggaaggcaggagaggggaggacgrgggcatggcttgggcttggcagtgccgggttcgcgatgcctcttcactgtccagcagacacagggagcaggagccaagtgggcttgtagctgcctgggagggaggcgcaggctaggtggtattttaagccacaggactggatgagatcacaggactggggagaagagaagggaggtgggatggcggagctgggcactgcacggtgtgggtcatggagaggccagaggcaggagagcaaggggcgacctggagagggaccctcaggcctggaggactcaaggaggaaaacgagggccagtccagagcctccatcagagctgctgagagggaagggggcacagaggagctctggagggggctgaggggagactaggaggtgaggaagagtggagagtaagtcatgcccttcaagaagggctgcaggccgggcacggtggctcatgccaacactgtgagaggctgagrcaggaggatcacttgagcccaggagtttaagatcagcctgggtaacatagggaggccctgtctctacaaaaaattaaaaaataagccagggatggcagcacacacctcaagtcccagctattcgagaggctggggtgggaggatcgcttgagcctgggaagtcaaggctacagtgagctgtgatagtgccactgcactccagcctgggtgacagcgagaccctgcctcaaaaaataaaaaaagaaagaaaggcttctgcactttatagtttacaaacccctgcccacactgttcgccttggcagcatgcctgttcactgggtgttattccttcccattttacagatgtgactcagagaggttaagaaattttcccaaagccacgcagcccataggtgaagtgttctcagactttcggggtgacagtcctttttttttttttttttttttgatggagtcttgctctgtcacccaggctggagtgcagtggtgcaatctcagctcactgcaagctccgtctaccgggttcacaccattctccttcctcagcctcccgagtagctgggactacaggtgcccgccaccacgcctggctaattttttgaattttaatagagatggggtttcaccatgttagccaggatggtctcgatctcctgacctcgtgatccgcccgcctcggcctcccaaagtgctgggattacaggcgtgagccaccgcgcccggccacacaaccttatgaatgccttctctggaaaatatgcatgtgtacacattaattttaaaacttttcatgtgcattttcccacaggtaatacattcatacggttctaaaatttaaaaagacacaaacgggaatacagtgacagttcttcctcccaccctgtccccagccacctgctttccctccccggagcagccaatgtcaccagcttcctgggtctccatccacagacaagcagagacaagcaaatatgtgtatctataaatttcttctctctccttttttacacaaatggtagctactatactcacygctcatcactgttgccttcttttgcttaaaaatacatcttgaagacctacattgctcctcacagagctctctcctggctttttctgtctgtgtgctgtgccattcgtggatgggcatttgggccgcttccaggcggtgctgctgaaggcaaggctgctcattccccacgtgtgagtctcaggctggagtcccaggagggcccaggaggcgtcacaggcgataccacccagtggcctccactggataagtgagggagtggggctcgaactcagccctgactgttctcactcctccctgctcccacgccacttctttagggggcacctgctggggccagccgagcatcccagagaaatcctgtgtgtgagtgagaggggcacattagcccccatccccctaggttctgggagacaccccccaccagccggcagccccaactcctggagtcttgtttgctgacagctaaggatgaggcaatgggatggggcagcagcaaacaccacctcacccccacccccagccccacccaygctggagtgcggggatgagggtcagrtgatgatcagacatgggctgttaccatgtcacctctgctgcaacttccctgacccccgcccagcagaactcctggctcttccccagcacctccctttctgcccagcccatgaggagatttccccctttctggctggggagggagggaagccaagtggaggagggacttgtggctaccatggtcagtcctcaggtgctccaggctgggcagggcctaccgggcaactctgctgagagctccctctcctgtctgtgagctggcctccctcccctactcctcctgctctctggccggtcctcctcatctgctctgcagcttctctcccatctgtggggctgctggggccgggtctaagaccccctctccttttccatgcccttggcccagccagtctcgcccaccctcacaactcaacctgtcaccagcgttcaccatctcatgcacccagctctgcccactctccctctggaggctcgggatctgacgtcaggtagacatctgcatttggatgttcaaagccactgcacactagaaaccgtcgctcccgaaacctggccccgtttcagtcttccaccactacaggccactctcgacaacccccttccaccctcaaaccctgcggactcttcacccagaatgcatgtgtcccaaatccatctccttttgagctccatggccaccatcctggtagctccaagctaccatcatggtcttctccccagccgaatatacctcatcacagcgactggcactgcactctggacagtgcagacttcaaaggctagctgaggcaagggccagggtgccactgggattatactgggaatgtttatcttttatttttatttattattatcttttgagacagcgtctcattctgttgtccaggctggagtgcagtggcaagatcttggctcactgcaacctctgcctcctgggttcaagcgattctcctgccttagcctcccgagtagttgggattacaggcatgcaccaccatgcctggctaatttttgcattttcaatagagacggtgttttaccatgttgaccaggctagtctcaaactcctgacctcaggtgatttgcccacgtcagcctctcaaagtgctgggattacaggcgtgagccaccatgcccagcctactttttatgttttagggaaagagtttcactatgttgccgaggctgatctgaaactcctgggctcaggcaatccacccgcctcagcctcccaaagtgttggaattacaggcatgagccaatacacctggctaggaatgttgtatttcttttttttttttttgagacgaagtctcrctctgtcacccaggctggagtgcagtgtgcagtggcgcgatctcagctcactgcaagctccgtctcccaggttcacgccattctcctgcctcagcctcccgagtagctgggactgcaggtgcccgccaccatgcccggctaattttttgtactttttagtagagacggggtttcaccgtgttagccaagatggtctcaatctcctgacctcgtgatctgcctgccttggcctcccaaagtgctgggattacaggcgtgagccaatacacctggctaggaatgttgtatttcttttttttttttttttttgagatggagtctcgctctgtcgcccaggctggagtgcagtggcgcaatctcggctcactgcaagctccgtctcctgggttcatgccattctcctgcctcagcctcccgagtagctgggactacaggtgtccaccaccacacccggctaatttttgtatttttagtagagacggggtttcaccgtgttcgccaggatggactcaatctcctgacctcgtgatctgcctgccttggcctcccaaagtgccgggattacaggcgtgaaccaccatgcccggccggaatgttgtatttcttaagcctggtggtagatgcacaaggctttattttattttatttatttgagacggagtctcactctgttgcccaggctagagtgcaatggtgtgaccttggctgactgtaccctccgcctcccgggtttaagtgattctcttgcctcagcctcctgaggagctgagattacagatgcccaccaccatgcccggctagtttttgtatttttagtagagatagagtttcaccatgttggccaggctggtcttgatctcctgacctcgtgatccatccgccttggcctcccaaagtgctgggattgcacctcacaggtccaagccatcctcccacctcagcctcctgagtagctgggactataggcatgcaccaccacactcagctaacttaaattttttgtagagatggggttttaccatgttgcccagcatggtcttggattcacggcctcacgtgatccttctgcctctgcctcccaamgtgctgggactatgggtgtgagccaccatgtctggcctaagggctttattgtattagtccttattcctatttgtcttaaatatttcacatggaaattaaaaccagaccaggcaaagcctgacagcccgccagccctgagggggacatccgcagcccttgccatctsccgcctctgtggcctcatcctggtccactcactcccaggctcacttcacagccacaacctggccttcctgcagcttctcaacaccagactcagacttttggagtattctttctttctttctttctttttttctttttttttttcagaaggactcttgctctgttgccaggctggagtgcagtggcgcgatctcagctcattgcaacctccacctcccggattcaagcgattctcatgcctcagcctcccgggtagctgggagtacaggcgcctgccaccacgcccggctaactttttgtatttttagtagagacagggtttcaccgtgttagccaggatggtctctatctcctgacttcatgatccacccacctccgcctcccaaagtgctagaattacaggcgtgagccatcgcaccaggccctttttctttctttttttgagacagagtcttgctctgtcacccaggctggagtgcagtggcacgacctcaacctctgcctcccaggttcaagcaattctcctgcctcagcctcccaagtagctgggattacagccaccacacctggctttttttttttttttttttttgagacagagtatcgctctgtcgcccaggctggaatgcaatggcatgatctcggctcactgcaacctcccccctcccaggttcaagcaattctcctgcctcagcctccctagtagctgggactacaggcgcctgccaccacacctggctaatttttgtatttttagtagagacagggtttcaccaagttggctgggctggtctcaaactcctgacctcaggtgatccacccacctcgacctcccaaagtgctgggaatacaggcgtgagccaccatgcctggcctaatttttgtagttttagtagagacagggtttcaccatgttggccaggctggtctggaactcctgacctcaagttatctgcccacttcggcctcccaaagtgctaggattacaggcatgagccactgcgcccgacctcctggagtattctacaccccacttccacaaagatatacagttctccggacagactcccacttactacccaagtcttggctctgccattttctcacagaggcctttggagatgcccatcaaaccagaggcccgccctctgactcaccccatgttgtacttttccttcaaactgcttaacgccacacacatccggccgcctgtgatggcaaatgcctaccatccagagtgtstctctccagctcttgcataagctggccgagtccaaggcctgtgtctggcccacagctagcgtgcagtccatagtaactgagtggaagccccagccaggcagtggggtgttgaagccccacctgccgccactgagggagctgcggttgttctggaaaagagaagcttcagggatccactggccttcacagccctgtggggaagatgggcacaggtatttgtggagggtgggaagctctcgagggagggcagaggactggcgtcagcaattcagcaaagggcacacctgtgggttgaaacaggtggcctctgggtcctccagcccccagcrcctgtgatttggccctcaccaaaggcccctctggacattttggggagcttgcttgtcagcctgctcccccgccccacattcgctggccaagtggttgggagggcccggtggggtgcagagtaggaggaatgagccggttcaccccttgctgctccaagcccctgtggagcccaaagcttggtctccagcgtttggctggacctgaaatcaggaacctgggtcctggctccaacttgccctgtgatccagtttctccatccccataggactgacttcacagaacctggcacgtagtaggactggatgtgtaccaggtggaagcaagcgtgtgacagtatttcttcgaggcaggacagtagcatgccttgttagcgtgctttgatgcccattgcccaggcccacatcctggctttaccacttacaaactgtgtgaccttgggcaagttgctgaacctctctgtgccttggttttcttctaaaacaggggtaatgataatttcctctgagatcattgtgagaatgataggaatcgatcagggtaaagtactgagtaaatgcgtgctcaatgctcagatgctcagcctgaatttttgcgatgtcagagggctgcctggtgagggaggggctaggtgtaccacaggatttcgtggtccagaagaaggtggggagggggacagctttcttgagcccccaccatgtggcatgcgcttttgggacaatccacatcaggccctgcaggtaggcactgcgatgytcctttcaccattggagataccgaggctcagagaatccagtgacctgctagagccaagtgggactcggcttggttccagcccagctctgtgtggaacagcaccgaggctgctcttcttgcccaccagctccctagtgcagtgaatgaagacaaactgggcagggccctgtggatggggcccaggcaggctctgggatgctgcatctgaaattgaggggaggaaatcaagagggagcaatgttcagccttgagtaaaatgcaccttatcgatcacttactctgggctgggcacgtggtgtgcatgatcccatttgtcctcattacagtcctaggaagtctgctctattattagcttctcctaaagatggggcatgcagggactagagaggttaagttcctygcataaggtcacatgrgcacaaagttgtttagaggctccagagctgaagmtgctgcaccaggcggggggttcctgagactcatgaagaggagggagtcaggcctcccagggacaggggactgcagggcctgcagagggcagtggcaggtggggaccctgccacagtttcccctgtggctcagtctgtctttggctccccttactctttgaggggtacagctcaaagagccgtgggcctgggstcttgagttctcttcctccctgcaaagttccacttgttggagtggaaagcccctccartcaaaccagacctgagggcctcagctggagtggggacagactctgtgctccacaagggctgggaaatgggacagtggtgttaattctgtctatttctttttttttttttttcccgagacagagtctcgctctgttgcccagactggagtgyagtggcacgatcttggctcactgcagcccctgcctcctgggttcaagcgattctccttcctcggcctcccaggtagctaggattacaggcacttgccaccacgcctggctaatttttgtattttcagtagagacagggtttcaccatgttggccaggctggtctcgaactcctgacatcaggtgatccacctgcctcggcctcccaaagtgctaagattacaggtgtgagccaccgtgcccrgcaaattctgtctatttcttccaggaaaatcctctacccttcagaacccatcctgggtgcgctgagctatgccctgggctgcgtcccctgacctccactgccctgtgctggctccctctggtaggacatttgctggagagtcagcctccccatctaggcccaggagggctcagggatggctggggctaaggagactcaggagcgccccccatctktcacctgactccaagctctgtctgggtgcctcgttttgtacattttcccacctctcctgccagggagccatgatggtctccccatcttgcagacagagggaaggaacttctgaccagagcatgttagtggtggagtcaggagtggaaggggttccccagctcccagtccagcattcttggtcatcagcttctgcatctttgtcatcaccattatcaacatcagtttttgcactttacctgcaatgtaataacgcatggtggttgtcatgttcattcagcagcggcctggtgaggaaggtaccagtatcgtcatctccagtttgcagatgagaaaactgaggttcaaagaggatatgctgggaggtgacagagctgagactgagagccaggtcttgccacccaaaacatatgggtttaaccagcacattttctcatattgaacagaggccatgtgctgcagatagacagtgaggcctgagggctcagagtagcagggtcagagagcctcaggggctcagggtaggtctggagggatggggagagcctgggggtcccaggttgagcagggtgatgtggcaggagaaggggtcccgaagccagaggctggggaccagggtgagccaaggacctggagctagtcagactcaagttagatttccagctcaagctcagcatcacccctcaaccccccggcatctctgtagcctgcaattcttcagctggggaggagaaataacaacccttcttgttactgtggtaggtgcttaatacatacttgttaaatacacaaaggatacagtgatgcttcaatgagagagaggaggcagcgcctggcatggagttggcagaaattccctgagaggggctggagagagaggatgactggttcctcggatccccaaggctgagctctgtgacctcaggccagtcacatcacctccctggttgtctcacccaataatagtcacctcgaagtctggtggtgggatgacatgagatgcatgacaacctggcaggctggcactggccactgctctctaggcgtgagcttcctgctcctgtctaaaggagcagagtttcaggcagggctggagctgctgcctggctctggcagggcctggcggaggtgcccctgcagwggccatggtgtctctggtcagtggcacggatctcggggaggagatttgccctcgaagccttccaggtagctgggacctgccgaggctgctgcaagctgatcagcttttcttttgcaaagggagttgtgggcaaggacagataagttagtgtcctaaaattgtcgggaaaacctaaaagttgacagggttggggtggtcttcctgcctcctctggacccccaggaggcagagtctccagcccctccctaattcctcaggatggggcaggatggctggtgtcagtggtgaggsctgagcttccttccacagctgttgacttactgtgccacctcggacacggtgccatgccctgttcttggcctcggtttccccagctggctaatgaagtctggactaaagacttgcagattttggatgtttacagcacagtaaaattaagagaaagccggatgcagtggctcgtgcctgtgatcccagcattttgggagaccgaggcaggaggatagcttgagaccaggagtttgagaccagcctaggaaacatagtaagaccccatctctataaaaaatagtaataatcaatttttgtgtttatttttatttatttattttttgagacggagtttcactcttgttgcccaggctggagtgcaatgacacgatctcggctcactgcaacctccgcctcccaggttcaagtgattctcctgcctcagcctcccgagtagctggggttacaggcacacaccaccacacctggctagttttgtatttttagtagaaacagttttctccatgttggtcaggctggtctcaaactcctgacctcaggtcatccgcccgccttggcctcccaaagtgctgggattacaggcgtgagccaccgcacccggccaataataaatttttaaaaattaaaagaaaagtctggtaactggtgtagcrttgtcacttcttcattttgccaagaaaagacattaacatttaaaaagcagtcagcatctcctatgtccatcactttctaaaaaaatgtttgccactgaaagagtcccaggatataaaggacagcagtaccattgatcttttttttgagatggagtcttgctctgttgcccaggctggagtgcagtggtgtgatctcggctgactgcaacctctgcctgctgggttcaagcgattctcatgcctcagcctcccgagaagctgggattacaggcgtgcaccatcatgcccggctaatttttttgtattttttgtagagatggggttttgccatgttgctcaggctggtcttgaactcctggcctcaagagatccgcctgcctctgcctcccaaagttctggggttacaggcgtgagccaccgcgcccggcccattgatccttcttaggctcattttgccatgggctagtggcctgcactgggggttttggaaacctcaggccccatttcaccaatccctctggttctatgtcaagctctgtgaccttcaaaaaagttggggaggatgagtagtcccttaattggaggaggacctgatgccagggagaggaagaacttgttcaaggtcacataccagggctgtgacagagggcctctccacctcccagggcctccatcgcagaaaacaagcctcaaactgcattcttctagtgcacattccatgcaagcaaattaggccctgcatccctgcatccacaaaagtggtttaatcatagggataaagcagacacctaaacaaccaggggtcttttttattttattttattttattttatttatttatttatttatttatttatttattttgagatggagtctctctgtgtcacccagtctagagtgcggtcactcaatcttggctcactgcaacctcygcctcccaggttcaagcaatccttctgcctcagcctccctagtagctgggattacaggcgcccgccaccatgcccagctaatttttttgaatttttagtagagacaggctttcaccaagttggccaggctggtcttgaactcctgaccttgtgatccgcccgcttcagcctccaaaagtgttgggattacaggcgtgagtcacctagcccagcagggccctttaaaaaaaaaaaaacatctctagtcagaggaggatggtactgaattgtcaaggccttttgaccctctcctgccatcgtcagccttccctgggaagccccatgtgacaaggaagagaaaatctggccatctcctggtggttgtcacatgagaacacaatgccaagctcatacccttcactttttggccaggccttgcacgggtcagcctcgaattagcagctgaacctctctctcctgctaaaatggtctgtggtggcagcagcgtgctcttatttgagcaagtcactgcagaccaagggttttcagggggatgggatgtcacagaggctgctccatggggaagggtggaggtctgagaagtgccagggaagcagctttcctgctaagctccaggatgtgctgggggcactgggaacccaagacagggcccagcacatagcaagggctcaggacacctgctgtgggctgtcggggaggcaccggggtgaggggtaaaccatgtccccatcgggctgcactgtggaggccagtgggctggtgggcctggggagtgagtgttgccgctggggctgaggattgtggaagctcagaattgaccctgggcactcgataatggggaggagtgggcactgctggcgaggggatgcccaatctctgtagccatcaggggatcggctcccttacccccaaggcccctccagaggtggggaagtccaggaagagatctcgtctgcagcaccaggtgaactcgccatgtcaggaggcaatcccaccgggcagagaaccagggatcccctggaaccctgggcttgtgtttggccttgggcagggccccccaccttctctggagctcagtgacctcacccgttgaaggcctgggccgccayaccctgtcccctctgcctctatcctgcacacctgtggatggtggtccagtttggactggctggtttcttctcttcccttgccccaaaacccactccagccccctgcagggaggaagtggatgaggagctctggggtgggggtgaggccttgttcagggctggcccacctggctccactctgggactcttagcaagtccttcctatctctggatgtccttggtctccgatataaaatgagggtcctgaactcggtgaccctatgctcctcctgtcctgacagtccrcggtgcccctggagccatttcaggcagtgggacagaacagggggaatacatttagcaaagaaaggcctccctgaaaactctatttacagagcagaaggtgtgcctggccccagaaccccaagcctttctcctggagccctggctgctgggatgctgcgggagggggcaaagagggtctgggcctcccagctctgaagggccagcattacgttagaggccgtgcctgcatgacctgtcgggtctccagcatgatatctcattggcccaattttctcattttctttttttttcgagacgaagtctcactttgttgcccaggctggagtgcagtggcacgatctcggctcactgcaacctctgcctcccaggttcaagcgatcctcctgcctcagccccccagtagytgggattacaggcacacgccaccatgcccggcctaatttttgtattttcagtagagacggggtttcttcatgttggtcaggctggtctcaaactcccaacctcaggtgatccacccgcctcggcctcccaaagtgctgggattacaggcgtgagccaccgcacccagtcagccccattttcaagatgaggaaactgaggttcagagtagtcaacagctcgcccaagtcacacagtggatctaggacttcaacccaggactgtaggagccagggagctctttgagaaccaggggaatagggagaagaactcggagtcagggtgggtgaccgcgggggaggaggtgggggcagggctcactctccctgggcccggagagggagtttctcttgggaagaggcaggctctgaggctgttgatctctaaattatagcgttggcgcgtaccggttgctgcggcaaccgagttgtcctgaaccggggaagtgtataaacattgccacagatgcacaattagatcaggaagaagaatagaacagaaaatagaaacttccagccttatgtaattctgggccaaaatgttattgggaacccaggcccagtcctggccctgccagctgctggggcctggggcagcagcatgtcttccctggggacgcaatggcagagaggggtggagagaaggtctgtcctctacgggcccgaggcgcatcccgccacccagtggggtgaggggcctcttctgctgcaacagctggggatgcttgacaggcaaatcctgcctgtcaccagctcctgggaagtgtgggaaggaaggcaggagggtgatggctttaccccagcacctgctgtccccgtaggtcccatgaggtagggagttttggtgcccatgttacatgaagacatggaggctctgagaggtgaactgaattgcccgaggtgtgtcctcccctcccactccctgtctccccgccatcaactcattcatgttggtgccacgcaagtttgtatccactgccagctttgtggctggcaggtggctttccatctctgagccacctgggacatgggaatagcgatgtctacagaggagtcagagctgggggctcccccttcctccaccctgactgtcacattggattctcccctcaccactgctcctaacaagtgtgggcactgggcaggaatttgggctcaaggactcaaagcaacactgggagagaagagtytaaraaaggagctcagacccaggtggggctgcgggtcccagtagaactttttctttctttytttttttttttttttttgacatggggtcttgctctgtgacccaggttggagttcagtggcatgatcacagctcactgcagccttgaccccctgggctcaatagatcctcctgccttagcctcctgagtagctggtaccagaggcatgcaccaccatgcctggctaattttcttattttttgtagagatggggtctcactctgttgcccaggctggtctcaaactcctggcacaaacaatctttgcatctcggcctcctaaaatgctgagatcacaggcrtgagcccctgtgcccagccagaaatttctcagtgatagaactctcctgtgtcttctctgtccagtgtggtggccgttgaccacatgtggctcctgatcacttgaaatgtggctcatgcaaggaaggagctgcagttaatattttatttcgttttaattaaatgtaaagagccacacgtggccagtggctagtgyacaggaggatgtccagccccygagaagcccaaaagtgcagagatggaatccagggagggaagcgggcttagcgcctccgtggctccctatgctcagggcaagcaggacagagggacagggaggaaccaagatgggcatcaggaagcttccagaacagtgagcataggagggccggaggggcagtgttgaggggcagggactaggacctggatccttgtggctttagcttcctggtctatggaccccagtctctaagctgggccggactgggtggcactggctcagaccctgtcatcagagccacctctgctgccaccctccgcctgccrgggcagaggaagtcttaggtcctggtccaggctcacctgcttctgagagtcttggggctgagtctgagtggccccgagggagcccctcgctccccagcatctcacctgtccggcttctcctccgcaggccctgcgtcttcccaggtgaccacgccggcttcaggacatgcacggacacagccgcaacggccaggcccacgtgccccggcggaagcgccgcaaccgcttcgtcaagaagaacggccaatgcaacgtgtacttcgccaacctgagcaacaagtcgcagcgctacatggcggacatcttcaccacctgcgtggacacgcgctggcgctacatgctcatgatcttctccgcggccttccttgtctcctggctctttttcggcctcctcttctggtgtatcgcyttcttccacggtgacctggaggccagcccaggggtgcctgcggcggggggcccggcggcgggtggtggcggagcagccccggtggcccccaagccctgcatcatgcacgtgaacggcttcctgggtgccttcctgttctcggtggagacgcagacgaccatcggctatgggttccggtgcgtgacagaggagtgcccgctggcagtcatcgctgtggtggtccagtccatcgtgggctgcgtcatcgactccttcatgattggcaccatcatggccaagatggcgcggcccaagaagcgggcgcagacgttgctgttcagccaccacgcggtcatttcggtgcgcgacggcaagctctgcctcatgtggcgcgtgggcaacctgcgcaagagccacattgtggaggcccacgtgcgggcccagctcatcaagccctacatgacccaggagggcgagtacctgcccctggaccagcgggacctcaacgtgggctatgacatcggcctggaccgcatcttcctggtgtcgcccatcatcattgtccacgagatcgacgaggacagcccgctttatggcatgggcaaggaggagctggagtcggaggactttgagatcgtggtcatcctggagggcatggtggaggccacggccatgaccacccaggcccgcagctcctacctggccagcgagatcctgtggggccaccgctttgagcctgtggtcttcgaggagaagagccactacaaggtggactactcrcgttttcacaagacctacgaggtggccggcacgccctgctgctcggcccgggagctgcaggagagtaagatcaccgtgctgcccgccccaccgccccctcccagtgccttctgctacgagaacgagctggcccttatgagccaggaggaagaggagatggaggaggaggcagctgcggcggccgcggtggccgcaggcctgggcctggaggcgggttccaaggaggaggcrggcatcatccggatgctggagttcggcagccacctggacctggagcgcatgcaggcttccctcccgctggacaacatctcctaccgcagggagtctgccatctgacctccaggcccggccctcaccactgcccacaagagcctctgccgggggtgggatgccaggacaccccctcccacactcaggacagagccaaccctggctccrtggaccttctggaggaaggtgggggtttcaaagactgggggaccccttcctcctgactccagcacccaggcctgggaagagctcggccccgatcagcctgagttccgccagcgcctacttctggtggctctaggtccccggatccaccacccttcccccactgactcttcaaggayrtgccctctttgctctcagaaccttggggaaggtggctggactgctgggcgggggacatctcggggtttcagggtgggcagggggttagtttggggagggggggtgcgtttcttttgcatgactgtggcctgttgctcatgactttcttttgtaaatatctataaatggagacagatggagacaccaaattcactttctgccgtttttacctgctggacaaggagatgcagtccctctctgtgcacccctccccacccagcccatcaagcctagcgccttcccctgcccagctggctggccccttgaggccctcaacgccagccaccttggcccttggatggtgttgggtttgggtgcagaggagggactctgaggggtgggatgagggaccatccctccctccctgcagtccctccagccccgggcccagcccagattgacaacagagtttgtaaccatatatatatatatattatatatttttttttttaattattatttttttttcttgagacggagttttgctcttgttgcccatgctggagtgcaatggagcaatctcggctcactgcaacctccgcttcccaggttcgagcgattctcctgcctcagcctcctgagtagctgagattacaggcatgagccaccatactcagctaagttttgtatttttagtaaagatggggtttcaccatgttggccaggctggtctcgaactcctgacctcaggtgatccacccaccttggcctcccaaagtgctgggattacaagtgtgagtcaccgcacccagccgtaactatatatttttaataaagtacatggtccattaggggtaggctggttgaagatggaggggtgagaaggagagaaagagagtgagcaagcacacatgtaattgtgcctgtgtgtgtcgtgtgtgtgcccgtgtgtcatgtgtgtgcctgtgtgttatgtgtgtgcctgtgtatgtggccctttctgagtgactgacccttggagggaactttatcacctgccattctccttccggcgagtcaatagaaggatctggagttggcatcaaagaaccaaaagctttgatgtcagagctttgttacctagtagctgtgtgactgtcagctcttggcctcagtttcatcctctgcagaatgggattaaccatccctcccgcctgcaatgatgggcaggacagccctgtgtggacgtcagccaacccttcctaactcaggtggaagtgggaagggcccacccgatccgcacctccctacatacatgcagatccacacaccgctggtagagctggcggcaggacactgatgggaagggcacaggggccaggaaacctggtcacagacttaaccaagacaggcttggtctctgctctctgtgggacctcgggtaagtcccttcccttctctgccttcggttagcctatgctctataaccagccagcacaaaacagagaccaatgacgcatcctctcttagggtcctgtgggtgggctggggttcctagctgatttctcctgggcttacccggcagctgtgctcagctggaacatcagtgggcctggaaaacccccgatgagcccatgtacatgtcggcagctggtatggctttctggggtggtggtggggtttggttctcctccaataggctgcatcacattccttcatggcgactccgggcagcaacctacgagggcaaaggtagaagctgcaaggtctccggaggcctagccccttgaacttggataacatcatttccactgcagtctatcggccagagtccaggtcacgaggccagcccagattcaaagggtgggaaattagtttccaccttttgggaaagaggcaaagtcacattgccaaggacatgccgagcaggagggagctgtggccatagttggtcatctatcccagagccttggagtttgagggttcctcccacccgacttctactctacaggctgactgtgtgccccaggctgaaaggaagcagaaggcacccttctgggtcccagggatcttccacacaaaggtgccagctgcctctagaaacagggaaccagcaggcaagcttacctgctgtgcagcacagcgagctgccttgtgaatgaccacgtctcaccagccccggcagcatagctgccgtttgggtggatcactgtgcaccccgtatgctgcgctgctgcagaaggaaacttgaggcctctttcctggagacagagccaagctcaggatccaagcctcccaatagataactcataatgtctctcatttgcataacacctttcacgtccttgggttcattgaactcttacgaaactccaagaggaagccaggacaaggattatggcctccttttactgatgaggaaataaatagaggcccagagaaccagggggctggctggaaacaaagtgaggacagtcagaggcccgggagcctgcttctccttcactccatcctctcccaggtgggggctcaatgagggggaggggctgcttcctttcctcctctgtgccctcccagatttcccagagtgcacctgtggcctttggcccccacccccaccgaagagcctgtgggggccgctcagcaagaaggaaattcagtggcgcatctgcccacattctggaaggacccctggtccccttctgtcaggtgagtaccccagggtctcaatcctgaccctggaggctcatgagagatgtccctctatccagccctgcaggccctgggtgggtctcgccaggtctccccactcctcccaccacatccccaggatgccacggcttcctgggctacgagcagtaactgaagaggattcaggctcaggtgctcccagactcagaagcctccacctagagcacgtcttaggggatgtctaccctcctctaagatgtgcgagaggcccggatgcagggtggggaaggggtacatgtggggttacccccaagagggcccatcatccaccatccagagcaacatggggcgttccaaggtccccccaggcccttcaccagcttgcagcttgctcatatgcttgtggtagttgctcttttgggagaggcctggtctctctggtcacatgcaaggtgacctgtggcagggtcacacagaagaggcaagtgaaagcccaaagccaggacttctggagtgccaaagggcagtgccagtgtgggcactgggggagggggccacgcggtgccgagagcccgcagctgcagggaggctcccaggcctggctgcgctgcaaactcctgctggctcagctctgctcggggctgactcaccttccctctcccacctgttcccctttcacagccctcccacctgcctccctcctcgtgccgctcctctgatccctcactccactccggctcctgcggcgctgacggagcggggtggggggagttgctgcgtctgggggtgtaagaaccttagatgtcacggagcttggaattgtgccaacgggcaggctgaaggggccttaaagtgctgccaagccctcctcatgccacaccagcttccctgcagagccagggtaaggagaccccctctgccctgccctgccctctcttccccacttcggtcacagcctcttggggagcaggagtggtgggcaggatggagagaatgaagagggtatcatgcatgtggaagaaaaggaggaagacagggagggaggaagaggaagaaagggaggaagacaaggaaggaggaagaggaagaaagggaggaagacagggaggggggaagagggcggatctaatgggagcaaaaaaccccgccctcatctggccacacctgcctgcctgcctggaattccaccgttcaggcctaatccttgtagattcaccatggcttccttcccaccagcttctggaagatttatcttccttatgaactcaaatagctcacagaagaatagaaaagaacttaggaggcatccgactcagctatttcacctcattgcgttcacccctgtctttgttagagcccatggctgcgatcagatgactgcttcctgcgtctagcttttctcattgcagttttttccaggtattgacttttctgggtattgatggattctacatcttttcaattttttttttttttttttgagatggagtctcgctgtgttgcccaggctggagtgcaatggcgcaatctcggctcaccacaacctctgccttctgggttcaagagattctcctggccaggcgtggtggctcacacctgtaatcccagcactttgggaggccaaggtgggcagatcacctgaggttgggagttcgagaccagcctgaccaacatggagaaaccctgtctctactaaaaatacaaaattagccaggcatggtggcacatgcctgtaatcccagctacttgggaggctgaggcaggagaatcgcttgaacccgggggggcagaggttgaagtgagccgagatcatgccattgtactccagcctgggcaacaagagtgaaacaccatctcaaaaaaaaaaaaaaaaaaaaaatagattctcctgcctcagcctcccgagtagttgggattacaggtgtgcaccaccatgcctggataattttttgtatttttagtagagacggggttatgttggcgaggccagtctggaactcctgaccttgtgatccgccctcagcctcccaaagtgctgggattacagatgtgagccactgcgcccggccttcaatttttaatgactatagaatgttcatcaaattatagaagatcaaaaattatacaccattatggatcatcaaggcaacccctcatttacagatagagaaactgagacctggagcaacgcagtgatgaacatctttgttcactattttttcttcttgtgcctgtttgcataagctgagtacaaggttcaaaagctaacagaattctgggctctgtctggcaggctgtagaaatgcacccttcagcctttgaatcttcctacaaggacgatgtagacctgggtcccaggaattggaaagcgaaggagctttaaatccaatatcctggccaggcacggtggctcatgcctataatcccagcactttgggaggccgaggtgtgtgaatcacgaggtcaggagttcaagaccagcctggccaacatggcgaaaccctttctctactgaaaatacaaaaattagccgggcgtggtggcgtgggcttgtaatcccagctactcaggaggctgaggcagagaattgcttgaacccgggaggcagaggttgcaaagaactgagatcatgccactgcactccagcctgtgtgacagagtgagattctgtctcaaaaataaataaataaataaccaatattccccttcacagccacgaaaggggctcctagtcaagagagtgaatgaagatgaggaaaaatggcaggcaatgggcacaataatgagaccagggcatggggccgagagcactggcctctatgtgcctattcacagagaggaaagatcacgggtatcagagccagagggtcctagatttgaatcctgcctttaccacttactagctgtgcaactttgggcaagttaattgatgtctctgagcctgtttccttatctgaaagagccattcatatctatctcacatgcttgctgtgtgcgttaaatgagatcccatatgtgaccaggcatggcatggtgtcaggtacattactggacctaaataaatacgaattgccttctggaagggatttggattggcttacaatataagacacacaatttgaaaatggacctctgagctacctggcagccatggaaaaagggacacctgatggttactttgctctcagtctatgaaaactggaaggctagagagagagcttgggtttgaccactgtgtgatcttgggtgttctcttctctttcctgggcctcattttccccatcttcaaagttaggagctaggccaggtgcagtggctcacgcctgtaatcccagcactttgatcccaaggtgggtggatcaccttaggtcaggagctcgagaccagcctgatcaacatggtaaaaccccatctctactaaaaatacaaaaattagccaggcatggtggtgaacacctgcagtcccagctactcaggaggttgagacacgagaatcacttgaacccgggaggcggaggttgcagtgagctgagatcat

SEQ ID NO: 96427 - DNA, 44825 bp, Homo sapiens
aaaacaacaacaaaaaaagaattttaaggcagggcatggtgccttacgcctgtaatcccagcactttgggaggccgaggcgggtggatcacctaaggtcagcagtttgagaccagcctggccaacatggtgaaaccccgtctttactaaaaatacaaaaatttgccaggcatggtggtgcgcacttgtaatcccagctacttgggaggctgaggcaggagaattgtttgagcctgggagacagaggttacagtgagccgagatcgcactattgcactccagcctgggcaacagggcgagactccgtcttaaaaaaaaaaaaagaactttaagatggcgacagcagcattaaactaacttcagggcttgtctgagcacggggtcctatggttctgtacaggtcacaggcccatgaggctggccttaccctaagaagctggccacagctcccctcaatgaatccccacaagaactctgctgagttaatggtgttatcaccactttttaaaaaatagtggtaaattggccgggcgcagtggctcacgcctgtaatcttagcactttgggaggccgaggtgggcggatcatgaggtcaagagatcgagaccattctggccaacatgatggaaacccgtctctactaaaaatacaaaaattagccgggcatgatggcacacgcctgtagtcccagctactcagggagctgaggcgggagaatcgcttgaacctgggaggcagaggttgcagtgagctgagatcacaccactgcactccagcctagcgacagagcgagactctgtctaaaaacaaaaaaaagaaaaagtggtaaaatatgtataacataaaacttaaccatcttagccatttttaaatgtacagttcagtgatgttaaatatattcacgttgtgcaatcagtctccagaactttatcctcttgctaaactaaaactctttacccattgaacacaattccccatccttccttccccagcccctggtaactgcctttctactttctgtcttaatgaattagactccctaagtacctcatctaagtggaatctgggccaggcacagtggctcacgcctgtaatcccagcattttgggagcctgaggcaggaggattgcctgagcccaggagtttgagaccagcctgggcaacatagggcgacctcgtctctgcaaaaaaaaaaaaaaaaaagaagaagaagaaagaaagagaaggaaggaagggagggagggagggaagaaagggttcgctgctgctctctgagcttcgccgtgctatcaatggatgacaagaagaacgaagacaccggaaagtcgctaagaaagacaaagattcagtgaacaaatctgggggcagggcccaaaagaagaagtggttcaaaggcaaagtccgggacaagctcaataactgagtcgtgtttgacaaacctacctatgacaaactctgtaaggaacttcctaaccataaacttataagccctgctgtggtctctgagaaactgaagattcgaggcttcctggccagggcagcccttcaggagaaccttagtaaaggacttaacaaactggtttcaaagcacagagctcaagtaatttacatcagaaataccaagggtggagatgttatagctgctggtgatgatacatgaacaggtccaaccaactgtacatttgcaaaaataaaactttattaaatcaaaaaaagaggccaggcgcggtggctcatgcctataatcccacactttgggaggccgaggtgggtggatcacctgagctcaggagttcgagaccagcctggccaacatggcgaaaccccgtctctactaaaaatacaaaacttagcagggcatggtggcaggtgcctgtagtcccagccactaggggggctgaggcaggaggatcgcttgaacccaggaggcggaggttgcagtgagccaagatcatgccactgcactccagcctgggcgacagagtgagactccatctccaaaaaaaaaaaaaaaaagaaagaaaaagaagaaaggaagaaagtagaatcatacagtatttgttatttatttatttatttatttttagagaggacgtcttgctctgtggcccatgctgggtgcagtggcaggatcatagctcactgtaaccttgagctctggacctcaagtgatcctccttcctcagcctctagagcaattaggactacaggcatgtgccaccacactcagctaatttttgtctttttgtgactggcttatttcatgtagcataatgccctcaggttcattcctgttgtagtatggatttcctttttttttttttttaaggctgaaaacatttcattgtatgtttttaaggcatttaaaaaaatccagggcggggggaggggggagggatagcattaggagatatacctaatgtaaatgacgatttaatgggtgcagcacaccaacatggcacatgtatacgtatgtaacaaacctgcacgttgtgcacatgtaccctaaaacttaaagtataattaaaaaaaaaaaatccagggccaggcttggtggctcatgcctataatcccagctctttgggaggcccaggcaggcagatcacctgaagtcaggagttcaagaccagcctggccaacgtggcaaaaccccgtctctattaaaaatacaaaaattagccgggcatggtggcgggcgcctgtaatcccagccactcgggaggctgagacaggagaatcacttgaacccaggaggcggagattgcagtgagccgaaatcatgccactgcactccagcctaggggatagagcgagaacccgccacccaaaaaaaaaaaatccattcatcagtttctaccttttggctattgtgattaatgctactatgaacacgggtgtatatctgagaccctgcttttaattctttttttttttcttaataactgagatcaggtctcactatgttgcctaggctgtctccaactcctgggctcaagtgatccgcctgccttggccttccaaagtggtggcattacaggcatgaaccaccaccccaggctccttgctttcagttatctggggtatgtacccagcgtgagactgctggatcatgtaggaattctatattgaactttccgaggactctccataaggttttccacagcagctgcaccatttcacattcccaccaacagtgccagagttccaattcctccacatcctggacaatacctgttatcttctattttttgatagcagttattctaacgggtgtgacatcctccctgccttgtaaatatgggaactgaagcttgaaggtggtgagtaacttgcccaaggccaggcagcaatcactacagcagtcatcgtcactgggcagatgtctcaacacatcagccccactcacactgccaccaggaggccagctcgccgctgtcacagtgccagccaatagcacacacaagtacttcaccttcgctccagtctgatgctccctgaggccaacaggagccctcaggcacgccccatgccactgcagccccctggccagccagctggacccgaacctgcctagacctggccatgctcctccccatgctgccccaccctcagcctctagcagccttgcccccttctcccccacttcccaccacaggccctgacttcccagggtctctgtcccctcctccctcccccttgcagcatggaggtgggaaggctgcctcttctccaggtgaaagaaccaggtgctctcgggatctctccttatcctccttgcccatttacctgagcacctagaaggattagggagaggccagacagctgggcctcaggctctggctttgtcaggcccttttctagccccaaggggctgaggcccagagcgcaggcctcctggcctagggccaaagggtggagtccctgggggctcagagaacaataagaaagccagccgggtgcggtggctcacacctgtaatcccagcactgtgggatgctgagacaggtggattacctgaggccaagagtttgagatcagcctggctaacttgacgaaaccctggctctaccaaaaatacaaaaaattagccaggcgtggtggcacgtgcctgtaatcccagctactctggaggctgaagcacgagaattgcttgaacctgggaggcggaggttgcagtgtgccgagattgcaccattgcactccagcctgggcaacagagggagactcagtctcaaaaaaaaaaaaaaaaagaaaagaaaataatcttcaatccccagagctggtgggagacgagggccgcccctacctgttattcctccaagaaccgcccacagggtggctgtttgtttcccttggggggcctggctttccattccctccttctctcccacttcccttctcatccatttccacccctttgccctcctgctgggcaaccaagtcccccgtgccccagttccccagtcctggggacccaagtgtccacccaggtaaagccgaggaggtgtccggtcagggaaggttaaaggacaataacaaaagtaccgactggtaccccagagagcctccccacaagtggacttcgagtgcttaacctctgctcgctcctgctctttacaatggagttaataatagaaccagcttcccggggcagctgtgacgatcagatgagaccatgccagtgaccgtgctcagcatgcagcccgcacagagggcagctcctaggaagactgttcatgatcaatcaaggggaagctgctcagagaggaccgcatgcccagagtgtgagagtgtgtgtgagtgtgagtatatgtgggttgtgtgtgagtgcatgggtgttgtgtgtgtgttattgtgtgtgtggtgtgtttgtgtgagtgtgagagtgtgtgtgagtgtgagtgtgtgttgtgtgtgagtgtatgtgtgttgtgtgtgtgaatgagtgttattgtgtgtgtggtgtgtttgtgtgagtgtgagagtgtgtgtgtggtgtgtgtgtgtgtgtgtgagaaatgggaaagttcttcaaagattataaaaagtcacaatttcttactgtaagattgctatccactatatatatatatatagtgtcctatcagctgtcctagcttgctccggcatgcctggacagaactagacaagccccagccgggccgggtgcggtggctcaggcctgtaatcccagcactttgggaggccgaggcgggtggatcacgaggtcaggagatggagaccatcctggctaacatggtgaaaccccatctctactaaaaatacaaaaaattagcctgggaggtggcaggcgcctgtagtcccagctactcgggaggctgaggcaggagaatggcgtgaacccagggggcggagtctgcagtgaggcgagattgtgccactgcattccagcctgggtgacagcgagactccgtctcaaaaaaaaaaaaaaaaaaaaaaaagaatagaaagccccagcccatagtgcgtcccattccttatttggagatgctcccttaactatccctgggcaacttccttttctttctttgttctgtcccccttacccaattaaaacgttttaaaccaatagccaatcgagtaaagtgtaaaatgtgaggtcctattccagccaatggaaactggacacagcagtagggtagatgcgttaggttataaataacagtctccttcgctcagtgtgctctcgtggctgagcagctattgagcagcgccctttctgcagaaagtaaagcgcaccttgccgagagatcatttgtttctgtgttaattttttttgtgtgtgacaccaaaaacttcattcccaacacatgtgagtgactgtgtgtgtatgtgtgtgttcaccccacccacagcaggacccaaggttggtggggagggttgggacaaggggcttgaagctggaagggactagagctcctccccaaccccctgctaagcagcacccagcacagacagcagaggccccagctgaggaagatggggctgatcttcccgggagctgggtcctgcacgctctcccacggcccagtgagacgcagaaacggatcctttgtctgacttcctccagattgcctggggttggacccctgcaagccaggaggagccagcggcttccagaggggatctgagtccaggtctggaggcctctgtgtttggtgctctttcttttgtatcagctggatggtggaggaggaaggcagaggtgtgtgggtgaggggttgtggatagcggagcctgggaggtggggtgcaggtaagggaggctcagggagcccaggcagcacagagcccgtcttacggggctgaccagtcaccggtctgctgctctcacctgcctggagaggctctactctgtaccccagagacctacatgggcctggccttgaaacatgaccagtaaggcctgtgaaggatggagggaagaactgcaccctataacgagcaggcagctaggacccccagactcctctcaggcctgggtcctcctgggatgcagcaagactgcctcagaagagatctgagccgggcgcggtggctcacgcctgtaatcccagcactttgggaggccgaggcagggagatcacctgaggttgggaggtcaagactagccggaccaacatggagaaacttcatctctgctaaaaatagctgggcgtggtggcacatgcctgtagtcccagctactcgggaggctgaggcaggagaatcacttgaactcgggaggtggaggttgcggtgaaccaagattgcaccattgtactccagcctgggcaacaagagcgaaactccgtctcaataaataaataaataaaaaggccaggcgcggtggctcacgcctgtaatcccagcactttgggaggccgaggcgggcggatcacgaggtcaggagatcgagaccatcctggctaacatggtgaaaccccgtctctactaaaaatacaaaaaattagcaggcgtggtagtgggcgcctgtagtcccagctacttgggaggctgaggcaggagaatggcgagaacccaggaggcggagcttgcagtgagctgagatcctgccactgcactccagcctgggtgacagagcgagactccatctaaaataataataataataaaaaaaataaataaaagaagaagaagaagagagctgaacctctgatcctcttcactggacctaagctcggccctccaggtccctgggccttggtttctccatcaggaaggagccatgcaccccaccttgcaatgctgttgaggaggcagaattgaagacagcaaactgtgccaggaatgtgggtcttgacttcagtgagccctccttgctccctccgtcaggcgcactgcacacctcacccccagacagcgccggaggcagtactcacagctgagggagccagggaagggcaatggggcaacaggaaggcagggtggtgttggcgagagatggcggaagagttcctgctgggcttatgtagtcccaacatttttggaggctgaagcaggacgattgcttaagcccagtagttggaggctgcaatgagctataatggcaccactgctctccagcctgagccacagagtgagactctgtctcaaaaaaaagaaaaaaaaagtttctgtcaatcatttaagctcccagccccaacaggaaaggcaggaaaatgagaactaaggtctggtttacatcaggacgtccacttgaccccacagcagtcccttttaggttttccctgtttagcacagaaggaacctgaggctcacagacatgtagaggctggcccaggcccagagcttgtctggggccaacacagtcctggcccggaccctgtagaatatctgcctggtccagctgggcacggtgtcttatgcctgtaatcccagcactttgggaggccgaggtgagtggatcacgaggtcaggagatcaagaccattctggccaacatggtgaaaccccgtctctactaaaaatacaaaaattagctgggcatggtggtgcgtgcctgtaatcccagctactcaggaggctgaggcaacaagagcgaaactccgtctcaaaaaaaagaaaaaaaaagaaagaaagaaattgaaacttggacacacctgagttcaaactggggttgtgcaggagggctgaccctggctgaagtcagcttccgcgtctgtgaaatgggctcatgctacacacttcaccaggttagagagaagcagaaaaataacactaaccctgcaaatgcttcacaggcagctgagacaagggcttccacccacctccaggttccaggttcccactggggcctcctgtctggaattctctagcccctgcagttcccggccttaccccctgcagccaacttggctggtagctcccttccttccgaggcaaagagccaggctagcttttgctgctacatgtcaacactcagactttgtcttcctcaccttggctcgctcacaggagtccttctatctagaatgtcctaaatgaaatacatatctgggtcattttttttttttttttgagacagggcctcactctgctgcccaggctggagtgcagtggcgcagtcttggctcactgcagcctccacctcccaggttcaagtgattctcctgcctcagcctcccgagtagctgggaatacaggcgcccaccaccatgcccggctaatttttgtatttttagtggagatggcgttttgccatgttggccaggctggtctttttttttttttttgagacgcattttcactctgttgcccaggctggagtacagtggtgccatctcggctcactgcaacctccacctcttgggttcaagtgattctcatgtctcagcctccagagaagctgggattacaagcatgcgccaccctgcctggctaatttttgtatttttagtgaagagagggtttaaccatgttggccaggctggtctcgaactcctgacctcaagtgatccgcctgctttggcctcccaaagtgctgggattacacgtgtgacctaccatgcccggcccaaccatgcactttttttttttttttgagacagagtctcactcttgtcacccaggctggagcgcaatggtgcaatctcggctcagtgcaacctccgcctcccaggttcaagtgattctccagcctcagcctcctgagtagctggaactagaggcgcatgacaccatgcccagctgatttttgtatttttagtagagatggggtttcaccatgttggccaggatggtcttgatcttctgatcttgtgatccacccgcctcggcctcccaaaatgctgggattacaggcatgagccacggtgcccggccctgccccacattttaaatgttttgaggtattcaccagactgccctcctaagagggtgtgtccgtgtgtatttccagcacaggctgacaagacggccaggctcctgcctatctgacaggccatcaaaggatgaaatactgagagcattgttgctgcttttctttgcatctctttcatgattcgtggggacatggtaacataaacttcctggggcaaaagagatatgactattacagaacttcaaaagaaatggttactcacgagaggggaaaatcccagcatgctgtatctcctgagtcttcctcattcttcgaggcaggagaaggaaagttggagagagtggtgaaaccaggagacctgtgggcctggaatgagaaattgggtcctcccatggcccacaagacctcagggcatcattttgcctgtctggcctcagtttcctctcctgtaaagtggcaacagcagaaattgtctcttaaggttgttgtggagatgaaaagggatggaaaaatccactcatttgtgcaacagacatctactgagggtccgctttttggggtgcagaggagcaaaaatgtacacccgtgttggggctgatagaccaggggaaggttggctagaagagattcttcccagccaggcacagtggctcaggcctgtcatcccagcactttgagaggctgaggcgggtagatcacctgaggtcaggagttcgagaccagcctggccaacatggtgaaatcccgtcgctactaaaaatacaaaaatattagccaggcatggtggcgggcgcctgtaatcccagctacttgggaggctaaggcaggagaatgacttgaacccaggaggcagaggttgcggtgagccaagatcgcaccattgcactccagcctgggcaacaagagggaaactctgtctccaaaaaaaaaaaggagatgaagaggtctttcccagagtgccctgagagcagaggtgtgggtggcggccactgccaattccatggccaccccatcctcgttgagggtgcaggttgaaccccaggagctgccagagctgctattgttttgaaaatatctgctatcactctgataagctcagttgtcagaagggatgttatttctgggcgaaaggaggttccgcaggactggaggtccttcctgcttacaccacatgggcctagcccctcccatcagacccggcttgggtgataatctggggccttgagcctgctcctggcagggacagcagtggccatcactgtaggacgtctccggactgctgcccaaggcctccgcaatgctgcaggagctgagatcacctcttttctgaccctggattcctggaattgtctcacagaatggaggcctgttctccatcctcctgacaggccacagtagattatgttggtcacactagccatttggatatctggcccaaacgtgtgtctgttacatggctgtggcactgagctgagaggcctggcgggttgagcctccataatttgctctgaaatgcactggtcctgttttcagttacattattcttgtcacctgcaaagctggcctctcagatctcaccatggccttggcctaccaagcaccctggcagctgtgaatccagatctggattaaaatccttgatgttgactatttcaagtttgatccactgggctttgctttgattttattgtttagtattgagttttaattgatatacccaaaagtgcacagatcctaagcattcagttcaatgtatgtttgcatacatatgtacccctgcagccaccatctgtgttaccccagaagcttccatcatgccccttcccagccaatacccatccccaccctggagagggagtcaccgatctcacatctaatgccgtagattagttgtgcctagttatgcctagttatgaacgtcatagaaacggaattacagcatgctttattttgtgtccagcttctttttttttttttttcgagatggcgtttcgctcttgttgtccaggctggagtgcagtggcacgatcttggcttactgcaacctccacctccctggttcaagcaattctcctgcctcagcctcccgagtagctgggattacaggcgtgcaccaccacacccggctaatttttgtgtctttagtggagacagggttggccaggctagtttcaaattcctggcctcaggtgatccacctgccttggactcccgaagtgttagtattacaggcgtgagccaccgcacctggcctcgtgtctggcttctttcattcaacataatgtctgtaaaaaaaagttaaagccgggcgctcacgcctgtaatcccagcactttgggaggccgaggcgggcggatcacaaggtcaggagatcgagaccatcctggctaacacagtgaaacctcctctctactaaacatacaaaaaattagccaggcatggtggcacacgcctgtagtcccagctacttggaaggctgaggcaggagaatggcttaaacccaggaggtggaagttgcagtgagccgagaatgcgtcactgcactccagcctgggagacaaagtgagactctgtctcaaaaaaaaaagaaaatatatatatatacacatatatatatacacacatatacatatatatacacatatatacatatatacacatatatacacatatacatatatacacatatacacatatatacatatatacatatatacacatatacacatatatacatatatacatatatacacatatatatatacatatatacacatatatacatatatacatacatacacacatatatatacatatagagagagagagagagagagagactgagagagagagagggctgggcacgatggctcatgcctataaactgagcactttgcaaggctgaagcaggtggatcacttgacgtcaagatttaagaccagcctggccaacatggtgaaaccctgtctcaataaaaaatataaaaactatccaggtgtggtggtgggtgcctgtaatcccagcttctcaggaggctgaggaaggagagtcgctcaaagtggggaggcagaggttacattgagccgagatcacgccactgcactccagcctgggtgacagagcgagactctgtctcaaaaaaaaaaaaaaaaaaaaaaaaaaaagagagagagagaagctgtgaagcctcagcagaagctgttcttttgtgttcgtttgcttttgagctggagtctcaccctgtcacccaggctggagtgcagtggcacgatcctggctcactgcagcctccacctcctgggttcaagcaattcttctgccttagcctcccaaatagctgggactacaggcacatgctgccatgcctggctaattttttgtatttttagtagagatggggtttcaccacgtagcccaggctggtgtcaaactcctgaggtcaggtgatctgcccgcctcagcctctcaaagtgttgggattacaggcgtgagccactgcacccggcccagaagttgttcttaactgttgttcaaggagaagcctatcggggggaagaaccaagagagggacagagggaggaaatcacccaaaaatagatgtgtctctttggccctaatgcacacaacatgcatgcatttcttcaacagctatacagctgggcatggtggctcacgcctgtaatcctagcattttggcgtagggtccagccctactgggccttgtgggttttctcgtcgtgtgcggagacatagaaagaaagacacaagagtaagagagagtatgaaagacagctgggcccagggggccactaccaccaatgcacggagtccggtagttgttccgaatgcctggacgcactgctatttattgtatacaaggcaagggggcaggggaaggagagtgagtcatcccaagtgattgataaggtcaagcaagtcacgtgtccacgtgacagggagcctttccctttgtgtttgctaaagcagagagggaggatagcagacgtcagcgttttttctatgcacttatcagagagatcaaagactttaatactttcactaattctgctactgctatcttctaggaacttaaaagaggcaccaggtgtacaggcgggacatgaaagtgaacagggagcgtgaccactgaagcacagcaccacagggagacgttgaagcttccggatgactatgggcaggcccgagtcatgtcaggcctcccacaagagctggtggagcagagtgttctctaattcccccaaggaaggggaaactccctttcctggtctgctaagtaacgggtgccttcccaggcactggcgctaccactagaccaaggagccctcaagtggcccttatccgggtgtgacagagggctcacactcttgtcttctggtcacctctcacaatgtcccttcagctcctgactctgtatggcctggtttttcctcggttattataataataataataatacaaagattaatactagaaactaatgattgataatatccatatataatcatctctatatcctatttctaatataactttctcttatcctattttctttattatattggaacagcttgtgccttcagtctcttgcctctgcaactgggtggctttctgcccacactttgggaggccaaggcaggcagatcacctaaggtcaggagtttgagaccagcctagccaacatggcaaaaccctgtctctactaaaagtacaaaaattagcaggcttggtggcgcatgcctgtaatcccagctactcaagaggctgaggcagaagaattgcttgaacctgggaggtggaggttgcagtgagctgagattgcaccattgcactccagcctgggtgacaagagggaaactgtttcaaaaacaaaaaacaaacaaaaaaacaaaaaaacaaaccaaaaaacccccagctatttactgagcacctactatatgagcggcgcaggatgagtctggtttagattctagtgggggatgggagtcagacaataagcaaatagacaggtgactaaatatgtaagagagcagaaggtgctgtggaagaaagtaaaataagcaggagaagaagggaagcagtagccccaccaccagcctcggacaatagtgaagatcacttggcattgggtctgacatcctgccaacatccttatgagttgtgtatcgcaatctccatttcccagagagtgtgggaaagacagcctctgatgcacgaggctgtgctcaagctcacacagctgtgaagggcagcctccacccctcatgtcaggtgcagtgtctatgcccctccaccctacagctcagttggcctctcaaagcctcagtctcctcaccgataaactgggaatgtaataaagtttcctaggctgggcgcagtggctcacacctgtaatcccggcagtttgggaggtggaggtgggctgatcacttgaggccaggagttcaagaccaacctggccaacacagtgaaaccccatctctactaaaaaatacaaaaattagccggacgtgaggtgcgtgcctataatctcagagccttgggaggctgaggcgggagaatcgcttgaacctaggaggcggaggtcgcagtgagtcaagatcgcaccactgcactccagcctaggcgacagggtgagaatatgtctcagaaaaaaaaaaaaaaaaagggctgggcgcggtggctcacgcccataatcccagcactttgggaggccaaggtgggcgaatcacgaggacaggagttcgagatcagtctggccaacgtggtgaaaccccatctctacaaaaaattagccaggcttggtggcaggcgcttgtaatcccagctacttgggaggctgaggcaggagaatcgctagaacctgggaggtggaggttgcaatgagccaagattgtgccattgcactctagccggggcggcaatgcgagactcagtttaaaaaaaaaaaaaaaagttttcagaggatgtacaacagctctgtccatggagggcctcacagcttcggagctgagtccaggctgggtgtgcagaatgccagctgacggatgtactgctggccagctgtgggtcggggggcagcctgggtacgccaatcagttggacggaggctgcaatacctctatttaggagccctgggcactctcggagacaatgggcattattttcccttcaatacccctccgcatggctgctagattccaattccttaacctcttgttcctttccagctcagtgtccttccatagctccccagtaccgacaggataattaggccacattcacctttctattctggttggaatccagtcccttctttgaattcccctcaaatatctcctcctccatgaagctttccctgatatatttgtgtcctctgtgggagcctggcgcttagttttcccttgcttgacgccacagtcactttctgtctgtccctgcattgccactgtcttgaaggtaggcatttggcattgtctctggcttggctctggcttcagttaagaccaaacatagttttcttcctcttctaaaaaaagataatgtttttgcacgtttatctagacaatccggaaaatacatgaaaacacaaggcagaaaactaaaccacggctgggagcggtggctcatacctgtaatcccagcactttgggaggccaaggtgggcggatcccttgagcccaggagttccaggccagcctggccaacatggtgaaaccctgtctctactaaaaatacaaaaattagctgggtgtggtgatgcacgcctataatcccagctactcaggaagctgaggcacaagaatcacttgagcccaggaggcaggggttgcagtgagccaagatcacgccactgcactgcactccaacttggatgacaaagtgagacgctgtctccaaacaaaaacaaaaacaaaaacaaaaaaacaaactaataggaccaggcgtggtggctcacacctgtaatcccagcactttgggaggccgaggtgggcagattccctgaggtcaggagttcaagaccagtctggccaacagggtgaaatcccgtctccactaaaaatacagaaaaaaaaaaaaaaaaaaaaacattagccgggcgtggtggtgcatgcctgtagtcccagctaccctggaggctgagacaggagaatctcttgaacacaggaggcggaggttgcagtgagctgagatggcatcactgcactgcagcctgggtgacagagtgagactccatctcaaaaacaaaacaaaacaaaaacaaacaaacaaaaactcaatacacctgtattagtattgagtttaattgacataccaaaacatgcacagttcctaagcattcagctgtttgcatacatatgcacccctgcagccaccatctgtgtcaccccagaaagttccataatgccccttcccagccaatacccatcttcaccctggagagggagccgccaatgtcacctctagcgccatagattaggtgtgcctggtaatgaacttcatgatgcccagagatgactactattcccattttgctgtgctatatttccttccagactttcacacatggatttttttttttttttcttgagacagagtctcgctgtgttgcccaggctggagtgcagtggcacaatctcggctcactgcaagctccgcctcccgggttcacgccattctcctgcctcagccccctgagcagctgggactacaggcatccaccaccacacccagctaaatttttttgtatttttagtagagatggggtttcactgtgttagtcaggatggtctcgatctcctgaccttgtgatctgcctgcctcggcctcccaaagtgctgggattacaggcacctgccaccttgcccagccatacatggatttttaaagaatataggattctaatggacacagtgatttatacagcatgccatttcattcaatagatcatgcgatcatgcatctccaagacagtttccttcgtgagcttttttttttttttagacagaagaatcttgctgtgttgcccaggctggagtgcagtggcacgatcttggctcactgcaatctccgcctcccaggttcaagcaattctctgcctcagcctcccaagtagctgggactacaggtgagtgccatcacacccgctactttttttttttttttttttgagacagagtttcactcttgttgcccaggctggagtataatggcgtggtctcagctcactgcaacctctgcctccctaattctcctgcctcaaccttctcgagtagctgggattacaggcatgtgccaccccgcccagctaattttgtatttttagtagagatggggtttctccatgttggtcaggctggtctcaaactcctgacctcagatgagccgcctgccttgtcctcccaaagtgctgagattacaggcgcaagccaccgcgcctggcctagttttttaatttttagtagagatggagtttcgtcatgttggccaggctggtctcaaacacctgacctcaggtgatccacctgccttggcctcccaaagtgctggggttataggcgtgagccaccatgcccagccatctcttcctccttttgatcagcatattgtcttgggattttgcaaagtaaataagtactgtatttgcacccactctgcccttgaatcatccagtgtccccaaacggtccttctttctccatcttttctgctaatgtttactgaacatctcctacatacctggcactgtgcctccagccttaagacccctctgcaagcatctcacatatatcaggtctttcggacccatgagaccccgtgtcattgctttacctccctgagtctcaattttttcatctgcaaaatgcattcagagggaagcccccattatgaagggttccctactcctgactgtaaggcactctgtggctgttagccacagtcagggcgagctgctttgtaggggttgatgtagtttggaggccctagaagaaaagactacagggccgggagtggtggctcacgcctgtaatcccagcactttgggagcccgaggccggtggatcacctggtgtcaggagttcaagaccagcctggccaatatggcaaaaccccgtctctactaaaaatacaaaaactagccgggcatggtggcacacgcctgtaatccagctactaggggggctgaggcgggaggattgcttcaacctgggagacagacgttgcagtgagccaagattgtgccactgcactccagcctgggcaacagggctagactctgtctcaaaaaaacaaaaacaaaaacaaacaaaaaaaccccacaaaagcaaagaaggtccagagcccggaaggcgggaggggctctgaagactttatcacactttacctcctctgttcctcccaacagcccagctcttggtaggtgctgttgtccatttcacagatgagaacattgaaggggaagtaattaccctagaggtgggaagaacagagtgagggtacccaacaggtagcaaacgacagagctgggggaggggaacccctgtccctgcccctcccctaatctctgaggggatcaagacagaagtaaacaagctttgccgtgcccaggacaattgttactttgttattccaggagcgctctgccttctcccacccccaatataccccagggctggagttaggtcctacccatccccgcgtagcaggctgcccacccgcccaccccgcctggaagctttctgatttctctgttcgccccgccaggcgctgtggggtccgtctcaccaggtctgcacgtgagccccctgcccccaatccctcccagtcccgcccgcctctcgcggacccggagccccgacgggagggggaaggcagtgggtgtgtcatgcagctggaaggctgcggacgggcggcagtggaggggcagccccctggcttcgggtatggatcactggatgctgctgctaaccaaatgtgaacctcggttttcatatttgtgaaataggctttaaaacacctaaatcccaaagctgccagcctaaggagcacacgtctttgaacgctggcttcacgctgtcatttaagtcatttcgtcctcttggagcctcggtttccacgtgggtaaaatgatcgtgaaaaaaagcaccgaggagtactttgagctcgaacggaggccatccgtgtaaagggccagattctgtcaatggatcgatccccccgatattgatggaaacccctgagtgcacgcccgtgctgggcgcaggggaaacagcgacgcacgggacaaaacaagcttgcagaacagcagggggcagagaggctgtaaacaagccaacgggctgcacttgtagcggttctgttgccaatgccattcagaccccagtccgggattccgcgctcggggtgcgagaggccgctcccggggaggggcgggacccgggcggggcgggaggggcggggcgcccgggcctattaggtcccgcgccggcagccgggccgcagacacgaagcctcccgggtggcttacagacgctgccagcatcgccgccgccaggtgagtgcccccgaccctgctgccgcccgctgctccgcccagctcgagcccggcggttagcgcccaggccgcggcccgggtgccgagcggctggaagtgtggggagccgtgcccaggttttaccgctccagcaagtcgctggcggggcgacgtctcgggactccggctccgaaacgtaccctctctgtccggggctccaggtccccgacgggcgatcgtgccaggcgcggcccctgcgggcctcagtctccgcgcctgtgcaatggggtggtccctctgcgtctcgccgcgacggctggacgccccatcgccgccgcacagtcctccagtgcggcttccgggcacccggctccgaactctggggtcgtgcggacccggccagaccgtagcgcggcaacgccagcccacggccgcggccgcacagccccggtgcccttaaaagagggaagatggcgtcgtgcccggtgccgccgggaccggctcccggaggcgctgcgcacctgaggaagggccgaggaaaggcttcgtaacgggacgcccagaaagtccggaacaggaacgtgcacacggagcggcgcgcagccgcccgccctcgcttgcccacgcgccctgcacaggtgcgccccagactgggcggggactagagcccggctggggcatgcgaccttgtttggtaaattggaggtgcgcccctgcgggtgacccgcgagggggccccccgcctgcggggcgcggtcacgacaaggcttgtggggttcggagctggtcgtcgtctgggctctggcctcctaaatgcgatcgctttcaagcccttcattgtcaattttgctagaatgagccactcgtggggtaggacgtggttgttgatgttactgttgtagctcttactattgtaacatttttgttgctgttttaacgcagtgtttactgtggtctgggagcccgagcttcccagggagcattggtgtcagcctcatgtccccgcattaggaggagcgcagtctggtgggcactagcgccgggaagttcttaacatctgtctgcccctgggagcaggaggcctcatcttccaggtggagaaacagagatttcagtcccaggaggcacagaaatgccagggttgtctagctagaagccaagggccctttatggaacccaagccaaaacctctttccactctccagccctgtggcctcggaagggccactccatctctctgaacctcagtttgttctgttcactctgcaaaatgtatccctgaggtttctggccaggtgaaagcccctctcaagttagtagcctccctggagttaagactcaccccgatttctacttaatttgggcacgcctttggaataagttctcaggaatggcacagtttgggtgttttttgtttctttttgtttttttttkaaacagagcttcgctcttgttgcccaggctggagtgcaatggcgccgtctcggctaactgcaacctcggcctcctgggttcaaacggttctcctgcctcagcctcctagtagctgggattacaggcgcctaccacgaggcccagctaattttttgtatttttagtagagatggggtttcaccatgttggccaagctagtctcgaactcctgacctcaggcgatccacccgcctcagcctcccaaagtgctgggattacaggtgtgacccaccccgcccggcttgagtgtttaaatactcctgcctcagcctcccaaggtgctgggattacagacgtgagcccctatgcctggccctttttttttttttaattgtcttaaggatgttaagactaagattctcacacatttgactcgtgcctgtaatcctagcactttgggaggctgaggcaggaggattgcttgagctcaggagactagactgggctagaccagactgggtaacatggtaaaaccctgtctctaccaaaaatacaaaaaattaaccgggcatggtggcatgtgcctctggtcctagctacgcaggaggctgagttcagaggcctacctgagcttggaggggttgaggctgcagtgaaccctgatcatgccactgcactctagcctgggagacagagtgagaccctgtctcaaaaaaaggagcattaggctgggcatggtggctcacatttgtaatcctagcactttgggaggccgagggagatggatcacctgaggtcaggagttgtgagacgagcctggccaacatggcaaaaccagtctcttttaaaaatgcaaaaattagccggtcgtggtggcgtgtgtctgtaatcccagctacttgggaggctgaggcaggagaactgcttgaatctgggaggcagaggttgcactgagcggagatcacaccatggcactccagcctgggccacatagggagactctctgtcaaaagaaaatttaaaaaagcatcaaatggtagatccccagtgtctgttacagcttgggtactctatggctggatagagaggctgcatacatgttagttattgtaagtttgtttgtttttttgagacggagtttcgctcttgttgcccaggctggagtgcaatggctgggaatacaggcgtgagccacctcacccggctcaagattcttacacatttgacttgcctgtaatcccagcactttgggaggctaaggcgggagaattgcttgaacccaggaggcggagattgcagtgagcagagatggtgccactgcactcagcctgggctaacgtgagactccatctcaaaaaaaaaaaaattacgtcttgtgtcacagagctgcagataaaccagagactactcataacmgtgtactttttttttcccccatttctgatcccgtctcaacggaaggatgtrattgaggaagggcttgattggccagtgagtcttgaagctgacaccactgctggtggtattttcccctctccctggaaagcatcctgtttttagtgaacctattaaatgtgtagacaattaatggctttttgcttcccctgctgcagacttagcggatcccatgagattttgactaccstctgtgctcagaacagtttgagccgtatggaggaagtctccgcaccagtcttactgttggtggtcaccaggaagccagcagtgtgtctgaactggacacatgtggccacttcctagcctccctttgtcctgccactggttggttggggctgggccctgggagaaacatagaatgtgagcaaatcagtccgtggcccctaagttccttgttggccccgaggcaggcaggagaggggcgggcacacagggcagctgattttcctagtgtcaatattaggatgtgacaatacaaaacaccactgggcctcgccaggcactgcatggtaaacctgtttttctgggggtgggacagaacttggcacccagttagccaractgaaaagccatgcagcaaagagagaaaagctcacttgtttatttgagtgagggtccctgtcattttggatatttaagatcaagtattcttgaccgccccctccccgagatggagtcttgctctgttgcccaggctggagtgcagtggtgtgatctcagctcactgcaacctctgcctcccgggttcaggtgattctcctgcctcagcctcccgagtagctgagattacaggcgcgtgccaccacaccaggctaatttttgtatttttaatagagatggggtttcaccacgttggccaggttggtcttgaactcctgaccttgtgatccgcccgcctcagcctcccaaagtgctgggattacaggtgcgagccaccgtgcctggccaagagatgacatttattgtgtgtgacagtatcttcgagattagaggctccctttcatgtgagggcaaagagagctacctgattccaggaggagctgaaattccctgtgcagacaatggcgcatcatgaagataaatccgagctcggaccgtgaggtggtcagcacgggtgtgcgcctcgcagagcaacaggctcacagaatgagagctgcctcttagtgggcacttactgcataccatgcatgcagcatttcacctccttctcagggctacatctgcccatggggctttccctcctgccctttaacagaaggtgatactgtccagtccagggtctcccagccaggaacagcctgccatcgtgagcccagcaccagagtaaccccttccctcattctcaggattttgcagtgaactctcaggctgtctgcatcctctcaccggctttcactgggtccctgctctgttctggggccatgcaggttcccgactggctggggcagacacacaggtaaacatttaacgagaccttgatgggctgagtgcccaatccaggtctgtttacccaaggtgctgggacaacacagatgaggagcatttaattctgtcctggggagggtgkggaggaagtgacttgtgcctgagccccaaggaagcagtgagtcccccgtgcctgcctgggggatgttggtaacagagggaggatgtaaaggaggagctggggtgtgaaagggctgggtgcaagttcataggggagacccaaacactgaagtggagcccaggggccgtacctgcctctcaagcctcagggtcggggccagggtgagcagtcttcatattcttcagcctcagcatttcagaacttgttttattttttttttgagatggagccttactcctgtcgcgggggctggagtgcagtggcgcgatctcggctcactgcaacctccacctcctgggttcaagtgattctccttcctcagcctccctagtagctgggattacaggcgtgcgccaccacgcctggctagtttttrtatttttagtagagatgaggtttcgccatgttggccaggatggttgtgaactcctgacctcagttgatccacctgcctcaacctcccaaagtgctaggattataggtgtgagccaccgcgtctggcctattttttatttttgattgagtcttgctctgttgcccaggttagagtgcggtggcaygatcttggctcactgcaacctctgcctctcaggtttaagtgattctcctgccttagtctcccgagtagcttggactacaggtgcccgccaccaygcccggctaactttggtatttttagtagagacactgtttcaccatgttgaccggggggtcttgaactcctgaccttagttgatccatctgccttgacctcccaaagtgctgggattacaggagggagccaccgcgccccggcccagaacttgttttaaatatgaacttttgaaacttaacaactgtaggcccaggtggtggcttggcattctctgcttccttcatggtgataaaaaggcacaggcttcccctttttggggtcatttcaaaatcagtcaagagaattattagtctgttagacttcctctacggttaggattatttttataggtgttcgaacaggaaaggacatagaataaaatctcctcccctaacttattgatacagggtctcactctgtcgcccaggctggagtgcagtggcgcagtcacagctcactgcagcctcaacctcctgggctcaagtgatcctttcgccttgtgctcttaaagtgctgggagcctccaaaaggctaagctgtgacgttgggtaggttacatgtattaaatgcatttttttttttttgagacagttttgttcttgtcacccaggctggagtgtaatggcataatctcggctcactacaacctctgcctcccaggttcaagtgattctcctgcctcagcctccygagtagctgggattacaggcgcccacccccacgcccggctaatttttgtatttttagtagagacagagtttcaccgtgttagccagaatggtttcgatctcctgacctcgtgatccgcccgcctcggmctcccaaagtgctgggattacaggcgtaagccaccgtgcccggcctggtgaaaccccgtctttactaaaaatacaaaattagccaggtgtggtggcgtgcacctgtagtcccaggtacttgggaagttgaggtggaaagatcacctgagcccagggaggtggagactacagtgagccatgttcatgccactgcactccagcctgggtgacagagagaccctgtctcaaaatagtaatactccatattgggcctctcacaggggaatcttggggggagctgcagctcagggtgactcccatcttgtcactagccaggtgaccccttcattctggagccttagctctgaaagccgcaggtgggggtgccgtttcagatgccccttttccatttcaaaggctctgattctagatcttgaagccggatgcggcactggcactcggcttcagtttccactgtgacggacggaggtctcccaggcccagcccaggcagccaagcccatcctggaatcagaacacgctgagcacattttgtagggtggcacctttttatccaagttactagctacacatcagtgtttaaagagaaaaaagtgagctgtcttttttttttcttgaaacttgaggaaacaaggtacatactacggatttttttttttctttttcttttttttttttgagacagtctcactctgtcgcccaraccggagtgtggkggcatgatctcggcttactgaaagctctgcctccagggttcaagccattctcctgcctcagcctcccgagtagctgggactacaggcgcccgccaccacgcccagctaattttttttgtatttttagtagagacagggtttcactgtgttagccaggatgctctccatctcctgaccttgtgatctgcacgcctcaacctcccaaagtgctgggattacaggcgtgagccaccgcgcccggcccatwttttttttttttgagatggagtttttcgctcttgtcgcccaggttggagtgtaatggtgtgatctcggctcactgcaaactcctcctcccaggttcaagcgattctcctgcctcagccacccgagtagctggattacaggcgcgcaccaccacacctggctaattttttttgaaacggggtagagacggagttttattaccatgttagtcaggctggtcttgaactcctgacctcatgatctgcccaccttggcctcccaaagtgctgggattacaggtgtaagccaccgcggctggcccatttcatatatttttaaaattttttattgttaatttatttttagagagggggtctcgttgtattgcccaggctggtcttgaactgggctcgtgcgacgtgcccgcctcggcctcccgaagggctgtgatgacagcacagcggtgcctgtgatctatggcttcaatttttcaaggctgccaggtccatgcaggggtgtgtgtgggatgcatccctagaaatcaaaggtcatgtgcgtgtgtgactggtggatgctgatggtcacactaccctccagaaaggcagcaacatgttcagtccaccgtggcgtcctgagctgtgagtggcctctggtctcctctcttctaaggctgttgattgtgttaaccagcttttatggagcccctgctaggtggtggaaaatgggcagtagtgtatgttttcatcctctcagcagccctggaggcccggctgtttctgcaaggctcagaggtgagctggttgttctgcctcacacagcaggggccgagcagggggtggaactgaggtccagcctggctgcaggctcagggcgtttcctgctgggttacactggagttgtgtgcgctccaagggctttgtgccaccccaccctcatggtccagggccaggctgtgactgggagggtggcacgtggaagactggaccagggttttctagctgggcccactcagctggccctccctgtgaccccagcgtggcccctgaccctctcggtttgcctgcctgtgaaacaggaagtgtcagatcccgcctgcttggctttgacaggactgggcgaggtcatgagagtctgagggtccctaccaggagttcgacctcatcctcaggtccagccccatccacctctgcccccaaccccgctctgacactcctgcagcctcggccctygaacacctgctgagggctgagcagaacacatctctacttgcttgtgcttctgggcaacctgggaggggcttgggaggtagatggcgtttccccatcttccagatgagccataggcgagctgtcgagtgcagagctgttcaccaaatgtaggctgctctgtccagaacctgccctccctcccactcggagccctgcaggtgccctcaaggccgtgggtgtggyactcttttctgcacatactagatttgcatcctaacctcttagggtaaaatagggcttctgactggcgcctggtgtttccactggtgagtgtgtaggaggctaagtgcgggctgtagcctgggtggggacacatggctaggtgtgtcttccttcaccaaagaagggtttcaactactcatttgcaagtttgctggaaaaaaaaagataataaaaaccagtccagtttcctgtatctgcagctgcagtgacctcacagtgggtcctctgggaataggttgccttcatgtcttcagtcaacaaacatatgtctgctctatgccaggccttgggctgacaaccagaaactgataagagcagcagcccctctcttagcggtttactctgtgccggatcatttcatccccacaacagtcctgtgcaataggtgttactagtatctccattctaattttttttttttctgatatggagtcttgccctgtagcccagcctggagtgcagtggtcagctggagccagaggggagcagagacaggggctgcaggacccccaggaggcccccaagcagactctgagggtccaagaaggtgatgcccgaataggccagcctcatacccatcctctcagtactttgggaggcccaggcgggagttgaagccaggagttccgagacaagcctgggcaacaaagcaagaccctatctctacagcaattctataaaaatgagccaagtgcagtggtacatacctgtcgagttaccctggaggctgaggtgggatgaytacctgagcccaggagtttgaggctgtagtgagcatgatcaggccactgcactccagcctgggcaaamgrgtgagaccctgtctgtgaaaaaaataataataaaatttaatttttaaaaaaggaccaataggygtaggcatgggccggtctgaggttggctggtgagctctgcacatttgaagactttggaggcatggcaggaccaggcaccatccatggaaagcatacttgagtgtggttagmgcgggaaccaagattggggtggcagggccacagggggagggcctgttagtggatgtggcacaaccccccacttgtttttgagacaagtcttgctctgtcacccaggttggagtgcartggcgcggtctcggctcactgcatattctgcctcctggattcaagtgattctcctgcctcagcctcccaagtagctgggattataggcgagcgccaccacacctggttaatttttgtatttttagtggagatggcgtttcaccatgttagccaggctagtctcaaactcctaagctcaggtgatccacctgcctccacctctcaaagtgctgggattacaggcrtgagccgcactgcaccaggccaggtctagggagccgaacagagcagtgacagggtcagggttgaggctgctaccttgagattaggttggagagagctccactgaaggctggagaccagtaaggcattcagagctggtgccaggtaggagctgacaggactgggcctcccttgggctggtggggtggccaggagagaccagagcaggaggtcgctgctgcaaggaccctcctgggcaggctccccaccttccgctccctggctccacacttttcccatgcagatctgggccctaaggccagcctaggcccagttggtgatgggatctttgccattcatatcaagtcaatctgagggcctgggcccagaggccagatggttaaaggttcagattaggtcccttctttgtggtagagggtaatgggtatttaataaattaatccaaagtgctgtaatcccagtactttgggaggctgaggcgggtggatcacttgagatcaggagttgagaccagcctggccaacatggtaaaaccccgactctactaaaaatacaaaaattagccgggtgtggtggcatgtgcctgtaatcccagctacctgggagtctgaggcaggagaatcacttgaacctgggaggcggaggttgcacctgagctgagatcacaccactgcactccagcctgggcaatagagtgagactgtctcaaaaacaaacaaacaaacaaacaaaaaaacactaccaccaacaaaaacacaatagatggggaaactgaggctggtgcaggaagggttgggctagggtatcaacctaaggtgagatgtggtcctgggtctactcagatggggaggttggcagggtggggagcttgaaagggtcttgcaggcagagcgtgggtgactgactcctcaggtaggcctgacctgcactctgctgcagaccctcggcagcgcagcccactctggtggctggggccttcttcctatctggcgcctaaggattctcggaatgcctgctgggtaagggggctgtgggcacagtgggtcaaggcgaggctcggtgcagctcacagctcagctcacagtgaggtgaggttccactgttgctctggctttgcggggcgtggaggtactggggtctccaggagcacaaagcaggagactgccttttcgaggggaagggaaaggggggaaaagcaaacaagggctggagctgctttcctagggaaatgccatttgcatagacacccaaggcagctggaagttctggacacagttcttctaatgccagcttaacacgcacactgctggccgtctatacaatgtaaaacatctcatctgtgaaaccttattttttctttttgagtcagaatctagctctgcctcccaggttcaagctgggattacaggcgtatgtcaccacgcctggctaattttgtatttttattagaggcggggttttaccatgttggccaggctggtctcaaactcctgacctcaggtgatccgcctgtctcagcctcccaaagtgctgggattacaggcgtgagccaccgcacccggcccatccatctcccttgaatgctgaaagcaagtcgtgagcacacacttgtgcctaggcctgtgggagggcggcsctgtgggtcctgcctgccgtcagttttctctctcctgggggtcagggagacttggagctctgtcccttcttggcttagtcatgaacctctctaagcctcagtgtcctgtgtgaacaaacagctcagtgagatggtgggagggcggagtgtcctgtcagcaggcatgrggaattaaaaattaagaacacccagggcattatggtaagaaaataatgagttgaagcataaaggtaatggttagtgccaacttcctcccagcgtgccaggccctgttcaaagtacatgaaggagttccttatttcgtcttcccaatagcccagggcggggctctcagaccatgaaacccatttcacagatgaagaaattgacacactgctgctaactgccagagccgggctttgaactaggccattagatttccgtgccacagtcatcgtcattatcgtcatctacatctaaggctgtttggtaccctgtagggtaaatgtggggtacatgatggtgaatcaggtcgcagaacccttctctgccatcatgatgaaacatgtactggcatgggattcgcaatgatcatagttaggaaggcctttggtggcaaagaagaggaaactcagtgaatggtgatgaggacacatttgggttcatttttcttacacacagttggaggagacagctcagtgacaccctcaggcctggccrctctctgcctccccrctctgctcttcttggtcagccactgcagctccatctttgaaggagctgccctggctgtgtctactccctggcatccaacccctgcctccagcctctgagccctcattgaccagaactgggttacatggttgtcaccagctgcaagggatgctgggaagctgagggagaggagggccatggttggcttagatgaatgaggatgcagggccaccccgaagaaaattggggttctatcagcaaggagccaggtggaatggatatcggagaggtaaatagcatctgccagtaaagaaggctgtaagacactgtatggggtgatcccatttgtgaagaaggatgtgtgatgcgcacaagtgtttaggaaaaacactagaagaattagcgatggtctctctgggaatggggattgtgatacgtttttctcatgctgcctctctgcctttcttctcaagagaaacagcagacaccaaagaacaggtgtagccttctgttaagtggtacagaggaatcgccctgcagcctggcctctgtcccctgtgctgacagcaggtgcctgggttttctgctttgacaggttcttgagggctggtgtccgaggagaacttctaatatttatttatactctgattttgtttcacaaagaagaaaaaggctgggcgtggtggctcatgtctgtcgtcccagcactttgggaggccgaggtgggrtggatcactttgaggtcaggagttcaagaccagcctggccaacatgatgaaacccccgtctttactaaaaatacaaaataattagccaggcatagctcatgcctgtagtcccagctactcgggaggctgaggcaggagaattgcttgaacccaggaggcagaggttgcagtgagccaagattgtgccactgccctccagcctccagcaagactcagtatccaaaaacaaagaaagaaagaaarggcccttatgaatcatcttcaagttcctcccttccaagaacagagatgctaggcgacttgcccagaggcacacagccagcatgtagcagkattcatgcctgtgggagctggggttgggggatattgacggctttagyggatcaaaagagctggtgagtagggctatacaatctggggktcatcctgtgagagagccyccagactgctcagttcttaggggtccagtcatatgctgtctttttgccccagaggagaaatgtctgaagtaagacccctctccagagacatcttgatggagaccctcctgtatgagcagctcctggaacccccgaccatggaggttcttggcatgactgactctgaagaggacctggaccctatggaggacttcgattctttggaatgcatggagggcaggtaggtccccatggcctgccctaccccckgcctgatagtgacttcaggggtgggctggatgagcagacmttctrtgagcgggggagcgcctgcagatgcctcccaggcagggcctccgagaggaagatttcccggatgtgggcatggaggcttctgccctgggagcggcttcactttgctgccccaccctcccctgataccagctcacagacccctggacagccagcatgttcacagyctcaagatggacctggggcccctggctgtcaaaatggcacagtgtttgggcctcagggagctagacaggcccttagcgacctgctgaggacatcagggcctcttgaaggaggtgactctgttgccagaaaggggacccgatccagatcccaagagagggttcttagatctcaagcaagaaagaatttgggccacacgcagtggctcgcgcctgtaatcccagcacttagggaggctgaggcaggcggatcacttgaggtcaggagctcgagaccagcctggccaacatggcaaaaccctgtctctactaaaaatacaaaaagtagctgggcctggtggcacatgtctgtagtcccagctagtcgggaggctgaggcaggagaatctcttgaacccaggaggcagaggttgcagtgacccaaggttgcaaaaatgcactccagcctgggcaacagagcgagactccatctcaaaaaaagaaaacctactctataggcagagcagcggcatgggctgctcaactgaatatacttatagttatttcctgattacatgctaaacaaggggtggattattcatgagtttccgggtaaggggtgggcagttcccggaaccgagaattcctcctccttttagacaatatagggcaacttcctgacgttgccgtggcatttgtaaactgtcgtggcactggtgagtgactccaacatgctaatatagttggtgcacaatgaatagtgaggatgactggaggtcacttttgtgcccatcttggctttggtgggctttggctggcgtctttgccgaatcctgttttatcagcagggtctttgtaacctgtatcttatgctgatgtcctatctcatcctgtgacttagaattcctagcctcctgggaatgcaacccagtaggtctcagccttttgttacccagcccctaatcaagatggagtcgctctggttcaactgcctctgacggctctcattttagaaaaccagaaccgggccgggcgccgtggctcatgcctgtaatcccagcactttgggaggctgaggtgggcggatcacctgaggttgggagttcgagactagcctggccaacatggtgaaacccaacctctactaaaaatacaaatgttacccaggtatggggccgggggtggggggatgggcgctggtagtcccagctactcaggaggctgaggcaggaaaatcacttgaacccgggacgtggaggttgcagtgagccctgagattgcaccactgcactccagcctgggtaacagagtaagactccgtttcacaaaaaaagagaaagagaaaagaaagaaagaaaaaagaaagaaaaccagaacctatggaagagcctgaggaggccatgcagttcctggtcccggcttcaaagaatcactgaggcatgaagaagggatcttccttggactgacaaggaccctggaggcagcaggatttgcctggggtttcaggggccaaggtccagtaggacctgacccttgcactctgccagctgctcccagctatgtccagcacacggcagcatacccagatgtccaggcacacccggccatcccagcggcaggaaggacctgcactttttttttttttttttgagacagagtctctgtcacccaggctggagtgcagtggcatgatcttggctcactgcaacctccacctcccgggttcaagtgattttcctgcctcagcctcctgagtagctgggagtgcaggcgtgcaccagcatgcccggctttttttttttttttgagacggagtctcgctgtgtcgcccaggctggagtacagtggcatgatctctgctcaccacaagctccacctccctggtttacgccattctcctgcctcagcctcctgagtagctgggactacaggcgcctgccaccacacctggctaattttttgtattttcagtagagacagggtttcatcatgttagccaggatggtctcgatctcctgacctcgtgatctgcctgcctcggcctcccaaaaagtgctgggattacaggcgtgagccaccacacccggccaggactggcactttcattcttcccctggtacagatgaggaacgtgaaggcccaggagcagctgacctcagtagtttctaccctgagcctggaagagaatggtcaggcctgacctgggctgttgctttctgctggggaatcctgtctctgatgtggcacctcccacaggccagggaccagctccatgttccacaggattcttttctgctcaggattttttttttcagcctcaggatttttagtcattaaggattttagaactggaggcacctgtccattaatggacaaggttggaggacatgaagcctggggcagtattttcctgaggtttcccagggtaacagaaggtaggaccacagcccccaaccctgattgccagcccacacctgtacccctcccacccgcatcccctccaagtagggagtgtaggcccagggcattggcaggtcaggtgggtggggccagggcccagggccggcctcagctcagggcccctaggagtcccacttccctgggagttcccccggtgtagtcactgggatggaatgcacacaggtccctggtagaggcccagaccagcaagctgggagggtggggagtgtcttagtctttgtgtgggagtgaatgcgggtggggtgtaggatcaaggatgtggtttagtggggggcctactaggggcttcttagtccccccattyggagaggggtggygccagcagggctggtttcaggattgggaccaggacacaggtcttagagccccctcacctcccacaaaggaaggtaagctgcaacccctgtgggaagggggctcaagggggctcagccatccgggggactcagcaccaccagacctgtccattccccttggtcagcctcagccatccgggggctcagcacccccagacctgccygttccccttgtccaccatttccaccaaagcccacaggtgggcctgccccagsattctttttgaaatagcttgcacctctggggccacccacggatgggacctcatgggtatctctgaatccaagtgggagccggaggagggatacagggaggcccactcactgcctgccccaaatctgacaccatctcttatcctctgggccactcccagctgcacacaatccgttggctgggtgggtccaggtgcatgtggcctccacggcacagccacacccgactcctgtgtgtgctccctgcagtgacgcattggccctgcggctggcctgcatcggggacgagatggacgtgagcctcagggccccrcgcctggcccagctctccgaggtggccatgcacaggtagccggcctatgccctatgcctctacacctggggaggggccctgggcggtgggtggaggccctgaacacagcacagggctgggccctgaggaagctctgtgggggatgtgccttgacactctggggctatactgaaacccttggctgcttcccrcacctctcctgggagcccccagctcctggcactcgmcccctgccwcctgtccctggcattcctgggcaacaaagcagagcccagggcccttttctctctcgccgtcctcattgagcccagatggtacatttccaccgtggtcttaagagggggtgctacgtgagctcggatcctagatcctgggggctgggcctctcagcgagtctccggtgggggaatagagtgggcagtggcttgtgagggccctgtagaatgggggtttattttccacgtggccagctctggaagacagggccaaacacccggtgggctggcgggcggctggctggcggaggaagcaggaagttggaatgaatttgaccacaaacagtycataccacgcggcccctgcaggtggaggcgcccacggaaagggccccgggtggctgtggggtgggagggcacaggcccctgctccccacagctgtgatggtgtcatctaagtacaggctgcccctacctgctcctgcagtaatggctttgtccccccatcctctttgtctatagcctgggtctggctttcatctacgaccagactgaggacatcagggatgttcttagaagtttcatggacggtttcaccacacttaaggagaacataatgaggttctggagatccccgaaccccgggtcctgggtaagagccttgagatccctgaccctgacttgcgctgcggccagtgggggctgtcagagccgctccttggggcgccacagtccccaccactccgtatcatcatctgtgtcacctgtgtccacatctgcctgatcccatgggcttttgggtttgagatgcctggttctgagtgcacaaaccagtgcatggtcctgggtctccctctggtccgagagccttcacctggcaggcaggactcccgtctcctggccagggcaggggcctccctgagcagccttcctggtagcctggtcccatggtgtccactcggcaccgcccaccacaagggcagctgactgccctcacctgtgcccaccgggtgtctttgcctgtgtcccgcagactggcaggcccaggccacgctggcctctctggccacgtcctcagggccactttccccctctcctgaactccttccttctctggtcccctcgagctccttcccagtccccaccctcctgggcttccccttggcactccgctgtcacccgtctggccccattgcyggggcctgccccgagcctgactcctctgctttgctcccacaggtgtcctgcgaacaggtgctgctggcgctgctgcygctgctggcgctgctgctgccgctrctcagcgggggcctgcacctgctgctcaagtgaggccccggcggctcagggcgkggctggccccacccccatgaccactgccctggaggtggcggcctgctgctgttatctttttaactgttttctcatgatgcctttttatatttaaaccccgagatagtgctggaacactgctgaggttttatactcaggttttttgttttttttttattccagttttcgttttttctaaaagatgaattcctatggctctgcaattgtcaccggttaactgtggcctgtgcccaggaagagccattcactcctgcccctgcccacacggcaggtagcagggggagtgctggtcacacccctgtgtgatatgtgatgccctcggcaaagaatctactggaatagattccgaggagcaggagtgctcaataaaatgttggtttccagcagtctctggtcctctctggggggttggcagcaccagcacgggcttcctctcgccccagggaggcacactgtgttggtggggagggcagggcctgtgtgctcctaatcagatccttccctgcaaaaggggaccgcaaatgctgccttggtttggcccgacggtttgccttctcccttgtcccggtctgtggcctaaaatccactgttgggggttatttcctttgggctttcagttcctctttaggggatgcctgcctctccctgcacagactcctcaccacagggatgcagccgtggctccgctcacagggagaggtgtggtggggattggggagcaggacaaggggcaccaggggcaggagggccaggaccctgctttgtacctttgtaggcttggtacctgccctgggccttgcctcgtgccatttgtagaccccaccaggcctccctcccaggacatcggctctgtgtctgccctccaccccaaatgtcaaagctgggctgggccggccaccattctccagcccccaacccccctcatccccagagctgggagatgcagctgttcatacctcccaggctggctgggcagaccctgcatcctgctcactcctccctccatcctggcctccaaaccaaaggggacctccaataggctttcctgcctccttatgtcttctctccccaaggtctggccctttgcagcctttttttttttttttttttttttaattaagagacttggctttcctgtgttgcccaggttggccaccaactcctgggctcaagcagtcctcccacctcagcctcccaaatagctgggtctgcaggcacacacaccactgcacacagccctttgcagctttgaggcctgacttcacacaccgttttttttttgtttgtttttgttttttgtttttgagatggagtcggccgggctggagtgcactggcgcgatctcggctcactgcaatctctgcctcgtgggttcaagcgattctcctgacagccttccgagtagctgagactacaggcatgcaccatcacgcccagctaatgtttgtatttttattttgagatgggagttttgtgatggttgcccaggttggagtccagtggcttgatcttggatcactgcaacctccacctcctggttcaagtgattctcctgcctcagcctcctgagtagctgggatcacaggcatgtgccaccaagcctggctaattttgtatgtttagtagaggtgggtttcgccatgttggccaggctggtcttgactcctggcctcaggtgatccgcccacctcggcctcccaaagtgctggggttgcaggcctgagccaccatgcctggccaatttttgtatttttagtagagatgtagtttcaccatgttggccaggctggtcttgaactcctgacttcaggtaatccacccgcctcagcctcccaaagtgctgcaattgcatgtgtgagccaccgtgcttggctggagaccactcttgttggccagaggtgggcgggcttgtgagtgaaatgtaaaggcatcaggccaggccaggatgtgctcagcaaagacaggctgagccctgatctggacagaatgttgttccatggagaacacttttttttcacaatggagtctcgctctgtcacccaggctggagtgcagtggtgtgatctcagctcactgcaacctccgcctcccaggttcaagcgattctcctgcctcagcctctcaagtagctgggattacaggtgcgcactgccatgcccagctgatttctcttaccccttcatgggcttggatcttgccccaggccatgaggacaagggtagtgcagagagagcaagtggtaaggcctgctgtcccttactgctgtcctcctggagaggcagacccctcccttatttgggattttgttcctcagagctgaacgtggccatccttcctgcagcgctgcaagagaacctggacgtggagagcctgggtctcctgaggctgccattgcttgaagctttcagggaaggagcttcaaacatgctcagtacttaaaataatcaagttctctgtgcaatacagatttaagacatagttctttccaaagaactgtcgcactcccagggacgcgcatgcaggctgcagtgggaatcacatcgcatcggcttttgtgttttcagccagggcttcgagacatgcagggtgtctggggtcacaatgcctggaagtgctgctggtgtgtaatggcccggcaccagggcagctgcccaagagtgggacattcccatataaggaaggagggttctgcccaaaggccagctgggccctgctgagaaacaccagagaactaaaaatgtgaaaatgaggaaccctatccaggacttgacgtgtctacacaatggtaacattttaagacaatcagagagttcattcccaataatattttcccactatctctgtataatgaacaaccacccaagcagcttggaatgtctcatacttaatattgacgcaggagcttctctgaggacggggcatggagccaggggtcagctccgaggcaggtatgtgctgtgctccctctggcgccccgcagacccgcagtcccagtgggtgaccagggtgttcctccatggttccacccctaggaccagggcctcagtcgccctccctacctggcactccccacaccccgcacctcactcaaggacctttctaccagaacagagcgcactcactctctagcacacagcaggcaatacatatctcttgggtatgtccataaatgtgggcctctgtctcccagctgtcaagtgaggaggtgaacaaaactgccaaggccaactgggttctaaaacctttcagatttgtgacaaaggagccctggggggcaggctgggggtggtggaggggctcccctggcactggctgaaattgaggccacaccagcatgttctcagcactcacagagcaggacaggctgcagcagccagtcctccccttcccgctgagatggcacacctgcctatggtgcagggctggcagaggcggggccaggattccagcttccccacacaccagccctgtggcatcattcttcccaacgtccaaacgtttttccaagggggagaaatggactgggtcatgtaaagaaatactcatttttagggctttttatgtggccttcaaagcacgttgcaaacaaatccctttcactcctcagaggaggagccattaggaaggtagggggcgacaggcacagcctacagcctctcctcaggaggacagagggggtcatcgcatttgagccccctgcagtcatctcgggggctcctgagggtccaggtccacatgttcgagggtctgcagcacatccacggcgctgtaggacttccaggcctgcatgttacagctcttcaggatggctcccagctgcctgccagggcctacttcgaaagtttgggggaaccccctgccctttttcctttcgtatatggcatgcatcgtctgctcccacttcactggggagaccagctgctgggccagcagcttgtggatgtgcccgggatgcctgtatctatgcgcgtggacgttggagtagacagaaaccagaggcttcttaatgtcgactgcctttaaagcttgcgtcaggggctccacggctggctccatgaggcgggtgtggaatgcgccactaaccggcaacatcctggtgcgtctgaaatgaaacttagaggaattcttctggagaaaccgtagagcctggggaaggaaggaggtttcagctgagcaatgtcccagaaatccgcctttacagatctgaccattcacagggccaaactgggagggtgaccacaaagagacccacagctgctagatgtggacatgtgacctgtctgtcccagcaccatccccaggcaattcacttaacatcctggaatctcttctgtcccagccttcaaataagcacagttccatctacttcacaacgctgccaggaagagcaaaccctacaaggcatgcaacagtgtctggtagaggaaaacgcactatctaagaagtgttagttctcaatgagaattcttttttttttttttttgagacggtgtctcgctctgtggcccaggctggagtgcagtggcacaatcttggctcactgcaagctccgcctcccaggttcacaccattctcctgcctcagcctcccaagtagctgggactacaggcgcccgccaccacgcccggctaattttttgtattagctgatctccagacctcgtgatccaccctcttcggcctcccaaagtgctgggattacaggcatgagccgccgcacccggatctcaatgagaattctatcactcctttcataatttttgaccagtctgtttgctttttattccataatcttcaaaataaaaattcagaactaaaattcaagccccatttcacaatgcagggtctaggatattgtcactttcatctgaggtttctctggagaaggaaagagctctcctcttgatgccaaaaacctcccctgaaggcatttgagctcagaaggggcctcgggcgagccaatagctccaaaacccttgcaacagtgagcaagcaacagaacttgcaaaggtctttattattttttgagatgaagtcttgttctgtcacccaggctggagtgcaaaggtgcgatcttggctcactgcaacctccacctcgcaggttcaagcaatgctcctgcctcagcctcccgagtagctgggactataagcatgtaccaccacgcctggctaagttttagtagagatggggtttcaccatgttggtcaggctggtcttgaactcctggcctcaagtcatccacctgctttagtctgtcagtgttccctagagactgttcctgtagcctgagtcctgggctgaaaagcagaacccagcctggcgagcacagaccaggagtgggaccggtgcttgtgtgctgtgaccactgaggtgtgggctacttgtcactgcaacaaaacctggcctgtactgactcacccgtgcttcccctccaccatcaccctccatgtggctccatcccactgaggctggaccgcaggaaccaggagcctctttggtctgggccttccagactctggagcccaagcccctccctccacacctagattgtctgagtgactggcaggtatggggatggctactcagtagcacttcctggagcatctgtggtctcaaagtgctttccgtgtaaggtctctggactctggctcaacagctgagccctctcaagtcccaggctagggccacagggctcaaggtcaccatcacaggggccagcagtctcctctccaatggccagtccttggcccaggcattgggcgagcagggcccaggagccttttcacatcagttgttggaaaggggcttcccccctgagggggtacccctgccctcacctgagctctttgctgtggcactaccaagaataccaaagggaagctgggcacagtggctcacacctataatcccagcactttgggaggccgaggtgggcagatcacctgaggtcaggggttcaagaccagcctgaccaacatggtaaaaccccgtctctaataaaaatacaaaaaattagctgggtgtggtggcatgcacctgtagtcccagctacttgggaggctaaggcaggagaatcacttgaacccaggaggtggaggttgcagtgagccaagatcgtgccactgcactccagcctggatgacagagtaagacattgtctcaaaaaaaaaaaaaaaaaaaaaaaaaatcaaaaggatgaacctaggagttgtcacctagactgggtgcacctgtctgggagcctactggggagactcctgccctgactgggaagtccttcctgagccacttctgggcttccttccaaggctggtaaagggaacgcctaactagctccaagactgacctggggccaccatacctgacctgcccaccatctcagaac

SEQ ID NO: 96428 - DNA, 13358 bp, Homo sapiens
caaaactaacataaatcacctctgacataaccctgatggctcatcacctacccctcttctctccccccatctcctgataacaatcattatcagagatgcggctctgtcaagcttgacaggtgtaaggacaagggtgcttgtccttggcttttgagatcttggaaccctgagaagaggttaggcctcccccacctgcccgcctcccacacactcttcccaggacacactgccacctcatctcccggggaagcccctcctgccctctgcactctgagctcccctgcacttgcttctgctgctcctgacaaatcctcaaaatcctacgagcagctcaaactgcacccgtctgtgagttcacagttctgtccatcagaagggcagcacgggctctctgctcacaaggtggacatcagcgtatggactgggctgagttcttgtctggaagctctctaattctagcagaatctagttcatttcagctgtggaacctatggtgcggcttccttgctcttagctttcagaggccacccacattcctagccaatggcctcttccgtcttgaagccagcagtggcatgtcaaatccttctcatgctttgaatctcactgccacttctgcgtccagctggtgaaaactctgttattaaaagattgttgtgattaggtccggcccactgcatagtctccctattttacagtcagtgctcctgtataagtaacctaatctcaggatacagtccatcctgcgggccaggtgcagtggctcaaacctgtaatcccagcacattaggaggctgtgctggaagaatggattgaagccaggagtctgagatcagcctgagtaacatagcgagagctgtgatctcgccaccgcactccagcctgggtgacagagatgaacgaagcgaaggaaggggaaggaagggaagggaaggaaggaagggaaggaagggaagggaggggagggaaagagaagtaaagggaaggaagggaagggaggggaggggaagggaaggaagggaggggaggggaaggaggggaagctaagggaaggaagggaagggaggggaggggaagggaaggaaggggaaggaagggaaggaaggaagggaaggaagggaaagaaggagggagagagggagggaagggaggaaaaatccagcccgtgcacagtcccagggattacgcagggcacacacaccaaggggtgggaaatgtggggtgccctcctagaattttgcccactacatccctgagcttggtactggctcacctctgcctctctctgcagaggacatcctgggcgttcaggccgcgcggccctgggagttttaccccagcagctcctgccgctcggtgctcttccccctgctgatctctggttccaccttctggctgctcaggctctgggaggagctggggccgtggcctggcctggtgagcggctatgcgctgctggtggggcctcgactcctcctcactgccctttcctttgctctggacggggccgtgtaccacctggccccgccgatgggggcggatcgctggaacgccctggccctgctgtctggttcctacgtcaccctggtcttctacacaaggaccttctccaacaccattgagggactcctcttcacgtggctgctggtgctggtatcctcccatgtaacgtggggccctacacgcaaggagccggcgccgggtccacggtggcgcagctggcttcttggaggcattgtggctgctggcttcttcaaccggcccacctttctggcctttgctgtggtccccctctacctctggggcactcgtggagccacaaaccctggtttgaagtctctgacccgggaggccctggtgctgctccctggggcgaccctcacagcagcggtgtttgtggccacggacagctggtatttctccagccccgctacatccaggaaccttgtcctgacacctgtcaacttcttgcactacaacctgaatccccaaaacctggcgagacatggcacgcacgcgcggctcactcacctggcagtcaacggcttcctgctcttcggggtgctgcatgcccaggccctgcaggctgcgtggcaacggctgcaagtcggcctccaggcctctgcacaaatgggcctcctgagggcactgggtgcccggagcctgctgtccagccccaggtcctatctccttctcctctacttcatgcctctggccctgctatctgcctttagccaccaggaggctcggttcctgattcccctcctggtccccctggtcctgctttgtagtccacagacgcagcctgtgccttggaagggcactgtggtcctcttcaacgccctcggtgccctcctcttcggctgcctgcatcaggggggcctggtgcctggcctggagtacctggagcaggtggtccatgcccctgtgctcccaagcacacccacccactacacactcctcttcactcacacctacatgcccccccggcacctcctacacctcccaggcctgggggcaccagtggaggtggtggacatgggggggactgaggactgggccctgtgccaaaccctgaaaagcttcaccagacaaccagcctgccaagtggctggtgggccatggctctgccgcctctttgtggtaacccctggcaccaccaggcgtgccgtggagaagtgcagcttccccttcaagaatgaaacacttttatttccccatctgaccctggaggatccaccagccctgtcctccttgctgagtggggcttggagggaccacctcagtcttcacattgtggagctgggggaagaaacctgacaatatgacagagcacccactgcccaagactcagccatagaagatgccgccccaccttctacttgggtagctgggctgggacgctgggacaggaccccgtcctccttcatgactcccactgctgcctctcctgggcatggctgttagctgttctgccttctgggtgagctggcactcttctccctgagaccaaagatttgacctgtcggtcttgatgtcaaggtccccaaagaccaggttaagtgacgacacctgtctgttcctgccctgttgcttccagccactgtgatgtttgaaatatgtgatagtacctggttgtgaaaaaagacaatgaactgctagtgacattcctcaatgacctctcccaaacctcccatgatgccttacccttgctgtcatgacaaccctctggcttcctaagacccatctgcctatcgaaatatgtgcaagtcagtgagacgaagtatagagaacaggtggcccagatccaggggacccaacttctggccccttggtctgtcacctcctcgctgtgtgatcttgagaaagctccttccactcacccaccccacttcccagtctgttgggatcagaggaactttgaggtgtctgccggctaacattgtgtcattcctggagtccacagtacacgtcccctgcctcaacaggcacagctctcacaaagctcttcaagcatggaagtgggagttgtgttgtacttcatggcactctgatgcctgctgtctcagtgtttggttattatgcaaacaagtaatgtttgaaatatataatagcactggagattttctccctactttcttttactcctgttcctgagaggtggtgggaaactctccagccatttctgcaccttgtccttaagagtcattctcctggctgggcatggtggctcacacctgtaatctcagtactgagaggccaaggtaggcagatctcgaggtcaggagttcaaaaccagcctggccaacatggtgaaaccccatctctactaaaaatataaaaattagccaggcgtggtggcacgcacctgtaatcccagctactcaggaggctgaggcaggagaattgcttgaacccaggaggcagaggttgcagtgaaccgagagccactgcattccagcctgggagacagagcaagactccgtcttgggggaaaaaaaaaaaaagggggtcattttcccagattagggagccaggtgttcttcctccttagaactgtgggtctcaagccctcccatcctgccccagagggcagagaacacacaacactcagctagtgtctggttaccagcctcaatttttccgatggcttcaagctttctagattgcatgattaactgtgctgcctaactagaaatgatcagagctgggtgtggtggctcacaccagtaatcccagcactttgggaggcggaagcaggagaactgcttgaggccaggagttcaagaccagcctgggcaacaaagtgcaatgccatttcaaccaaaaacaaaacaaaacaaaattgtggctgggcgcggtggctcacacctgtaaccccagcactttgggaggccgaggtgggcagatcacaaggtcaggagatcgagaccatcctggccaacgtggtgaaactccgtttctactaaaatacaaaaaattagccaggcatggtggcacgcacctgtagtcccagctgctcaggaggatgaggcaggggaatcacttgaacccgggatgcagaggttgtggtgagccgagatcatgccactgcactccagcctggtgacagagtaaggctccgtctcaaaaaacaaaaaaaaacagaaaaaaagtttttaattagctgggcatagtgtcatgggcccgtaatcccagctacttgggagtcccagggaggaagatcgcttggcccaacgggtcgaggttgcagtgacagctagtattgtgccactgcactccagcctgggcaagagttaggtcctgtctcaaaaaaaaaatcagaaatttagctaggagcttcaaatgacaggacatttctatatacaatggatttcctaatcgcaggtctgctaactggctggatcgtagtctgtctgtatccctgaccctctaaaatgaggggtagtgaaggggtgggttgcccctccacacctgtgggtgtttctcgttaggtggaaggagagacttggaaaagaaagagacacaaagtatagagaaagaaaaaagggagcccagggggccggcattcagcagacgaggatcccgccggcctctgagttcccttagtatttattcatcattcttgggtgtttctcggagagggggatgtgtcagggtcataagataatagtggagagaaggtcagcagataaacacgtgaacaaaggtctctgtgtcatagacaaggtaaagaactaagtgctgtgctttagatatgcatacacataaacatctcaatgccttacagagcagtattgctgcccccatgtcccacctccagccctaaggcggttttcccctaactcagtagatggaacatacaatcgggttttacaccattgcccagggacgggcaggagacagatgccttcctcttgtttcaacggcaaagaggcgttccttcttctttcactaatccttctcagcacagaccctttacgggtgtcacgctgtgagggacggtcaggtctttcccttcccacgaggccatatttcagactatcacatggggagaaaccttggacaatacctggctttcctaggcagaggtccctgtgggcttccgcagtgtttgtgtccctcggtacttgagattagggagtggtgatgactcttaacgagcatgctgccttcaagcatctgtttaacaaagcacatcttgcaccgcccttaatccatttaaccctgagtggacacagcacatgtttcagagagcagggggttgggggtggggttacagattaacagcatctcaaggcagaagaatttttctcagtacagaacaaaatggagtctcctatgtctacttctttctacacagacacagtaacaatctgatctctcttttccccacaggataggagtccaggtaacttgttccatggcaggcagtagtcttttttttttttttttttttttttgagaaaggttctcgctatgctacccaggctggtctcatytcaggctcatgcgatcctcctgcctctgcagtggctgggataagacacaactgccaccaggccctgcccctaggcagtagtcttaatgcctgatggtggggggttggggaaggaaggggttgagtatcagggtaaatgctgcagagctgtgttaaggacttaggccctggagtcaaatgcctctgctcacatcccactctgcaagactttgggcaacttaagcagcagcctctgtttccatcgcagtggctcttgcctataatcccagcactttgggaggctgaggcgggaggatcacttgcgcccaagagttcgagaccaccccatctctacaaaaaaatccaaaaagtaatctgcttcctcatgtgaatgtcgttgtaaggagtgagataacacatagagtgcaatgagcaagtcccagcacagaagactcatttcataaaatacgtgtttattattaccataggcctacagtccccggtattcttaacacatcttgcctgagaagtatcacactcatgcctatcaaccagctcacacatttaatcaaaggaatttggcagctgtagggttgtcttttcatccatatcgtccctggaattaactgtcctgctataccagtcagattgagcagcatctgtcaagagtttcagtcccacttgcagaggaaaggctctctggcttcggtccgtggctctccgtaggtgccgtgtctggacccagcctaccttcatctctgttaggcttaggggtctktctccacactgtgtcttgtccaatcacaagacttcaacggagcgggcggtctggcctaggctcttatgcgtgggatgtctgcaggccaacaatcccagtcgggattcgaagccgcgcgcagtgcccggaatgacccctccayattgatgccactgtagagcccggaaggaaaagcaagcrgcctcggccccgcacagcccaggattaaatgtttgcgccagggcccctctggctacctggtggtggccccgagcggcctcggaggccgcggcgtagctcctgggtgaaggcgtcyctaaatcgctcagcgcggcggcacagggagcccacgggcccagccgcgaggtcctgcaggcggcgggccgcgtcctggccccgcagctgggcctgcagcagtgcgaaggccgtgagctgcgccgcacgtcggataggccgcgactctgacagacgttccaccagctgcgggctgtgcagcagggcggccagcagccgccgcagcaccatcttctccaagcgcccggaacccgacctcgccgccctcgtcttcmgccccgcggcgcccgacccggacgtctatgcccccgcgcagcttgatgacgacactgccgccctcggattgggtccaatgagatgctcgcctccgcgcgtttccgcttccgccatcgcggacgcagcctcgtgccgggagtcgccgcattgtggtccgcttctctgcactatgtcgggtggcctcctgaaggcgctgcgcagcgactcctacgtggagctgagccagtaccgggaccagcacttccgggtgagggaggccgggccgcgagacgggaaggccctgggcaagaacgctgagaaacggtttgctcttgtctcattgtgtcgcctcccattcagctgaaatccgcaaacgccaagtggggccccggtgcctgctggcgaggcagggaatgggtgctggaagggcgcttggatatcactgaagccacttgctctggaagacggggaactggaggctcgcttatcccattcgctcgcagccgctccctgtaccccagccagtgccgagaggtttgagcggtggtggtggtggcggctcccgtttccacggttgtgcctccgcagacgactacgtagcaagggggaggggtgcccttctctctcccagagtaggcagaggcgccttcctgatgcagatgcggggctttttgctttgttttttaaatcggcgaagcagtgcccttcggcgattcgggccccttctctgggaggatggtgttacggaagctgtacgcggtgcgtgggagacacaagtggagtcctcactccgccctcggggaagcttcggagtggggaggtggacccgccaagctcggcactttgagggtgttcggatgtaaagatcggagaattgctggatttcagaagagggaaatttttagtccggactatatcacagtatattttgtggaaaaaggggaggcagcagatattcaaagtagacttttcagtatcagcggaggtagggatggaatacggttgggggttggcggggcgggactcattaacccaattatttagtaaacgtttatcgagtgctgtcgccaaatccttgtgctaaaccctagagggagagggaagacagtttctgcgctctgcgagctcataatcccctgtagtgaggattcagaaaagggaaaaatccccttgtgactgggaaaggaaggggcgcatatagcagaaggtaagtgtggagaatgtgtgaaatgtgttactagagtagggaaagggaaattttgtttgacgctaaattagggaagctcttacatttatttagtcaaggctgggaacggtggctcacgcctgtaatcccagcactttgggaggctgaggcgggtggatcacgaggttaggagttcaagactagcctggccaagatggtgaaaccccgtcttactaaaaatacaaaaattaggcgggcgtggtggcaggcgcttgtaatcccagctattcgggaggctgaggcaggagaatcgcttgaaccggggaggtggaggttgctgtgagatcgcgccactgcactccagcctgggcaacagagcgatattccttctcaaaaaaaaaaaatttattcagttaatgtattttattttttgagacagagtctcgctttattgcctaggctgaagtgcagtggcgcaatcacggctcacgcagcctcaacctcctgagcctaagtgatcctacccacctcagcctcctgagaagctgggaccacaggctcgcgccaccacatccagctaattttttgtagagacagggtctccctgtgttgctcaggccagtctcgaactctgggactcaagcgatccacctgcctggggcttcccaaagtgctgggatgcctaagtgccaggcatgatttgcacttctaccacttttagttactactttagacagttccacatcctgaccattttgaacttaaagcatcctgtgagatgaaaactggaaccttctgactttgtctattattcatctcctcagtctaaacctgtagctttttttagatgctaatgccatactgtcatgtggaatttctagcattctgtgaatggaatccatattaatatactttaagcacttacaccacagttatcttaaactgtaggctatttatttggatcttacttacatgtgtgagaaaagtagaaaaagaagatgcctcctttccatgttcacaaatcagtaacagcagtaaaatgaaaggaatttactttctctaatgtctcactccaaagttccgaaaacctctttttaacatacaatgactattgtcctgtggacttttttttttttgagatagagtttcactcttgttgtccaggctcaagtgcagtggtgcaatctcagctccctgcaacctccacctcccaggttcaagcgattctcctgcttcagcctcccgagtagctgggattacaggcgcccgctgctaccatgcccagctaatttttgtatttttagtagagacagggtttcattcactatgttagccaggctggtctcaaactcttgacctcaggcgatccactcgcctcagcctcccaaagtgctgggattacaggcatgagccaccgcgcctgaccccgatgagccattttggacccagggctttgtctgtcaggtgtgttggatgaagcccagttatatgcttaagtctctggcttcatcctgtcatcccaatttggaagcccattaagaaagtgagctctgttttgtttttagtgatcactacattttcccctaaactcagagaaagatctatgagcacgtaaagcatcaaggttgtggctttcaacagtctctagggggttattaaagaggaactctctctctctctgaaaacccacttatttttcactacgaaggataaaagggccctttgtcatatattgggtcaaggtccagagtctacacttgggtttaaaggatgcactgctgaggatatggtgtgtgcagggaaaagggaagccgcttgcgtggcagtcgggcgtagaagtgactttgttgtatgtggtataacttttgagccctgtctctactaagagtctggacttcgcataagtgcttcacagaaggtcgacatccccctttttgggcaagggatttctggtaggctgggatgagagaagttgatttccaaaccagaattaatgaatgtctctaccgtacttagaaatactatttaagcaaggctctgaagttgcttaacttttgtctctatttgaaattctagggtgacaatgaagaacaagaaaaattactgaagaaaagctgtacgttatatgttggaaatctttctttttacacaactgaagaacaaatctatgaactcttcagcaaaagtggtgacataaagaaaatcattatgggtctggataaaatgaagaaaacagcatgtggattctgttttgtggagtatccttcccatggatctaatgtagctgctgaaccagggtagagctgagagtggtagctcacaagcgtccctgcactcgtccctacgttttccttcatctccctcctactttccacccagtgtgtctctgcccttatactgtaaagctgatactatttatattctcttctgaaatccatgctttatggttctttaacaaaaagtttttcaagaatgtttgcccttcacgtaaaaaaaaaaattccaaagaatgtggtgaaaatacaaaaatctcgtactgttctaaacccctaatgccctttgccagaggcagtcagttagcagtttcttgggcgtctttcaagaagtaaccctgtgggtgtgcggtagtgtatttcatgtgctgtttttaaaatcatttttttattttttattgttccatttcagcatatgtaggtctttttttaaaatagctgtacagctggccatggtggctggtgtttgtagtgccagctgctcaggaagctgaggcaggaggatcagttgagcccaagatttcaaggctgcactgagttgtgactgtgttccagcgggggtgacgggttaagaccccatctttaaagaaaaaaacttttaagtaaatagctgtatagtatttcattatatagatgtatataacctgactgtataggtacaaaccaaaactatttactttgatcatttaattcccttactcagactcttttaagtattggacctcttggatttatcctatgttctttttactgtatgttttggtcattcaatttaatattctgagaaattttgcaggcccaatttaatgtatcttttgaattttttcctgtgccctgaattatgtttgtttcggttgaaatttttccttaagtgtctggtgatccctggatttctgctcataattaaggaaaagaatgctgactcactggacccaggcagggcttctctcccagattgcaggcttgcctcggggatacacgggtttcccaaatgctagaatgaaaagagattttattttggcttgctaacatcaaagatactagtttctccagatggtttattcagaacactgttgtcttatttttatttgtctgagattaaatgtcttcccctttaattaaagggaggtctctgatgaagtaggtttgggaactgctaccttggtgacagcttgagtctttcctttagtgaagtgcagcacaattccacgtgcacggtgaccttctcttgattagggtgccttggaatgtacagaacctaacttgaatatacagcactggtttcttggataagaagtgtacagtgatctaaacttgcaaaccaaaatacagagatgatgggaccaaaaattatcaacaggaatgtccaagaaatatgatcagtgtagccatggatacgtgtcatatttgactctatgtgcttccaaaccaatcgcaaacaggcctgggcaagctgaattactgtctttgaactccatctggttggattagctcttgtactttttaacaactcagcttcatttacatgttgttcccctatttccagaaatgtttggaaaaatgctagtgttccttaatacttaagatattactcacgcgcagatgcggaaaacgccatgcggtacataaatgggacgcgtctggatgaccgaatcattcgcacagactgggacgcaggctttaaggagggcaggcaatacggccgtgggcgatctgggggccaggtatgcaagaagggtctctgggctcagccattgcctgggattccagtcacaatgacaggtgttttggcaatttgtatttactcttttgtaaataactttgtgtctataaccttggcttgaagtggatctgaaaaccacccaacggtttgggtgaattttttttttaaaccgtgaaatggtatgttctgtacgtttctaacaagcaaccattcttgaacttctgctagggctaggtatcttccacctgcaggaacatctaaaatgaaagcaaaacgcactgaagtgagctgaagtgcatatgtcctgcttgaaatgttcacattgtggcatctgaacaggtttcactgtttgtctaacatgtttgtgggaggcatatttgttacaccattcttttccatactgtaactctggattctttccattaaaggttcgggatgagtatcggcaggactacgatgctgggagaggaggctatggaaaactggcacagaaccagtgagtggtgagagctctgtcagtgacaaacactcctttggcctgttgaatttgctgaagaacatcacctaaagtctgcacacgagcccatttttaccaagatttgatcagtgtctttactgagctggaagcctctgaaagttattaaaggacagaatccaaaagaatgcctttaattcttgtctgagaatcttggccatgtgtcagattatcagaacaattttgttaccaggtcagaaattgtgttctttgacaacagattggatctgtaatgttgattagtctttagccataaccactacacttttagaaagacagaaaaatgtaagaatttgtttttaccataatgagtcttaagtaggttcatgatctacattggggcctgggattattt

SEQ ID NO: 96429 - DNA, 18957 bp, Homo sapiens
  misc_feature (1)...(18957): n = A,T,C or G
ggggaagccttgacccagacttgggaggagtagggagcttcacaggacaggtgacatcttagctgagacttgaagggccgggagcagtgagtcaggccgagaagtagcaaagaagactgttctgcacagaggaacacaggtgtgaaggctggaggacgggaggaaggaggctggactgccctggggtggggagcgccatggctggaggggcgggtggctcagtgcccgccgcccccaggattcaaggctggctggaggctacgagaatgtgcccaccgtggacatccacatgaagcaggtggggtacgaggaccagtggctgcagctgctgcggacgtatgtgggccccatgaccgagagcctgtttcccggttaccacaccaaggtgcgctgcccacctgccagctgcctccccaccttccccaccccagtcccggacaggaagtctccacgcagacccctttcggccccggcagcatttgggctccatgcattttagttcccaggggaatgagacgctgcaggaggcaccccaggggagggagggcgccaggctgagacccaaggtgaggcttggccctaatttaatgccagtgagcagcgagagcctcctacgcaggggtcccgccgcccctcccctcccctccctggacagggaccgtcatctccctgaagacaccctgcgatggccgggcgtggtggctcacacatgtaatcccagcactttgcgaggctgaggtgggtggatcacctgaggtcaggagttcaagaccagcctggccaagatggtgaaacctcgtctctactaaaaatacaaaaattagccgggtgtggtggcaggtgcctataatcccagctactcgggaggctgaggcatgagaattgcttgaaaccgggaggcagaggttgcagtgagccaagatcgagccaagatcgcaccactgcactccagcctgagtgacagagcgagactatctcaaaagaataataataatacaaaataaaagaccccctgcgcccgcagctgtccctgcagcctcttccctcctctcccccaggcgcgggcggtgatgaactttgtggttcgctaccggccagacgagcagccgtctctgcggccacaccacgactcatccaccttcaccctcaacgttgccctcaaccacaagggcctggactatgaggtgcgccccagtcacactacccacccacgcttcacctcaggaccctcgggtccccacctagagcccctgcgtgcatcccccagctcccctccctgcccatttcccagtgactttgtgggtatcagctcctggatcgcttctgggcaggcggcctctgcttcctcctggatcttcctgtctgcaggcaccccagcctccggtgtctgccatatctgccatctcccttgtcaccccggtctgctgcaccgtgccccccggtctggccgccctgccccgtgtatctgcctgctccccaggccccacgtctgctcactccatgtttcctttcccttctctttccagggaggtggctgccgcttcctgcgctacgactgtgtgatctcctccccgaggaagggctgggcactcctgcaccccggccgcctcacccactaccacgaggggctgccaacgacctggggcacacgctacatcatggtgtcctttgtcgacccctgacactcaaccactctgccaaacctgccctgccattgtgcctttttagggggcctggcccccgtcctgggagttgggggatgggtctctctgtctccccacttcctgagttcatgttccgcgtgcctgaactgaatatgtcaccttgctcccaagacacggccctctcaggaagctcccggagtccccgcctctctcctccgcccacaggggttcgtgggcacagggcttctggggactccccgcgtgataaattattaatgttccgcagtctcactctgaataaaggacagtttgtaagtcttgagtccattggtctgcccattaaccccatctcccctcctgccagcagcgtagaggggagagacccagaaaagcgaagacaagaggaaaagggagaggcagaatgttagaccctcgtgggaacctgggagcttccctggctcccactttccccttcccctgtattgcctgagctggagacagtgtgtgagaggggccgggcgcggtggctcacgcctgtaatcccaacactttgggaggccaaggggggcggatcacgaggtcaggagatccagaccatcctggctaacatggtgaaaccccgtctctactaaaaatacaaaaaattatccaggcgtggtggcgggcatctgtagtcccagctaatcaggaggctgaggcaggagaatgacatgaacccgggaggcagagcttgcagtgagctgagattgtgccccggcactccagcctgggccacagagtgagactccatctcaaaaaaaaaaaaagtgcatgagagggcacagaccaaaagagggacttcccaggctgggcacagtggctcacacctataatcccagtactttcagaggccaaggcaggcggaggatcactggaggccaggagttcaagaccagcctggacaacatagcgagaccccccccatctctacaaaaaataaattagctgggcgcgatggctcacgcctgtaattccagcactttgggaggctgaggtggatggatcacctgaagttgggagtttgagaccaccctggccaacatggtgaaaccctgtctctacttaaaaaatacataattaagctgggcacggtggcccatgcctgtaatcccagcactttgggaggctgaggcggacagatcacgaggtgaggagttcaagaccagccaggccaaaatggtgaaaccgcatctctactaaaaaatacaaaaattagctgggcatggtggcgggcgcctgtaatcccggctacttgggaggctgaggcaggataattgcttgaacctgggagggggaggttgcagtgagctgagatcgcgccatcacactccagcctgggcagcaagaatgaaactccaactcaaaaaaataaataagccgggctcagtggctcacgcctgtaatcctagcactttgggaggccgaggcaggcaggcagatcacttgaggtcaggagtttgagaccagcctggccaacatggtgaaaccctgtctctactaaaaatacaaaaattagccaggtgtggtggcacaggcctgtaatcccagctactcaggaggctgaggcaggagaattgcttgaacctaggagacggaggctgcagtgagccaagatcgtgccacggtactccagcctgggtgacagagcaagacttcgtctcaaaacaaaaaaacaaaacaaaaaaagctttccacgctacccacagagggctccatccggcgttgttctggattcctgttgtaacttaaagagaaactttcacaacatccggagcccttgatgtcctgcaaatgaaggaggaagatgtccttaatttccttgcagcaggaaaccaattaggtggcaccaaccttgacttacagatggaacagtacatgtataaaaggaaaagtgatggcatctacatcccaaatctgaagaggacctgggagaagcttctgctggcagctcgtggcattgttgccattgaaaaccccgctgatgtcagtgtcataccctccagaaatactggccagagggccgtgctgaagtttgctgctgccactggagccactccaatcgctggccgcttcactcctggaaccttcactaaccagatccaggcagccttccgggagccacggcttcttgtgtttactgaccccagggctgatcagcagcctctcacagaggcatcttatgttaacctacctaccttgctctgtgtctcacagattctcctctgcgccatgtggacattgccatcccaagcaacaacaagggagctcactcagtgggtctgatgtggtggatgctggctcgggaagttctgcgcatgcgtggcaccatttcctgtgaacacccgtgggaggtcatgcctgatctctacttctacagagatcatgaagacattgaaaaagaagagcaggctgctgctgaaaaggctgtgacaaggaggaatttcagggtgaatggactgctccggctcctgagttcactgctactcaacctgaggttgcagactggtctgaaggcgtgcaggtgccctctgtgctatctagcagttccctactgaagactggagcattcagcctgccacagaagactggtctgcagctcccaccactcaggccactggatgggtaggagcaacaactgaatggtcttaaacacctgtactgtgagctccccctgccccatcttccagcccaggtgcacctggcagcctggctcttgcattcctcggctgggcttggatgctggcggtcctctacctggtctggctctattgggatagaaacatacccagggctggagcccgcagatctgcctgggtttgcaactgggcagtttgagacatttctgtgactacttccccctctcagtgaggacctgggctgtggggtgctgggtgcggttggggcttcagaatagactcttgggaccaccatctcccaaagtgcaatctcaccgttggggtggggtgcgcccgtctgctccccagctagttaaaactgcaaagttgggcacctcctggaactacctctttgacttccaccctcacagggtcctggtcgtgggagccttcgccaacttctgcacagagcccacgggctgctcctgcctcttccccaaactcccgccacacctgctcatgctgccttgttggttccatctcctcttcttccaggactacatcatgtcaggtggtgagaagaggaggaccttgctgctgtctcccgccccaccatcctcttcccaggggacactggggcccagctctcctttccccatgtcctctccactcttctttccaagtcccaggctttggctgggtgcggtggttcacacctgtaatcccagcacttgggaggcgcaggcgagaggatcgcttaaggccaggagttcaagaccagcctgggcaacacagtgaaaccccatctctacacaagaaaaaacaaaaacaaaaatttagccaggtgtggtggtacacacctgtggtcccagctactgggaggcttgaggtgggagggtcacttgagccctgaaggtcaaggatgcagtgaaccaagatcaggccactgtactccagcctgggcaacagagcaagactccgtccctaaataaataagtaaataagacccaggcgttgggtcccccagcttctgccctccccccaggtttggtctcctttgtcaaggccccgctgcctcagtggtggccaggtggctgtcctggcgtgggagggcccctgcaggcgctggaggcaaaacccggacaactgagcttgccgattcggaatcagaagagattggttaagtcagctctggaactcgggtgaggacccgagcgtgacccggtggggacgccccagggctgccgggccggggaggaggagagtggcgccacccgcggaccccggggccaggagtcagccgcgccatgctctcctgcggcctccctagtgcctgtcttctccagggagaatgagctcttccagcagttcccgaacccgcagagctcgtgggtgcagaggacgcaggaggctctgcgtccgctgctaagcgtggccctgcagctgttcctgggccgccggggcctcccgctgcccttccgcgcgcccatccgcaccgtaggtgagccccggcctccgccccgcgatcctggcccagggcccgctccctccccgtcccgggttggggcctcgccacccagactggcctttggccaccgcgccagccctgaactctgttcccgcctatccccaaggaggaaaagaggaggagaaccggggatcccagcccagatcgcctcccgtcccgcccgcagtggggtcggcgattcccgtgcagcagagccccccgcccagtccggcccaggtggacacgctgcaagcgcgctacgtggggcgactcacgcagctcttcgaggagcaccaggcgcgctatggtgtccccgccgacagacacctggtcctcacggaggcgcgccccaccgcctggcctcgcctgtccgctgggtgactgcaggtggggaagtgaaattaaagactggcggcagggcacggtggctcacgcctgtgattccagcactttgggaggccgaggcgggtggatcacttgaggtcaggagttcgagaccagcctggccatcatggtgaaaccccatctctattaaaaatccaaaaaaaaaaaaaaaaaaattagccagacgtggtggcgcgcctgtaatcctagctactcgggaggctgaggcaggagaatcgtttgaacccgggaggcggaggttgcagtgagccgagatcgtgccactgctctccagcctgggtgacygagacgtgtgaaaaaaaaagaaaaaaaagaaaagaaaagaaaaagaaaaaaattaaagtgggaaacagacctgcagcctgtgtgtgtttgtgcatggcgggggaggtccaggcaggggtggtgaccttgacattcctggagatgccccggaccaggccctgcccccaccccgactggaggtcaaatagtctcagcagggcttctggccccttccagcacctgggacccagtgggtggggctagccagatcactcttgtccactccaacatcaattcctgaggcactcgggtgtcacctctcccttgcacaccccttacgcctcccagccccacccagcagccagcccagactggtgactgacaggaagttcaaagatcaggctgagaaaaaacccagagacatctggggctctggatccaaagatctccccactcacacacctacggacacacgctactctgggaggtgatttgcgacttagccaggcccccaaagctgggctcctgtagggagaaagtctgcccaggtccacatccaagccttcatcgtttgtcctccgggttctgggatcctgctggaagaggggagcttctgcaatgggagttgccacaaccctgcagcccccaaccacttccaaaaccttgcagaagcagcatctagaagcagtgggcgcctaccaatatgtgctcactttcctcttcatgggtgagagctggggagrcgtgggtgcctggggtctgccaggggagtagggcttggagggagagtggctgggctgctggcttgcatgcctgaggacagtgaccaggtgactggtctgggagagggccagaggagagagctggttgttctgaaggggaggaagggaagggagcagctggagggaatgatggagtttcagaagtgaactcttttctttctctcccttcccccaggccctttcttctcccttcttgtctttgtcctcctcttcacgtcactctggcccttctctgttttttacttggtgtggctctatgtggactgggacacacccaaccaaggtgagctccggatgggggcccaggtagccagagatggtggggacatggggggtgaggggaggtgactccgggggttcgtccaccagtatctcattgtccgcaggtggaaggcgttcggagtggataaggaaccgggcaatttggagacaactaagggattattatcctgtcaaggtgatgggtcaccctgcagaaaaactgcttcctacctctccccatctccctcccacacctaggagcccttccttgtgctggggcctgagctccccgctgcctaagctcaggcagtgggacagggaatggatttttttttttttttagactgagtctcctgtcaccgaggctggagtgcagtggtgcaatctcagctcattgcaacctccgcctcctaggttcaagctattctcatgcctcagcctccctagtagctgggattataggtgcccgccaccatgcctggctaatttttgtagtttagtagagacagggtttcaacatgttggccaggctggtctcaaactcctggcctcaagtgatccagccacctcggcctcccaaagtgctgggattacagccttgagccaccgcgcccggcctgggagtggatgatgttcaagagcggggccttggtggggcaccatggctcatgcctgtaatccaagcactttgggaggccgaggtgggaggattgcttgagcccaggagttggaggctgtagtgagccatgattgcgccactgtactccagcctgagcaacagagtgagaccgtctctaaaaaaaaaaaaaaaaaaggcggttgtggtggctcaagcctttaatcccagcactttgggaggctgaggtgggtggatcacctaaggtcaggagttcgagaccagcctgaccaacatggagaaaccccatctctactaaaaataccaaacaaattagccggacatggtggcacatgcctgtaatcccagctactctggaggctgaggcaggagaattgcttgaaccagggaggcggaggttgtggtgagctgagatgatgccattgcactccagcctaggcaacaggagcaaaactctgcctcaaaaaaagaaaagaaaaaaagagagagtgggtgaggtggcttacgcctgtaatcccagcactgtgggaggccaaggcaggcagatcacgaggtcaggagttcaagaccaacctggccaatatggtgaaactgcgtctctactaaaaatacaaaaattagctgggcatagtttcgcatgcctgtaatcccagctactcgggaggctgaggcaggaggatagcttgaaccgggaccaagaggcggaggttgcagtgagccgagatcgtgccactgcacttcagcctgggctacagagcaagactccatctcaaaaaaaaaaaaaaaaaaacctgggcccttaaccctatcctaagaacctttaactcggaactctgctggggtggcccttgaccctatcctaagaacctttaactcggaactctgttggggtggagggcccctcttttcagccggtgtcttgccttccatcctcccttcatcctgctcaacaccccgaagctggtgaaaacagcagagctgcccccggatcggaactacgtgctgggcgcccaccctcatgggatcatgtgtacaggcttcctctgtaatttctccaccgagagcaatggcttctcccagctcttcccggggctccggccctggttagccgtgctggctggcctcttctacctcccggtctatcgcgactacatcatgtcctttggtgagccgaatgggaggaggagaacgggaggagactcctgaccwgatgttccccagcccctctgggaccacccccccccataataagtcccccacccaggacaggggccagcctgagcactgcccagacttgcagtgagcatttgggtaggttccccgccttggagatgggggtagggggcttggaactaaaggctgggtgaggggcgggggtgccgtggaggcagatgggaactactttccacctcctcctgcccacaggactctgtccggtgagccgccagagcctggacttcatcctgtcccagccccagctcgggcaggccgtggtcatcatggtggggggtgcgcacgaggccctgtattcagtccccggggagcactgccttacgctccagaagcgcaaaggcttcgtgcgcctggcgctgaggcacgggtgagtgcgcgtgcaggccctacctgtcagttctctgctggtttatgccctctctcagtccccagacatctaggtccctgcakgggggatccgggtgcccagagaccagcgccctgccctgcaccgaggcccacgtgggctctccagggcatgactcggtaccaaacatggggcccgcttaccctargctccctcccacatccgtggagacaggaccataatgcaaatagcagggccctcggtctcagaagccctggcttccctctctgaccccaactcaaaggcaagaccttgcacttgtttctttttttgttattgttgttgagacagagtctcgctctgtcgcccaggctggagtgcaaaggcgtggtctcggctcactgcaacctccgcctcccgagtagttgggactacaggcgcccaccaccactccgggctaatttttgtatttttagtagagacggggtttcaccattttggccaggctggtctcgaattcctggcctcaagtgatccgcccaccttggccttccaaagtgctgggattataggcgtgagccaccgtgcccggccggacttgtttctttacttgcgaagagggctgatacctaccttgccacgatgttgttattgcaaagaccgaatgagaaaatgactatgagaaggcccactacacaactgtgtctcaagaaatgtgagtcccggctgggcgtggtggttcacacttgcaatcccagtgctttgggaggccaaggcaggaagatcacttgaagccaggagttcaagaccagcctgggcaacatagggagacatcatctctacaaaaataaaataaaataaattagccaagtgtggtagtgcacgcccgaagtttcagctattcgggaggctgaggtgggaggatggcttgagcggagaaggttgaggctgcagtgagctatgattgcaccactgccctccagcctgggcaagagagcaaggccttgtctcttttaaaattttttaaattatttattttttaaaattttctaatttttaatttttggagatggagtcttgctctgtcacccaggctggagtgcagtggtgtgatctcggctcgctgcaacctccacctcccgagttcaagcctctgaagtaccygggactacaggtgcacgtcaccacgtctggctaatttttgtatttttagtagagatggggtttcaccatattggtcagggtggtctcgaactcctgacctcaggtgatccacccacctcagccttccaaggtattgggattacaggcatgagccaccgcacccagcctatttattttttgagacaaagtctcactctgtcacccagactgaagtgcagtggtgtgatcttagctcactgcaacctctgcctcccaggttcaagcgattcttgtgcctcrgcctctgtagtagctggaattacaggtacccacttccacacctggctaatttttatgtttttrcagagacgggggtttcaccatgttggccaggctggtctccaactcctgacctcaaatgatcctcccaccgtggcctcccaaaatgctgggattacaggtgtggttacaagaccctctctctaaaacaaagaaaaagaaagagaaagaaatgcgagtcctgtcttctagatctttctttgtagccatagtcatgtgctttgaatgaccctgggaggtagcatctggacgtagtgggaaggacttgtagcccctgggggtgcccatctcggagcagtccagcagcctgagccccctcttctctcttgctccttcccagggcgtccctggtgcccgtgtactcctttggggagaatgacatctttagacttaaggcttttgccacaggctcctggcagcattggtgccagctcaccttcaagaagctcatgggcttctctccttgcatcttctggggtcgcggtctcttctcagccacctcctggggcctgctgccctttgctgtgcccatcaccactgtgggtgagtgcccacctccggggggacggccaccagcagctgcgtgggcatcagggatccctcgcccacytgtctccctctccctgcagtgggccgccccatccccgtcccccagcgcctccaccccaccgaggaggaagtcaatcactatcacgccctctacatgacggccctggagcagctcttcgaggagcacaaggaaagctgtggggtccccgcttccacctgcctcaccttcatctaggcctggccgcggcctttcgctgagcccctgagcccaaggcactgagacctccacccactgtggactccatgcctccaataaaaggtagttctgggcccagcgcagtgcctcatgcctgtaatcccagcactttgggaggccaaggtgggaggatcgtttgagcccaggagttgaagaccagcctgggcaacacagtgagacttcatttctacaaaaattaaaaaataatgttgttaattagccgggcatggtggcatgtgcctgtaatcccagctatttgggaggctgaggcaggagacttgcttaaacccaggaggcggaggttgcagtgagctgagatcacaccacagtactccagcctgggcaacacagcgagactcaatctcaaaaaaaaaaaaaaaaaaaaaaaagactgttaaagctgtagtaggctgggcgtggtggctcatgcccataatcccaacactttgggaagccgaggcaggtggatcacctgaggtcaggagttcaagaccagcctggccaaaatggcaaaaccccctctctactaaaactacaaaaattagccgggcatggtggctcatgcctataatcccagctactccggaggctgaggcaggagaatcgcttgaacccaggaggcagaggttgcagtsagccgagatcacaccactgcactccagtctgggcaacagagcgagattccatctcaaaaaaaaaaaaatgttgttaaagctataatcgttctggaagtgaacatggccaggcatgacctgcccccatcctgatgtgctacaaagctgctgccttagattgggtatcaggaccctgaactgtcctcccagtgagagttcagtctgtggcatgaccttggacaagcctcttccttttgcctgtttacttctttgtctgtaaataaaggcatctgcttagcaaagagctgttgggcattgggatggagttaggagggaggatgcgtggagaggcaggctttgaagagtgagcaggatttagatggaggtgaagttagggtagatggcggaattccaagagctaaaggtaagagcagtcaagggcacttaacaggacggggaaatggtaccatccccagtgaaggaaaaatagagttaagaacacagctgaggctgggcgcggtggctcacgcctgtaatcccagcactttgggaggctgaggcgggcggatcacgaggtcaggagatcgagaccatcctggctaacaaggtgaaaccccgtctctactaaaaatacaaaaacttaaccaggcatggtggcgggcgcctgtagtcccagctactgagaggttgaggcaggagaatggcgtgaacccgtgaggcggagcttgcagtgaaccgagattgtgccactgcactccaacatgggagacagagccagactccgtctcaaaaaaaaaaaaaaaaaaaaaagcttatgtcctatggccggctgctgtggctcacacctataatcccagcactttgggaggctgaggcaggtggatcacgaggtcaagagatcaagaccatcatggccaacatggtgaaaccccgtctctactaaaaatacaaaaattagctgggcgtggtggtgctctcctgtagacccagctactcaggaggctgaggcaggagaattgcttgaacacgggaggcggaggttgtgttgagccaagatcgcaccattgcactccagcctgggcaacaagagtgaaactccggctaaaaagaaaaaaaaatgaaaaaaatgaaaaaaaaaattctagaaattagccaggtgtggtggcttatgattgtcatcccagctacttgggaggtagaggtgggagactctcttaagcctaggaggtcaagggtgcagtgagccgagatcgtgccacggcactccagcctgggtaacgaagcgagacccgtctcaaacagacaaacaaaaagagccctggggtggtcacagcatcctctgactttggtcaatcctatttgctggctggctttgtgtatccaggacttcatcaagaataactcattgaaatgtaattggaatgccctatatttgcttctaccgtcctataaaatttatttgtgggaagaattttccctttattgcatgaaaatatgggcagtcccatgacttccctgggtcattctcagataataagttctacattcattttaagttggagcatagaaatgtttcgttcaggccaggcatggtggctcatgcctgtaagcccagcactttaggaggccgaggcaggaggatcacctaagaccaggagttcaagaccagcctggccaacatagtgaaccccgtctctaccaaaaatacaaaaattagctgggcgtagtggcaggtgtctgtaatcccaactactccagagattgaggcaggagaatcgcttgaacccggaggcggaggttgcagtgagccgagattgcaccgctgcactccagcctgggcgacagagtaagactgtgtcaaaaaataaaaacaaataaaaataaaaataaatcagctctgggtttgagcaacctcggcctggatacccttggagttcaggcaggcctcgacgtggccacttgtccttccctctttcctgccgtgggagcatccaaccagtcacaatccggccaatagatttctccagtgggcacattttccagacactggggatgggcggggtatggtagtatgcatctgtcatcccagagtttgagaagccaaggtgggaggatcgcttgaggccaggagttacaggctgagccaagattgcaccacagcaccagcctgggcaacagagcaaaacccgtcttttattttattttatttattttatttatttatgttttttgagatggagtctcgctctgtcgcccaggctggagtgcagtggcgcgatctccgctgactgcaagctccgcctcccgggttcacgccattctcctggctcagcctcccgagtagctgggactacaggcgtctgccaccactcctggctaattttttgtattttttttttagtagagatggggtttcaccgtgtttgccaggatggtctcgatctcctgacctcgtgatccgctcgcctcggcctcccaaagtgctggggttacaggcgtgagccaccaagcccggcccaaaatccgtcttttgaaaaagaggaagaaggaacagcattcgcagctttatgagctcagcctgccgcttttctttcggcgccattctctcctgccatcctccatgtggccaccagagggcggtctctacacagaaggcaaatctgtccctctcttgcttgaagtcctcgggggctagccagcctctgcctacaggctgggtccaaggtgcagccccacccagggcagacgacccagaactgcttgttcttgcaaaccaggctgtgtttcagccctgggctttactcaggctgtcccttcccacctgagggacccagcacctcttatctggaaggggagtttcaagactcagtttaggttccatttccaagacaccttccccaacctgccaacctgccaggctggtccagggccctcctcgccatccccatagctctgcttaaagatctatcacgaccttctccagcctggccaacatggtgaaaacccatctttactaaaaatacaaaaattagctgggcatggtgacaggtgcccctgatcccagctacttgggaggctggggtccgagaaccacttgaacccgggaggcgaaggttgcagtgagcagagattgcgccactgcactccagcctggatgacagagtgagactccatctcaaaaaaaaaaaaaatctgtcacgaccttctgtgtttttttgtttgttttgttattttgtttttttgacacaggatctagctttgtcacccaggctggagcgcagtggttctaccatgttgcccaggctggtcttgaactcctgggctggagtgatcatcccacctcggcctcccaaagcgctgggattacaagagtgagctaccgtgcccagccaacaagagtgaagaggctgaccaacatggcaaaaccctgtctctactaaaaatacagaattagccgggcgtggtggtgcatgcctgtaatccgagctactcaggaggccgaggcaggagaatcgcttgaacccgagaggcagaagttgcagtgagccgagattgtgccattgcactccagcctggacaacaagagcgaaactccgtctcaaaaatatatatatatagctctcaaagttttggaatctgggacgtccgagatcaaagcaccagccgaaatgtcgtctggagagggttcacttcatcacgtgtgtcatcttcttgccctaacctcacacggagaagagaggagggtctctctcaggtctcttttttaatggcactgtgctattatctatatatccatttatagatcctatatataggtccgaggttcttggctcataactcccaaagcccnnnnnnnnnnnnnnnnnnnnaaacacattaaacatgtttcaatccatgggttctttttttttaagacggagtctggctctgttgcccaggctggagtgcagtggcacaatctcggctcacggcaacctccacctcctgggttcaagcaattctcctgcctcagcctctcagcctcccgagtagctgggactacagggatgtgccaccacacccagataattttggtattttttgtggagatggggtttcaccatgttggccaggctggtctctaattcctggcctcaagcgatctacctgccttggcctcccaaagcgctgggattacaagagtgagctaccgtgcccagccaacaagagtgaagaggctgaccaacatggcaaaaccctgtctctactaaaaatacagaattagccgggcgtggtggtgcatgcctgtaatccgagctactcaggaggccgaggcaggagaatcgcttgaacccgagaggcagaagttgcagtgagccgagattgtgccattgcactccagcctggacaacaagagcgaaactccgtctcaaaaatatatatatatagctctcaaagttttggaatctgggacgtccgagatcaaagcaccagccgaaatgtcgtctggagagggttcacttcatcacgtgtgtcatcttcttgccctaacctcacacggagaagagaggagggtctctctcaggtctcttttttaatggcactgtgctattatctatatatccatttatagatcctatatataggtccgaggttcttggctcataactcccaaagcccttgttatttcctaagtaactaaaacaatcggcccttctcttgttagagtagttggcctatgtcctcaattcccgaagcaacttcggaacagcttcagagcgataaaagtgaaagacagtcttttgttagaacgtgggggcacttttggcctcagaagcaggcttcagaaaacacaatctgtctgtctctgacctcctcctggcctcctctctcctgctcctttttctcacctaggcaggccatagaaactaaaaatatactggaatcttcttccctcgccgttctgtctgaagctggttattaagagatgctctgacctaccttgtctgcttgtgggtcatgagaccctcatttcagaaagggtcctgccccatcccctggaggaaggaacactacacagagagaggccgaggagaatctgaacagacaggcctggctgggcttccccactcggtgtgttagtattaggtggtaccctttttgtccaatcacattttttttttttttgagacagagttttgctcttgttgcctaggctggagtgcaatggcacgatctcggctcaccacaacctctgcctcccaggttcaagcaattctcctgcctcagcctcctgagtagctgggattacaggcatgcaccaccacacctggctaattttgtatttttagtagagacagggtttctccatgttggtcaggctggtctcgaactcccgacctctagtgatccgcccaccttggcctcccaaagtgctgggattacaggcgtgagccaccacgccccagcttccaatcacacttctacactggtgtcaatcatgcctatccaaggaagcccctgtaaaagacctgaggactgggtttggagagcttctggataggtgagaatgtggaggttcttggagggtggtgcactctgggaggacatggagttccaaaccccactccccatgcctcaccctaggcatgtcttcatctgtatagttttgttttcttttttctgagacagggtctcactctgtcacccaggctgaaatgcagcctccacctcccaggttcaagcaatcctcctgcctcagcctcccaagtagctgggattacaggcatgtgccaccatgcctggttaatttttgtatttttaatagagatggggtttggccatgttggccaggctggtcttgaactcctggcctcaagtgatcttcctgccttggtctcccaaagggctgggattacaggcatgagcccagccctgtttttgtttgtttgtttttgtttttgagacaggctgtcactctgtctctcaggctggagtgcagtggcaccatcacagctcactgcaacctccgcctccccggcctaagtgatcctcctgcttcaacctgtcaagtagactggactataggcgtgcaccaccatgcctggctaattttttgtattattttttgtacagacagggtttcaccatgttgcacaagctggtctcgaactcctgagctcaagtaatccttcctccttggcctcccaaagtgctaggattacagacttgagccactgcctctggccgatccgtatcctttgtttttgtttgtttgtttgttcattttatttatttatttttagagatggagtcttgctatgt

SEQ ID NO: 96430 - DNA, 40436 bp, Homo sapiens
ttgctgatcagttatccagtcaccatttattaagcatctatagatcaaggcactgtctcaggacatatgaaatgaatgccagccagattctgcccataaggagcttacagtctcattgagaagacgatgctcacaggcaggagtaacaagagactgatttagcacctgactgggtggcactgacttagcgcatcaaaggagttcagaacatggagagattagtaaggcctggaaaaactggagaaaggttttcataggaagggggatgtgatctgacaaactgccggagggttgttcaggtgttgccatttccattttattatgaatggatgtgaccctgggcgggtcttgatgattctgaaagtggtcaaagaatcactttaatgatttcattcaatatgataaccctatgaagggaggagagcgggtgctcctgttctcagagtataagctaccaaagcaccggaagctcaggttaaaagccttgtccaaagcacataacttgttagtggtgaaacttgatttcagactcagattttttttttttttgagacggagtctcactctgtcatccaggctggagtgcagtggcgcaatctcagctcactgcaacctctgcctcccaggttcaagtaattcttctgccttagtctcccaagtatctgggactacaggtgcggaccccgatttttgtattttttatttatccccaaaaattagcccagctaatttttgtatttttcgtagagatggagttttgtcatgttggtcaggctggtcttgaactcctgacctcaggtgatccatttgccttggcctcccaaagtgctgggattacagatgtgaaccaccatgcctggtgattttatttttatttttaatagaggtgggggtctcactatgttacccaggctgatctcaaactcctgggctccagtaatcctcctaccttggcctcccaaagtgctgggattacaggcatgagccacagcgcctggccccatgtcttaatcctcattctgttccaacagtgcttggccaatgatttgcaaatactaggtattcaatatatgttgaattggatttgtcatgtagtgcatgacctttttaaaatggctcaattattattttctctgtgttacttccaaccggattataagcttctgaagaatgggaagtgtatcttaggccttggccagtttctcagacttggtattagttttctcttctataaaatggtaaaaattatagtccctcttggctattatgccacagcgtctagaaggatgtcgtgctcattgtagctgcttaatatttgttcaatgaatcaaatccagtacacccaagtgagcaaatctctggaagggttacaaaaaatgacctgtcccatagctttctcctaaatgcctccgtgacccaaacagaagctcacctcctgggtgttgctgtattaatgaactgactacctgttttgctttgttttgttttgttcatagtggaaaacctcaaccactgtgagtttgccctgcttcgagactttgtcatcaggtaagatgtctcccctccagctgtccagacagcaggttgaattatttggggtcagggtctatctgttcagattcacctcctgcatctccaggtctctctgacagagctttctgccccagttccagctcctgttgcaaaatggaaggtgctgtagaagaatccttagctcctgggagtggttcccattcactgggtccagtccctcgaagtgatgtgtgtcaccgcctcctcttcctgcccctaattgcagccctcttcttctcaccctgtgtcctctaggacccacctccaggacctcaaggaagtgacacacaacatccactatgagacttacagggccaagcggctcaatgacaatggaggcctccctccggtgagcgtggacacagaggaaagccacgacagtaacccatgacgaccacttctctgtgtcatcacacatacccacttcacacacacacatcccaaataccaccaccaaccaccttcttcctctcaactctgtcccacaggcctgtctggtatttgtggagcatcttgtctgtgtgtgtgtgtgtgtgtgtgtgtgtgtgtgtgtgtgtgacagagagagagcgagagagcctgtgtgtgtgcatgcaggggtgaggtattttcactgccctccctggagagtcccttgtaagtttggctcctccatgcctgtccattatctgtctcctttccttgtgtcccaaaacaaagctgtttgcctcactcaggagatctgggggaggtttcatttaaaagtgctgggagcaggtgagccacaggcaactcttctctcggaacctgcacacaaactggggctacagagattctccaaggacagatggcagtggagctagacctgagtagggggcagggagttcaggacaaccctcctgtaagttgggggtggtctgggggtaaggctggggcttcctgggaaaaggaaggccatgagaaggcagagaagtaggccagagctgggttcttgcagaaagcatcagtgcctacaaatggagctccacccttcagtctgtgtcgtgttcagtgtcacaaagctaccacctgtcaccagagcctactgctgctctccactcaactggcctctgctgccaggccactgcctgtctctgcttccgactttgtcttctttctccctttccctccttccctcatacattgctttctctccctctcctgcgtgtctctgacatctctcacttccttttagatgaatctactttaggttcattcctatatttagcatttatgcccagtctacttccagaaatgactttagactgcctttcacataaaatcacaaaactacaggacagtacaaacagattgccagagaaatctgggtcaaagaaaggaataggaaagaaagtttctgtagtcaagcacctgaacaggccctgagctcacaggcagccaatgtaaagagggaaacacagtgagttatgcagttcccagtgtccagttaaaggaagcacacatgctagtcatgtgagacaaccttttattgggacatcaggttctagaactaattctaaagaagtatcagaaacaatatacataatttgtctttcttagtaatttggcttcaaagacaaatttttgaccacacctccgttttctccgtcagacttctctcccttctaagcaggcttctctgttgctccatttgcttcatacatacttgacctctcttttctattccccatcacttttgtgctgaagctaatcatatttatgtctgtctttctctacttttccctaattccctctcctcctgactcctgtagacattcccaatgatacccaccgtcatacatttaggcttttcttgcctttccctgaagccctgtatttattaatgcatatatttcccctgcttgttgtacaagtaagttactcttttcctttaatctgtaagattcatgaaattcggggccagggaaacagtttagccttagggaagggaaaacactaagtgaaactgtttacaataacctcatacaaccttctgtcccatctcctggttcagcctaggtgtttcactggtcctctatgaatcccagcacttataatcccagtcttttatcactcaggtgctaggaaaaaaaacatagactcaagacccaagattcaatggaccaggagaaaggggggcggtgatcaggtcaccagtgaccccaacctatggtctcggtctttcctggaggctgccaacccagccctcatcctcccttgctcacaaagttacagggtaggcacctgtcaggacagaacagcagcagcgctacagcccagaggttatacatttcaacagaacagggatccttggctactgtagaagcagtcctgtatggagaccttggaccagcaggggaagatctatgggcatgggaggtgggcgttggaaaggctgagtaggaatggtgcctggcacccctgaaccatgatctgagcctccctggagaaggtattttatatgtctgctgccagctgctggtctccacaccctcaaccgttctcaacccccctgcagggagaaggcctcctgggcactgtccttccacctgtgccagccaccccctgccccactgctgaatgaaggccatttcaagcgctgcttctcactccattcctctcagctgttattgctgcagggccaagccctttttagtgctgtgctcgtccagctcaccaccacagcccctctcagccctcagtaggtgggaggggccagctgcctctttaggccagttgcatcctccatttatccaaaccactcctctcctcccagtggagtggggttctgccagtacagccctactgcatcatctgcgtcagccggtcctagcccatctgcagggtgaaagaactcatcaagagctccttctgcccttgtaagcccatcccagctacttgtaaccatctctaagggcaatggcattgctccctacccattcatctgcatgagctactcttggcttccttaaagggtcaagaaagcaatttttctgcttactagattcattgagatcagctgtgtgagccccaaagtgggacaagggtgtctccttcattacttaaagatattcatgagggtgggtcactacagatgttggggagcaagggctaggatcactttttaaaaaatcaccacttgtggctgtcccagagtgcggttgtacatcctccccacctcataacgcagccactgaggaagagtggttttcctaagaagacattgctggagttgactttcttctgtccaaacaaacaaacaaaaactaaacacacacacaaacccccagaaacccacaatatgtacacgctaaggaaaaactagcacccttctgtccactcagcaataagagggatctcttcccacctaccctacctactcctacccccaacccccttccccattaatgtgagtaatgaattagcctgaccacaggtggtcactgtaggctaatggaaaatacccaagggagggcaaagccccccatcagatgcatgaatgtttgcgaatgttgactgccactgccccacacactgtgtctttatagaattcccctttgcccaccctcttcctgtctccacctggacacaacttgctcaaaggctggtgacttgtgggccattcatctacaaccaagtcctgatggagcaagaggcccacgcctaggggatgcaagaacaacccgtttcttaaatgttaccagtcccagccaatcttacggtgacattacagttaaatttcccaattgaaaacaagcaaacagacactcaaactggtcctgtaattgttgctagactttatgtgttgtacaactaaacattgctgtttgaacagtaactgcctggcctgtcttatttgtgctccttgaccaaatcagccattatgtcatctcacccatgtgtggagggtgagactctcttggtaagaaatagccacagatattagagatgaaaacactttgtgaggtcagttcatcttcagttggcgtcaggtcgggcctcagtcattattttctagtgtttcataaccaaagtgagtaatggatgggaggttgaggtgggaagatggcttgagcatgggaggttggaggtgcagtgagctgagatcattcctgacaggaccaacccaagtccatacctaaaggcagggggctaagggggcaggtgaggtcgggaggccactcacctatcactcaccccttcgcgctcgagccaattctcagggcccgcctctttctcccctttctcggcgggggcctctaccctgactccgccccgctccccgggcactgccccaccacgtgacccggtctcgctcctcctcctcctcctccttacgtcataatctccgccctccccttcagaaccgcgccccacagctcggcgcaggtcccgcccctttccatctacggggcggcaggaggcccgaagcaagatggcggtgaatcagagccacaccgagaaccgccgcggagccctcatccctaacggtgaaaggtgcctgaggggaagcacggcgtgctgtcggaggagaggagacgaatgagatagacatggcggctcgcaaactctcagcgagtcagggactttgccgccttttttgggcgcggcgctcttagctccgcccccgacctttgggagcgcgcgcccctcactggtgttccggcatgtggaggtggcggaggccggaacgcgtggcctcgcgcgtttgaggggtgggggtgggaatgcgccttttcaaggcgcggggcccagacgcatgtctcctcagggcggggcggggagggggtgcgagacgcgtgtgtccttcgaagagaggccggagctgaccggcggttgtgagcagccgggggcsttcggtggcagcgtggctgcccttgggtgcctgcgactttgttggatgaggacaggtactgggtgtgtatctcctcctacttccacgaacaaggtgtcgctctttggtaagagggatgaggaggtcgagtgtggatcattctggaaagatctcaaactgttgtggggcttctccttggacctggaaactttctaaagccatgtttcctccttgctccaaccagggagatgtctgcttttaaaaacaaaattgaaaaaattgaggccaggtgcagtggctcatgcctcttatcccaacagtttgggaagctgaggtggcccaggagtttgagacaagactgggcaacatagtgagaccccatctctacaaaaagtagaaaattagtgggccatggtggtgtgcacccataatcccagctgcttgggaggcgatggtaagaggatcgcttgaacccaggagtttgggctgcagtgagctcagattgtaccactgcactccagcctgggtaacagagccagatcctgtcttaaaataaaagatgggactgaacagatgcctgggcacaacaaagcactgttggtcgcaggaagctgtggggcttacaccagttgctttgctccttgcggtgcctgctgctggcccctgagctctctactggagcagactcagccagaggggtgcccatctccaccttcaagcacacttgttcactaaggcytgactccactgcgctcacctctttaccccacacgccccctttcccgtttcctacactcaaactcagtctcccccgctgtgcagttctaaattgcgctcctttctgggctctgacttgccctcaatttccttttctcccaaccagcattgaaactcaagctggatgatgtgcttggggccagcacactcargtcagtttgaatgtagttgtcaggaagatcgaagtagacgttaccaaatgctgatatccaggtctttcttctatctttccttcctccagaaagttttcttgacagatttatatgggccttagaggttgtatgttctcacctgcttcctacgtacctctgctgctttgttccattttgtggtagatgattgctcaccactctgacagtggtgtccccgtgagcacttactgagagccatttgagcacttgtcattccatggtgtgaagcctttcttttcttttcttttttcttttcttaagatatttttatttctccaaatttgttatttattaggagtgactgaaataaaaaacataattgagtcccatcatcatcatcatcatagaaatggctttaagagaaaactggtcagatgamtattattgcttcccatttccaaccagtgaatagttgccactgataaattgacagcgaggagtctgtcaagaatgctcaagatagccgggcgcggtggcccacgcctgtaatcccagcactttgggaggcccaggtgggtggatcacaagatcgggagttcaggagcagcctggccaatatgttgaaaccccatctctactaaaaatacaaaaaaaaaaaaaaacagccgggagtggtggcggatgtctgtagtcccagctactcaggaggttgaggcaggagaattgcttgaacccaaaaggtgaatcacccaaaaggtgaaycaaaaggttgaggcaggagaattgctccaccaaaaggtggaggttgcagtgagccgagattgtgccactgcactccaccctgggcaatagagggagactccgtctcaaaaaaaaagaatgctcaagatatgtcatataatacaacatgccttttcaaagggggaaaaatcttaggaaataacttacatgtacttcttggtttcatcatacaagacaagcacaaaagcaccacccatgcctctgagaacactggaccatgcacccttgaaaacagctttgcttccttcatcatgagtaatcttcctccagcagtcaaatgtgcctgtgtacatgatgtcagttcctttgcatcctgactgcatcatcatgtagcagcaaatggtgttaaatgaataggaagtcaacccagcaacggcagtgacagtctgtgcatcatccaactgatgacaatgtgagtgttcttgggatccggaagcattccctttgcagtgtcatagttaccgaagtaggcagcaggcagctcggtagataataccctgcacagacacgttaaagccttggtacaggctcttaatcccrtcagatttgtagatcttaactaggcagtcaccgaaacctcgcaattccctttcagctccagctttgcccacatcagctgctacacgagtatgggcaaaatcaagagggtacacaaaacacaaggatgtggccccagtggcaccgcctgatgccagattccctgcaaagtagcgccaaaactgggatctcttgtccacaccatccaggaagatctgcttgtatttatctttgaaggtgaagttaagagcctgggtgggggaagtatctgatgacactggccaggttaccgcaccaggacaggactccgtgctccttgggaatacagaccatgcagtctctaatgcccttgtattgcttatctgcagtgatctgcttgctggcatgctgcacctgtagcagcagcttgacccgctcgatgggtgctaccgccatcttggagatggctgcggccactccacctgccagggagtccttggcgaaggacacagcagcctctgtgatgtcgaaagaggaggcaggctgctgtgggatgggactggtccgagaatcggctttgactccggggctgattgtgaagtcatttctaatttggtgtttgggtgtcttctcactcgggctatgggtgtctctctacttcactgcttgtgtgttggagaaagggaaggaagcatgttttaaaaaacaaaacacagaaacactgatttttgtggtcctttgaattacctttatgggatccattttgtgctcctgaatacttaatagcatttatcgaacactatttcaagtactgttcttagttctaagagctttatactgtagttaaaaccactttaccagccaggcgtggtggctcacgcctgtaatcccagcactttgggaggccaaggccagtggattacatgagaccaggagttcaagaccagcctggccaacatggtgaaacccctgtccctactaaaaatacaaaaattagccaggcatggtggtgcacgtctgtaatcccagcgactcaggaggctgaggcacgagaattgcttgagcctgggaggcagaggggaggttgtagtgagctgagatcatgacactacactccagcctgggtaacagggtgaggctctgtctcaaaacaaaacaaaataaaaaaactcagtctatctacagtgaagatcagtactgttttccctcatttcacaggtgggaaaacaaaaagaagtcatttgcttaaagcgcatgtgggagagcttggatttggatttgaacttaggtactgtgcataaactcctgtactccagctgtccctctagaaagaaaaggactctttctctgttttcttctcaccaaagaagatcctattagtaccctagcttcctggatagaaachaaagaaccagagatagtggtgcacatctgtagtcccacctattcgagaggctaaggtgggaggatcacttgaggccaggagttcaagaccacgctgagcaaaatagtgggacctcatctcacagaataaaatttaagaaaagaaaaaaaagaaactatagccaggcatggtggcacatgcctgtaatcccagctgcttgggagactgaggcaggagaatcgcttgaacccaaggaggcagaggttacagtgaacagagatcacgccattgcactccagcctgggcaacaagagtgaaactccatctcaaaaaaaaaaaaaaaagtgccagcttatgaggtaattacattggttctctccagaggtaacctgccaagaagagatgctatagatgttactcttatactgtaaaacattgtgaaatcagattgcttaaaaatgatgtattacaaagttatggaaaaaagcarttgtgactatggaagcccaaggcttatatcctagctctgtcttacactaaatgtgggtacagtgtttccastttttgtaaaatgggagctaatatcctccaacctgtgtgcctgacatggtgattaaaaggattaatcgaaacaacagtttgtaatttattctgtcagagcaaactgctgataaataaaagggagtaagttgactaaaaataaattttttttaaaaaaagaaaaatccgaataaagcaagtttgtactttgtatacaaataaaagatgttattaaaaaaaagaaactaaaaaaacttgagcaggagaagattgattctatgaggagtcttcaaaaagatcatggaaaataygggttgcgaaaaaactatgcatggattccagattatttttccaccaaaattaactcatactaacttgttataacatgactgaacaggatttagtttgaggcactaagaaagataagatatcaatttgaaaaagggctcctatcagagcaacataaatactgcttaaattgaaggaagaacaaacatcaaatttatggtaaaccttgggtggaagaatggtgaaaccattgatgctttaggaaaagtttatggggaaatggcccaaataaatcagcagtttacaaatggataataagaagggacaagaggccagtcgcgatggctcacgcctgcagtcccagtactttgggaggccgaggcaggtgggtcacttgaggtcaggagtttgagaccagctggccaacgtggtgaaaccctgtctctactaagaatacgtaaaatttgccaggcgtggtggcacatgcctgtaatcccagctatttgggaggctaaggcaggagaattgtgggaacccaggaggtggaggttgcagtgagctgagatcacgtgactgcactccagcctgggcatcacagcaagactccatatcaaaataagtaaataaataaaatttaaaaagaaggaacaagggctgggtgcagtggctgatgcctgtaatcccagaactttgggaggctgaggtcggtggatcacttgagtccaggagtttaagaccagcctgggcaacatagtaaaaccctatctctactaaaaatacaaaaaatagttggatgtggtggcatgtgcctgtagtcctagctatttgggaggctgaggtgggagaatcacttgaacctgggaggtggaggttacagtgagctgagattgtgccactgcactccagcctccagcctgggtgacagagtgagaccctgtctcaaaaaagagaagggacaagatgatgttaaagacgaagcctgggcagggcacagtggctcacggttgtaatcccagcactttgggaggccaaagtgggtgtattgcttgaggtcaggagttccagaccagcttggccaacatgaggaaaccccatctctactaaaaatacaaaaaattagctgggtgtggtggtgatacctgtaatcccaactactcgggaggccgaagcaggagaatcgcttgaacctgagaggctgaggttgcaatgagccaagatcacaccattgcattccagcctggtcaacaagagcaaaactctgtctcaaaaaataaataggctgggcatggtggctcatgcctgtcatcccagcactttgggaggccaaggtgggcagatcacaaagtcaggagttcgagaccagcctgaccaacatgatgaaaccccgtctctactaaaaataaaaaaattagccaggcgtggtggtgcgtgcctgtaatcccggctactcaggaggctgaggcaggagaatcacttgaacccaggaggcggaggttgcaatgagccaagatcatgccactgcatttcagcctgggtgacagagtgtaagactctgtctgaaataaataaataggccgggcatggtggctcacgcctgtaatcccagcactttgggaggctgaggcaggtggatcacctgaggtcaggagtttgagaccagcctggccaaaatgatgaaaccccatctctactaaaaatacaaaaattagttgggggtggtggtgggttcctgtaatcccagctacttgggaggctgaggcaggagaattgcttgaactcaggaggtggaggttgcagtgagtggagatctcgctactgcattccagcctgggtgacactcctgagtgagactctgtctcaaaaataaataaataaatagatgaagcctgtggtggcagaccatccacattaatttgtgaggaaaaaattcatcttgttcatgccctaattgaagagaattcatgattgacagcagaaacaataaccaatacagtacacatatcatttggttcagtttacagaattaaagttgagcaaactttccattcaatgggagccaaaagtgtagtgcccagatcagctgcatgcaagagcagaacttgcagtggaaaatttaaatatgtgggatcaagatcctgaagcatttcttcaaagaattgtaacaggaaatgaaacatrgctttaccagtatgatcctgaagataaagcacaatcaaaacggtggctacaaagatgtggaagtggtccactcaaagcaaaagtgaacagacaggtcaagagcaaatgtcatggcaacagttttttgagatgctcaaggcattttctttattgactttctggarggtcaaagaatggtaacatctgctttgttttaagaaaattaggcaaagctttagcagaaaaacacccaagaaagctttactagagagttcttctccaccatgacaatgctcctgttcatcgttctcatcaaacaaaggcaattttgcaagggttttgatgggaaatcattaggcattcatggatcattaggctccttctaatttattttgtttcccaatcttttttttttttttttcgagacggagtctcgctctgtcacccaggctggagtgcagtggcacgatctccgctcactgcaagctctgcctcccgggttcacgccattctcctgcctcagcctcccaagtagctgggactgcaggcacccgccaccacactcagctaattttttgwatttttagtagagactaaacccactgatggggtttcactgtgttagccaggatggtctcgatcgcctgacctcgtgatccrcccacctcagcctcccaaagtgctggcattacaggcgtgagccaccgctcccagccggctttgtttcctaatcttaaaaatcctgattgggcacccatttttcttctgttaaaaatgtaaaaaagactgccttggcatgattacatttccaggaccctcagttctttagggatggactaaatggcttgtgtcatagcttactaaagtgtcttgaacttgttggaacttatgttgagaaataaggtttatgtttttatcttttaattccatgaactgttcggagttcccattatattttgactcctcttgcctattcacaatacacagttgagaaattgatcacagcttgctgtgttttgtagagattttttctgaccccagctgagaagtcatgaacatatgggacagactctactgtaaaatgggaatcattgagttgttttattttatgcattgttaaaacgtgtgctggaaacctgtcattatagaaaaatcagaagaaaaaatctgttatcccaaatttttaccagtaatgtttgcattttggtatatgtccttctgtacttttccacatggaaataaacagtttttttctccaactgctttataacttattttcctcatttgccagtatattgggaatgttttctagtgtatctacatcattattttcaatggctggtattccagtgtgcataaatctttactcaacccctaatctggaatagtctgggtttttgttttgttttttgtttgtttgtggtttttttggtcattactataaacattcctgcaatgaacatttttgaaaacataattttgcctacctgtcaaaatgtttctttgggataggggaattgtgaggtcagaggattagacttttaaaaagagattaaaaatatttattgaaaatataaaaatcattgttcaaaatattaaagtatacatgactttacattaaaatayacttattgcagaattgccctacagaattatatcaatttacattcctctcagtactctgagtgcccacttcaccatacttttcccaacaattctgttcccattaaacaattccctctatccctctccccatgacacctagtaacaaccattctactttctgtttctatgaatttgactacttcagatacctcatgtaagtgtaatgacaatatttgtctttttgtggctggtttatttaacttagcgtaacatcctcaaggttcgtccatgttacagcatgtgacaggatttccttcttttaaggttgaaaaatattccattgtatgtatgtgccacattttgtttatccattcatgcactgatggacatttaggttgcttccacctcctggttattgtgaatagtgcgctatcaacataagtattcaaatatctatttgagacactgctggcaattcttttggatgtatacccagaagcaggattgctagcttgtacggtagttctatttttaattttttttgaggagcctccggactgttttccatagcagctactcattttacatttctagcaacagtgcacaagagttccggtttctccacatcctcaccaacacttgtttttcttctcttctcttctcctcttcctttcctttcctttcctttcctttcctttgctttcctttcctttcctttcctttcctttcctttcctttcctttcctttctccctcccttccctctccctccccctccccctctcctcccctcccttccctttttttgacagagtctcactctgtcactcaggctgtagtgtagcagcaggatcttggctcattgcagccttagcttccggggttcaagtgattcacatgccctcagcctcctgagtagccaggattacaagcatatgccactacacccagttttttgtatttttagtagagacggggtttcgctgtgttggccaggctggtctcaaactcttagcatcaagtgatccactcaccttggcctcccaaagtgctgggattacaggcatgagccaccatgcctggacctgttggttttttaaatattaaccatcctaatgggtataaagtgatgtctcattgtggttttgatttgtatttctctgatgattagtaatgacaatctttttatatgctcattggccatttgtgtattattgctcttgttgcccaggctggagtgcaatggtgcgatctcagctcactgcaacctctgcctcccaggttcaagtgattctcctgcctcagcctcctgagtagctgggattacaggtgcccaccaccacacctggctaattttttttattattttttttctaagatggagtctcgctctgttgcccaggctggagtgcagtggcacgatcttggctgactgcaagctccgcctcccaggttcacaccattctcctgcctcagcctcctgagtagctgggactacaggtgtccaccaccacgcccggctaattttttctattttttagtagagacggggtttcaccgtgttagccaggatggtctcgatctcctgatcttgtgatccacccgcctcagcctcccaaagtgctgggattacaggcgtgagccactgggcctggccaatttttttgtatttttagtagagacagggtttcaccatgttgggctggctggtcttgaactactgacctcagttgatccacccaccttggccttgtgctgggattacagggagctctttacatactctagatattaagcccttatcataaatacaatttgaaatattttctcccattccataggttgctgtttcattctggtgattgtgtcctttgatacacaatttttaagtttgatgtagtccaatttatttatttgttcttttgttgccggtgcttttgtttttttatccaagaagtcattgacaagtccaatgtcacgaagattttcagtatgtttttttctaggagttttatagttttgggtcttatgtttaagtctttaatccattttgagttaatttttgcatactatgtaagataaaggtatgacttcattcttttgcatgtggatatccagttttctaaaaggacatcatttgttaaatagattgtcttttcctcactgagtcatcttagtacctttgttgaagattatttgatcaattctcacatatatgtgaagatttgtttctrttctagtccattggtttgtttatctttaatgccagtatcatgctgttttggttactgtagctttgtaatatactttgaaatcaggaagtgtgaatcctctttgttcttctttttaaaaattatttggctttttggggtcccttgagattctatatgaattttatgatgtcgctttctgtttgtgcaaaaagtgttgttgagatttggtagggattgtgttgaatctctgaatcacttgagtagcctggacgtcttagccttaytaagttttcaaatccatgaacatgggatatctttccatttatttatgtcttcaatatttttcactaatgttttatagttttcagtgtacaaacctttcacctccttggtgaggtttattcctaagtattttattctttttgatgctattgtaaatggaattatttccttaatctcctttttggatcattcataattagtgtatagaaatgcaactatatttgtgggttgattttatatgctgctactttactgaattcacttattttgacagctttttggtggactctttaagtttatttacatataagatcacgccatctgtgaacggagttaattttacttcttccttccaaatttgaataccatttatttatttattttattttttgcctaattgctctggctaggacttccaatactatgtcgaatagaagtggtgaaagcaggaatccttgccttgtttctaatcttagaggggaagctttcagtcttttgccattcagtatgctgttagctgcaggcttttcatatatggcttttattatgttgaggtagcttccttctacttttagtttgttgagtgtttttatcatgaaaatatattgaaccttttcttttcttttttttctttttttttgagacggagtctcgctctgttgcccaggctggagtgcagtggcgcaatctcggctcactgccagctctgcctccaaggttcacgccattctcctgcctcagcctcctgagtagctgggactacaggcgcccaccaccacacccggctaattttttgtatttttagtagagatggggtttcaccgtgttagccaggatgatctcgatctcctgacctcgtgatccgccygccttggcctcccaaagagctgggattacagacgtgagccaccacgcctggccaaaaatatactgaatcttttcatatgctttttctgcatcgattrtgatgatcgcatggttttttcccttcattttgttcatatggtgtgttacattgattcattttcctatgctgaaccatccttgcattctaggagtaaaccccatttggtcatagtgtatagtccttttaatgtgctgctgaatttggtttgctagtattttgttgaggattttttacatcaatattcatcagagatactgacctgcaattttattttattgtagtttctttgtctggcttcggtatcagggtaatgctggcctcataaagtaagcctagaagtgtttcttcctctttaattttggggaagagtttcagaaagattagttaattctttaaacgttttgtataatagaatttgttgagaggtttttttttctctttttgagacaggttctcactctgtcaccctgtctggagtgcagtgatgtgacatgatcacagcttactgctgcctcaatctccgaggctcaagtgatcctcccacctcagcctcccgagtagctgggactacagatgtgtgccaccacacccaactttttttttatatattttgtagagatgaggttttcaagttgcctaggctggtcggaaactcctggcctcgagcaatcctcctgtctcagcctcccaaagtgctgggattaaaggcatgagccaccacacctagctgagaggtttttggttactgattcaatttccttactagttaattggtctgtttatattttatgtttgttcatgattcagtgtggtaggttgtgtttttctagggatttatccatttcttctaggttatccaacytgacatacaattgtccttggttttctctttaatccttgtaactccttggcatcagttttttttttggttgttgttgttgttgtttttcttgttgttgttgttttggagacagagtcttactctgtcgcccaggctggagtgcagtcgtgcaatattggctcgctgcaacctttgcctcctgggttaaagtgattctcctgcctcagcctcccttgtagctgggattacaggtgcccaccaccatgcctggctaatttttttgaatgtttatactagagatggggtttcgccatgttggccaggctggtctcaaactcctggcctcaagtaatccacctgccttggcctcccaaagtgctgggattacaggctgagccaccatgcctggccggcatcagttttaatatcctctttttcatttctgattttagttgagacttctctctttttcttaatctagctaagagtttgtcaagtttgttgaacttaaattttttttcttatttttttctattctcgcttttatttatctctgttctaatctttattattttcttctttctgctagctttgggcttcatttgtttttctttagttccttgaggcataaagttaggttgtcgatttgagatctttcttctttattaaagtacacatctgcagctataaacatcttagcactgcatttacagcaacccataagctttggtatgttgtgttttcatgttcatttttctctaggtactttctaatttccctctgatttcttctttgactcatttatttaatagtgtattgtttaatttccacatatttgtggcagttttccttgtgctgttgatttctagtttctttccattgtaatcagaaaacatattataaaatatagcgtttcttgtatttcaaatctactagtaaagagctttcattttttgtttatttggtaatgtcttaatttctctttaatttttgaaggatagttttgccactyatagaattcttggttaagagttttttgtttttagggctgggcacggtggctctcgcctgtaatcacagcactttgggaggccgaggcaggtggatcacgaggtcagaagatggagaccattctggctaacatggtgaaaccccatctctactaaaaatgcaaaaaattagttgggcgtggtggcacgcacctgtagtcccagctactcaggaggctgaggcaggagaatcacttgaactcaggaggtggaggttgcagtgagccaagatcatgccactgcactccagtttgggcaatggagcatgactctgtctcaaaaaaaaaaaacaacggagtgtttttttacttttagcagtttgaatatgtcatcacatttccttttggcctccatgatttcaataagaaatcgctgctggccgggcgtggtggcttatgcctgtaatcccagcactttgggagcccgaggtgagcagatcacctgaggccgggagttcgagaccagcctgaccaacatggagaaaccccatctctactaaaaatacaaaattagctgggtgtggtggtgcatgcctgtaatcccagctatataatccaagctactcgggaggctgaggcaggagaatcacttgaacctgggaggtggaggttgtggtgagccaagattgtgccattgcactctagcctgggcaacaaaagtgaaactccatctcaaaaaaaaaaaaaagaaaaagaaaaagaaaaagaaatcagctgctagtctgaggattccttgtgcrtgatgagtcacttatcttgttaatttcaagattccttgtatttggctttcaataatttgattataatgcatgtcagtgtggaactgagtttattctacttggagtttgttgcacttggatgtgtagattcatgtatttcattaaatttgggaaggttttggccattatttatttattttgagatagggtctctatcacgtaggctggagtgcagtggcacgatcacagctcactgcagcctcgacatcccaggctcaagtgattctcttgcctcagcctcctgagtagctggggctactgatgcatgccaccacacctgactaaatttttaattttttttttttttgagagagagtctcactctgttgcccagactggagtgcattggtgcgatctcagttcactgtaacctctgcctcctgggttcacgcaattctccggcctcagcctccggagtagctgggattataggcatgcaccacccacgcctggctattttttgtatttttagtagagatggggtctcaccatgttggtcaggctgggctcgaattcctgacttcaggtgatccatctgcctctgcctttcaaagtactgggattacaggcatgagccaccgcaccccaccggcaaatttttaaatttttagtagaggtgaggtttcactatgttgcccaagctggtttcaaactcctgagctcaagcagtcctcccgcctcagcctcccaaactgctgggattacaggcatgagccactgtttccggctcagatattcttttttcttattttgagacagggtctccctctgtcacccaggctggagtgcagtggtacagtcgtggctcactacagccttgacctcccaggctgaagcaatcctcccacctcagtgtcttggataggtgggactgtaggtgcactccaccatgcttggctaattttttgtattctttgtagagatagggtttcaccatgttgcccttgctggtgttgaacacctgtgctcacgcattctgcccactgtggcctcccaaagtgctaggattacaggcatgagccaccgcgcctggccccaaatgttctttattcccctttctctctctcctctccttcttgaattcccattctagatatattggtatgtttgatggtgtcccacagatttcttagacttcgttcattttttcttcgttttttcccatttgtgttactcaggtagtaaccgttattcccattgacctacttcaagttcaataattctctcttctgcctgccaaaattggctgttgagccccagtgattaaattgttcatttcagttgtagtcttcaactctagaatttctgtttggttccttttaataatttctgcctctttattgatattctctacttcctgagactttgtttgtattctttcttttagttatttggacatcatttcctttaactctttgagtatatttacaatagtttatttaaagtgttgtctgataaatccaatgtatgggcttcctcagggacagtttttattaatttattttgttcctgtgtattcccatactttcttgttcctttgcatgcctagtgatttttgttgttgttgaaaactggacattttgaatattttaatgtagtaactctggaaagtagaatctccctcttcttcagggtatatttttgttgcttgttatttgtttgtacagtgacttttctgtactaattttgtaaagtctgtattctttgttatttgtggccactggaatctcagttctgttacctcagtggccagctagtgatttgacagaaattttcttctatgtctggaacaacaacaacaaaatctcccagcccttgcagatgggctttgtgtgtgttggagcatgagcgtgcctttcttactcagccaggcagtttacaactctgccttcaccttcacttctttttgcatcatttccttttttttttgagacagagtcttgctctgttgcccaggctggagtgcaatggcatgatcttggctcactgcaacctctgcctcccgggttcaagcaattctcctgcctcagcctcctgagtagctgggattataggcgcccaccactacgcccagctaatttttgtatttttaataaagatgggatttcgccatgttggccaggctggtcttgaactcctgacctcaggtgatctgcctgcctcagcctcccgaagtgctagattacaggcgtgagccaccgcaccgaggcctttttgcatcacttctaattgtcaatcagaggtgaaagcttagtgcctcttcagtgtgtgtgtgtgtttcattttttgtttgtttttagtatgaatctagccctggacatgtatgtgtatggctttcttgtttctcaggaatatgtgtgagcttttcgaagcctttattcctcaaagcatctcattgctcatcctttcctttagcttttcaatttgtctgtttttttgccccagttgtcatccctttcgctaggtagcagcaactaatacattggcttggaaattttttttttcttgagatgaaatttcgctcttgttccccaggctggagtgcaatgggaagatcttggctcactgcaaactctgcctcccgggttcaagcaattctcctgcctcagcctcccgagtagctgggattacagacacatgccaccaggcccagctaattttgcatttttagtagagacggggtttctccatgttggtcatgctggtcttgaactcccgacctctggtaatcctcccgcctcagcctcccaaagtgctgagattacaggtatgaaccaccggacccggccggaaatgtttttgacaaatgcctcccggtagcctcatcagtcccgggaaaattacaaattaaatacatgccctttgagccrgtccttcaaggagccaccagacaagtcaaactacaatttttaaaaataagtgtgttctgctccctccagtacttcgtatctatcatgggaatatagattgttgtcttcaaagctgctgccaagctagtagtgggggatgataccagggtaggttaaaatgtcataaagcttacttactgagatttggctttttaaaaaaattacttaagcattcccctagttaccataagcttttgattagattctagagttctgaaaaagttgattctgacaggttttcttttgctttatttattgcttttatggctagactgacatttaaagattcccattccacagttttttactaatgtcctgtattttcatagtcttttaaaaatcctccccttttaatctgcacattaccaccctagttccagtttttaccttgcatcaggactattttaggaattcttaaactgatccctctgatacactaccttcttgattatgtgactttcctgttgagaaatctgaagctcacagtttctccttgcctatcaaatgatgtctttaagctgtagttccggcatagctttccaactttgtttcactgtttctcctaacctcacttccacactgtgttttgatgaagccataccactaggcttctcccaagtatgcagtttgctttccatatctgctcctgcacctccatgaatgctgtttgcttcccatctggattgtcctctaccttcacctctacctactgaatgctacccatctctctctctctcttttttttgaaacagggtcatactctgttgcccagggtggagtgcagtggatcactgcaatctgtgccccatggctcaagcaatcttcccacctcagccttccgagtagctgagattacaggcatgtaccaccatgcctggatactttttgtattttagtagagatggggtttcaccatgttggtcaagctggtctctaactccccaaatgatccgccagcctcggcctcccaaagtgctgggattacaggcgtgagccactgtgcccagccagaatactacccatctcttaatcagctcaaattgcagtctttctattaggtcattcctaattacttcaactaaaacgaatctcttctttcactaaattgctatgacagtttgttactaataaatgtatgacatacatttatattatgtatgtcatatattgtttgcattatgatctgtattcatgctttcattcattcttttaataactatttagagcacccactgtttgctagggctagagtagcaaagaaggcagacattgtacctaatgatcattatacattggttacatatatcattaagaaagaaaaggctgggggactgggtatggtggcgcattcctgtagtcctagcacattgggaggctaaagcaggcagatctcttgagcccaggagtttgagaccatcctgggcaacatggtgaaacctcatctctactaaaaatacaaaaaaattggccgggtgcagtggctcacgcctgtaatcccagcactttgggaggtcgaggcgggcggatcacctgaggtcaggagttccagaccagcctggccaacatggtgaaamcccgtctctaccaaaaaatacaaaaattagcctggcatggtggcaggcgacttaatcccagctatttgggaggcagaggcaggagaatcgtttgaacccgggaggcggaggttgcagtgagccgagatcgagccattgcactcaaacctgggggacaagagcaagacttctctcaaaaaaaaaaaaaaaaaattagccaggcrtggtggtgcttgcctatggtcccagctactcaggaggctgaatgggaggatcacctgagcccaggaggtggaggttggtgagcagagattatgccactgcactccagcctgggcaacagagtgagaccctgtctcaaaaaaaaaaaaaaaaaagacagaagaaagagagagagagaaaagaaaggaagggaagggaagaaggaaatggaaggaaagaagggaagggaagaagggaaggaaagtcaaaaggaaaggaaagaaagaagtgagggaaggagggagggagaaagagaaagaagaaataagaaaaagagaaagaaagaaaagaaagaaagataaagtaagaaaaaaaagaacccagcaggatttgatgagtgacagtaaggtgagtccaagttttccaggttaacagtaaggagagagcacgacaggctgagggaacatgtcagagggggctggggcagtctgctgccttactttctttaccagcgtcaaagaaccatttctattagcacagtgctttacacttaccgcacaagaagtataagaattaatgaacacacattgagaataggagtaggtttgacaagaaaaagaatccaatgatgaagagggagaagaataagagtaaattgtcagagaataagatcatttgaattcctttttatttcaataaaatagtagtagtagtaatagtagcagtagcagcagctaatgtttattgagtgcttactctggaaaaaaaaaaaaaaactacattaagggccgggcacggtggcatgcctgtaatcccagcactttgggaggctgaggcgggcggatcacaaggtcaggagatcgagaccatcctggctaacagtgaaacccccatctctacaaaaatacaaaaaaattaggcaggcatggtggcgggcgcctgtagtcccagctatttgggaggctgaggcaggagaatggtgtgaacccgggaggcggagcttgcagtgaggtgaaatcgtgccactgcactcccgcctgggcaacagagtaagactctgtctcaaaaaaaaaaaaaaattgcgttaagaactttatgtgtgtcattttacatacattctttattgtgtgccgtctgttcctcattttctacagtctcttgaagcggtctccgaatgtggagctctccttcccacagcgatcagaaggctcaaatgtctttagtggtagaaagacaggaacattgtttctcacttcataccgggtaatttctacttctactttaatctgctgattaactctacatttgttttccttgaaatgaagaaaacttaaacattgacttttgaagtgtttttaaacgtgcgctttgggattttccacactgaagggtggtggaagaaaagatgatgtttctcagttagaccagaatgcaccttgctcttgtaagtctcaatccatggacaaattctgcattccttttccaaagtttctgtccttgcgtaggtgattttcataacttcatgctccatcagtgatcccatgttgtcttttatgatgccatttgatctgatgacgaacctcactgttgaacaaccagtatttgctgcaaacttcattaagggaactattcaggcagctccatatggtaagtgttccctcagaagtgtgtatttttttttccctcaaaatcttctaaaaggtttaagattcaaacttggctcatgttgaaattcaaacaaaagctgccctactttgtcaggtagtgcttcccttggtgtttgtggcagtctttctgttgtcagctatgccagtttcttggtgagtgtgtgccatttcttcccccaggtggctgggaaggacaagctacttttaaattagtcttcagaaatggagrtgccattgaatttgcccagttgatggtgaaagctgcctctgctggtaagtgatgctgataaagatattaagcactttggggttttttgtttgtttgtttgggttttttgttgttgttgttgctgttgttgttgttttgttgtttttgagacagggatttttgtatttttgtaagtcggggtttcaccatgttgcccaggctggtctcgaactcctgaactcaaatgatcctcttgcctcagcctccygaagtgctggggttacaggtatgagccaccatgcccagcccactttggggttttaaggcttgtggaattaaagcaggacttctactcagccaagatttgctggcctttgtggccaggcagttggtattcgcacacatattcagcaggcatttcctgggcctacctacaattgtcaagtaccatgttacagggtaggaacacaaagattattcagtcccttcctatcctgaaggagcttgcaatctagtgggagcttacagccagacacccaggtgactaattatacctgatagtcttttgtccatttaaacactgacctcagatatctactgagcgtctcttccttgggtcagggagcccttagttattctttctttggtgtggctttttaktttttcttctctctggacttgcctttgcttttctcaggtttagtccccatcttacatgagaggggagtagaggtactgtcaagacttatagcactgatctaatggatgtrccacagaactctttcaaactgtgactacaaataatttttttatctcatatatgtgtgtgtgtgtgtatatatatatatatatatatatatatatatatattttttttttttttttttttttttttttttttgagacagtgtcttgctttgtcacccaggctggagtgcaatcatgcgatcttggctcactgcaacctccacctcccgggttcaagtgattctcctccctcagcctcccaagtagctgggattacaagtgtccaccaccaagcccagctaatttttgtatttttagtagagacggggtttcaccatgttggtcaggctggtctcgaactcctgacctcaggagatccacctgcctcagcctcccaaagtgctgggatcacaggcgtgagccagcacgcctggccggtccttgcgatctttaacccatggcttccatggcctctttgtacagccagcagagaaggaaataaagatctcccctgggaaatttttatgggccaggcctggaaactgtctacattacatctggtcacatgccataggcaaaactcagtgtggtaggctgataatggatccccagatatatccccatcccaatcctcagaatctgtgactgttacgttatttgtaaaaagggtgtttgtagacgtaattaatttaaggatcttgagatgacaagattaccctagattatttaggtggcctctaaatgccatcacaagtgttcttataagagagatgcagaggggagacaagacaaaagtgttttcttcggtaccacacttcctcacattggtctttaatggatatatcttaccaacttggtagaatcctcacttagaagttttttctgaatatctgttatgawtaggtgctatgctaggcctggaataagcacaggcaaatgagatacaatctctgcccttaagacacgtgccattcaggacaagggtcatatttcttttctttctttcttttttttttttttttttgagacaaggtcttactctgtcacccaggctggaggctccagtgcagtggcacagataaggctcactgcagcctcaaatttccaggctcaagcaatcctcctgcctcagcttcctgagtagctaggaccacaggcatgcaccaccatgcctggctaatttttaaaaaattttttgtagagatagggtcttgccatgttgcccaggctggtcttgaactcctggggtcaagcaatcctcccatcttggcctcctaaaatgttgggattacaggtgtgagccacttcacccagcccatgtttcttttttatcttgtgtctcaagagcattgttggaaacacatgtaaggtggtgattaaatactctgttaattgttyagttgatatctgctatatatctgacttaattaaaagagttcctattttgccaaatttgtctttccagctgcccgaggatttccacttagaaccttaaatgactggttcagctctatgggaatttatgtaattactggggaagggaatatgtgcactccacagatgccttgttcaggtaaggtatggcagagaggttcttcctggaaggtggaaaattatgccagaggctcaaagatctatcccttgcaggcttgctccctgcaggagcagcagcagagctttaggggcttggaaaatggtcacatctgtgactttgtttccagactgaaacccagtggcaaagtcagcaagtgactgggctttggtttcaggcttacttttaatgatatatacaaacctggaacatacttggcaatcctgttagtgggaagggtcacttcctgtttatagcctgagcagaaaatatatgctcttgcccacttccttgtttccatttcacatagcatagtcatcatacctgtgccacacccttcaaccttactgaggactcgagccctgggtcctttaacagtttgtgttgttaaagtccactgctactgaatggggtttctggaaagtaattctcaaacatggtccactgcctactggtgggccaccaagggtctcctaatgctgccaacacacacaaaaatatgggacttttcttgagttctccttggaacttsatatgcatgtccatgggcctttagttttgtatgtaacttaaaggctacttatttgtaaccttaataggtaccttggtttttaaaggttattacagtctaatattcagaatctaaagtaattgttgctagggtttaacattttttcagttggtgaaattcacataacatataattaacattttaatgtgtacaattcagtggtatttagtgtaaaatttagcagtatttgacgtattcacaatattatacatccaccagctgtctctagtttcaaaaagtggtgttttttttggagacagagtctcactttgtcacccaggctgtagtgcagtggcactatcatggccccctgcagcctcgaccccctgggctcaagcgatcctcttacctcagtaccccccaaccagagtaggctaggaccacaggcgcaatccaccatgcccggctaatttttatgtgtttttgtagagacagaaatctccctatgttgtccaggctggttctgaactcctggcctcaagccatctgcccgccttgccctcccgaggtgctgggattataggcatgagccatctctggcagccttttttgtttttgtttttgtttttttgagagggagtcttgctctgtcgcccaggctggagtgcagtggcgcgatgcaagctccacctcccgggttcacgccattctcctgcctcagcctcctgagtagctgggactaccggcgcccgccaccacgcccggctaattttttttttgtatttttagtagagacgggatttcactgtgttagccaggatggtctcgatctcctgaccttgtgatccgcccgcctcagcctcccaaagtgctgggattacaggcttgagccaccacacccagcccctgccagcctttttttttaaaaaaattttgtagatacagggtctcactgtgttgcttaggctggtctcacactcctgggctcaagcaagtctattgccttggcttcccaaagtgctgggattacaggtgtaagccacagcatctggtctggtttcaaaactttttatcacctaatagccactaagaagttattccccattgtcccctctctgatcccctggtatcctctaatctgctttctgtctttattgattcacctattstgaatatatcacataaaagaaatcatacaatatgtgaccttttgtgtttggcttatctcactcaagataacgtttttgaggttcctccaagttgtagcatgtagcaatacttcatttcttttcctggctgaataatactccattgtacatatataccacaatttgtgtattcattcctccattgatggacatttgtcttgtttccacctyttggctattacgaatactagctgctatgagcatttgtatataattttctacgtagacatatgttttcatttctcctggatatgcatcttggagtggaatttctgggtcatatgtaaattctctaactttttgaggaaccaccaactattttccagtgctgcactattttacattcctgtgtaaatgtaagtgttcctatttctacacatcctcagcaacacttatcttcctttttttaaaaaaaaaaatctatattaaagccattctagtgggtatgaagtggtatctcattgtggttttaatttgcatttccttaatgactaatgatgttgaacatcttttaatgtgctttttatataccttaattggagaactgtccaagtcttttgcctattttttttattatttaaatcggattgcttgtctttttgttgttgagttgtaagcattctttatatagtctggatatgaaatccttgtcagatatattatttgtaaatatttttaggttttctttcacattcttgataatgacttttttttttttttttgagacaaagtctccctctgtcacccaggctkgagtgcagtggcgccatcttggctcactgcaatctctgcctcccgggtttaagtgattcttgtgcctcagcctcctgaatagctgggactgcgggtgtgtgccaccctgcacagctaatctttgtatttttagtagagatgtagtttcaccatgttgttcagactcatctagaactcctgagctcaaatgatctgcctgcctcggccagtgggttacaggtgtgaacaactgtgcccaggcaaaaatggcttttaatgcacaaaggtttttaatttttatcagatttctcttttttcctcttgttgctcatgcttttgatgtaaaatgtgagaattcgttgccaaatccaatgtcatgaagatttatccctgttttcttctaagcattttatagttttagctcttatatcaagcttgtccaacccatggcccaggatggctttgaatgcagcccaacacaaattcataaactttcttcaaatgttatgagatttttaaaaatagctcatcagctatcgttagtgttagtatattttatatgtggcccaagacaattcttcaccaatgtggcccagggaagccaaaagattggccacctctgttttatattaaggccattgattcactacaagttaatttttatctgtagagtgaagtgagggaagaacctcattcttttacgtgcagatatccagttgtcccagaatcattttttgaagagactgtttttttcccattgaatggtcttggcattctgtcaaaaatcaactgttcatagatgcttgggtttatttctggactcttaattcattccattggtctctaagtctgtccttgtgccagtaaaacactgtcttgattacagtagttttgtaataaattttggattaaagcaaaataactttacagctgtccattcactttatccagttaaatcactttggggaatgtaacccaaggtaataagtaaaactcatgtttattgtaaggttaattggaaagtcagaaacaacaaaaagagtcatctatccatatgatgaaatattatccagctttgaatttatgaagtaaattaacaatatgaagacatttcttataatattaagtaaaagagccagatttaaaaaatcatatggctggccgggcgcagtggctcacgcctgtaatcccagcactttgggaggccgaggcgggtggatcatgaggtcaggagatcgagaccatcctggctaacatggtgaaaccctgtctctactaaaaatacaaaaaaattagctgggcatggtggcgggtgcttgtagtcccagctactcgggaggctgaggtgggagaatggcatgaacccaggaggcagagcttgcagtgagccaagatcgcgccactgcactccagcctgggcaacagagcgagaccccctctcaaaataataataataataataataataataataataatatggctgatatgatcatgattatataaagaatattcacagagattctacaaagaaatacaccaaaatagtaagtgttcaatggtagaattatagatggcttttttccattcctcttttctctattttccaaacgcatattcctcattaagcatgtattactttttttcataatcaaactttattaagtaaaacacatatctgtgcaagagtataagtaacgcaccgatctattgatagggttgttttcatgttgatttgaatccctgcacaacaggaagtgatatgccttcaattggtgatagctagaggaaatagctttagcattattctgcctgacttctcttcttgcgtcagtttgcttcagcattattttttaagttcttccttctcacatattccttgacttaaaggtaactgaatttttttccttccattataattcccagttattgtctatggagccccacctgcaggatatggagccccacctcccggatayggagccccacctgyaggatatggagcccaacccgtaggaaatgaaggcccgcctgtgggatacagagccycacctgtgsgatatggagccccacctcttggatacggagccccacctgcaggatatggagccccacctctaggatatggarccccacctcttggatatggaaccccacctctcggatatggagccccacctctcggatatggagccccacctgcaggaaatgaaggcccgcctgcgggatacagagcctcacctgctggatcaggagccaggcctcasgaatctacagcagcccaggctcctgaaaacgaggcttctcttccctctgcctcctcttctcaggtccattcttaaccttctaagatgtaaaccttgaagactcaccaagcaaagaggtaccctaaaattgaagtcaggataaggaggacgactcaggtatgtgatcacaggcttctcgcaggtagttgttccaccctttggaagggcaatcttatgggggaaggtgaaactttacttctgtgcctagattttagaagcagaatcaactcttaaatagctggctaaaggaagaataccattgtggggctaattccccagtaatttggttgacattgggttgcatttttaaacataactttttccacactcgcattcaaggttcctgtcttcccatcctcattcaagaaacatttattatgctccgtttgctaggcactaagatgcgtgctaaaaacgtcatgttgaacacttagttgtttgagaaagctaaattttcaatagtaagagtgttataaattacggtggatccacaaattggagtattatacacctgttgaaaactatgtctagaggtagagaaagccttctttgaggagaccaaaaccaacaaataaaagcatgataaattgactatatcaaaatttaaaacttctctatgacagaagttaaaagataggcaacagaataggaaaaagtgattttcaacatatatattaatttatagtcagaatacgtgaataactacaaatcaattctccccaaaatgacagaaatatgaattgccgaataaccaaggcaatagcatggccagaaaacgtttgaaaagatgttcagcttgactagtgttagggaaatgcaacctgagatgagaaaacatttttatctccaaagatttacaaatattaaaactcttgatatggcactttcacattttaaaatatgcctgcgagaaaacttgcatgtgtgcacaaagatgcatgtgggaagatttcattatattcattgtttctaacagcacaaaattagaaataacctatatgtccattaataggaaatatatgaataggctatggtatgcccatactacgtatgcagaaatttctaagacttgttgataaggagaaaagcaagttgtagggagcatatactatagtgattttcagcctcatcagactgaatgccccattttataacaaatatttatattttataacaaacgtttatatttgtatatttataacaaatattttgtaatgtctccttcacttcaatgaagtttgtagataattgcatatgattccacaccatttcaaccaaaattaataggccataaatgtgatagaggaaataaaaggagtttgtagtaaaattttaagtgttttaatatataaatgctcagattctaccacactagaagacatactgaagtaatcaagggttcactcccatatacatagtcagcataggtataaagattagaagtgctaactgatatgaatatgttgctttggtgacttgaataccattgctattggcaatattgttctccaaaatggtgaacaacctttgaaaattttccaaataaaacaaagtttagtcttcccttgatttacacagtggttgaattcctgaaaatttctgtatatattaaagtcatataaaacagagttaggctgtaggctcaaatgattataaacatgcttcacctacatcactggctggagagccatttgaaagtcaggagacataggacaattaaggtactgccctgtacgtttcaggatgtcttgcatcttcgactcctcacccattaagtgccaataatggcctccaattgggataaccaaaaatgctcccacttatttcctaattgctccctggggggcagtaccatccctgctgaggaccactattctagactgtttcaaggctttcagccccttcagagctcaccattctcccactctggcaaggcaggcaaagttcttaatttcattggcctttccttatcttattgtaggctcatcaagccacctaaaagggaggccttaaaaatacattagtagccaggtgtggtggcacatgcctgtaatcccagcactttgcactttgataggataaggtgggagaatcacttgaggccagttcaagaccagcttgggcaatatagcgagaccctgtgtctaggaaaaaaaaaaaaaaaaaaaaaaagccaggtgttgtggtgtgcacttgacccagaagacatttaaatcaatatattttctatgcatttttttttttgagacagagtcttgctttatcacccaggctggagtgcagtggcacaatcttggctcactgcaacctccacctcccaggttcaggcaattctcgtgcctcaacctcctgagtagctgggattacaggcaggtaaaaccatgcccagctaattttttttatttttatagagatggggtctggccatgttggccatgctggtcttgaactcctggcctcaagcaatcctcctgtctcagcctcctgaagtgctgggattacaggcatgagccactgcgcctggccttctatgcatatttcttatatgtagttgaaatcatgctatataatgtttcaccagatattttacattttcataggttttgaagaaatgcttgtaaatattgttagtgaccacataatattctgtgacacagttacaccataacgtattttctcagtccctcttttaaggtatttgaattgtttccaggtttttgttattacaacttcatgattaacttctttgtatatggagctttttaaaagttttaaatgctttccttaacacagcttagagtcattgattgatctgcattgtgaaaattaggaaaccagatgctcccatgttctcaaggacagcctttcttaaggaagtcaggtagatattaatgggttttatgtgaaatggagtaactgggttaaatataattgaaaaagacaagaaaactggtttctttactacttcttagagccttgactatactaatggacataatctccaagaaggagagattttcaaaatttacagttttttcaaaattatttgattttagaatattcagtaaacattttgttcagtggaagaaactgagaaacactttctggaattatgggatattagaattagaatggacttcaggtatctggagtatgctagaccttaaagctctttccaaaaatgaagacaagtcaaaagaccattcttccttccattccaaataaaagagctttatatccaatttacagaaagcagggtgggacatcttgaagataaaatatatagaaagtagctgctgcttcctctcagaaattactgggatagagttatgggtctaggaagctggaatgtcaaaacacagggacagccactttgcccaggcaactggcatgaagggaagaagtgaaaagggaaagtgtggctgtaaacctctctaaagtttccaaacagggaatccaggcaatattggatcttaaacatgggtcataggatctggcgcttttatccctaaaatttttggaggaaaataacgagatattttaagtttcttcttttcttacttccaaactacagtacgtgggcaacagtgatgagaggaagagaggagagactcaaccaactagagcagggataaggtttcccttgttcagcttttcagtgtctgctggaatgtgatggtaagttgagaacagggtgaatgggtgaggccttttttatatcagaaagttttccgagtaactgatctctggcaaatatttggggattagaattctaaaagaatacaaactagacttctcttctgctcttcatgttagttatacttgtaccaggtagatttgaggtggggtccagttacctgaaaagcgtagcaggttcgagtttcttaaaggtggaattccaccatgttctcctgtgcaaagggtacctgtttacctggtccaccaaactgccccagtacaaccaaaggctgtgactgtgtaaggatagaaccaagtggagccacagtttggacccacgtggtgctgcgtggcacacctactgttagttagctcccactgtctggtacagttgtttcccccaaaggctcagtccaatttgttctataagaagagctttgtgtcctgtatattcaaaggaccctggtttttgctttgctgaggacaaatccagtcagaattcagctgagccttctgcatgctgagagcactcatgtgctgagttcctcagctcctcactgacgttttgagtactttctttctgactcactcactgtgctggtggattccgctcttcctgtctcttccccagctgcaatacagaaactatactctgttgtctactctttcatttcctattagaaatataaagggatagaaataagaagaccttttagtcctggactatctggtattggcccctaaaatgagcctccaaatactccttttcatgggtaagtggatgctccccagcctgctggagcagaaccttcctggctcagctaccctgagatatcaggacaaaaacatatagttggtgtgattttcctctttttgtttttttttttttcaagatagaatctggctctgtcccccaggctggagtgcagtggcgcgatctcggctcactgcaacctttgccccacaggtttaagcgattctcctgcttcagcctcctgaatagcttggatgacaggtgcctgccaccatgctcggctaatttttgtgtttttagtggagacagggtttcaccatgttggccaggctggtttcgaactcctgacctcaagtgatccacccgcttcggcctcccaaagtgctgggattacaggcatcggcctgtgcctggccgatttttcaatccatagattaatatgttcaagaaatattgcatgtctttgttttctgtaaatttatttctgttaccaagatccccaccaccatctgctttgttggtgggcttctcacaaatcctaagattatgcaaaggtatccagattttatttggcaccaagatgctgagaagtttcttctggtcatcagactgcttctgaaacagccactatccagtcctggcagtcccgtcaagtctaaaagcttgttgccttgggaccccagaatcttaggtagggcttagaaccagggtgtcagagatccaactctgtgtaccatattgctccttagaactggggagtaggaccccaaaggcctccttatccttgagagtctgacaattccttaaacttccagattctgccctctcagctgtgctgttggtctgcatcacctctatctcttaagcatctatcctaatccaaatctcaggatttgggtttacccaaaaggtaatagaaagcctttgccttcatgttgacttggctttccttgcctagcacttggttgcttgcttgaaaatcatgtatgtatatatataaaatgtagaagcccaattcaaattaataatgtaaaaatttattctgttacacagattacctcattgtcaggtaggaagtgaaacgtatgatattcttcctggcctttgccttgagagtcttctggagcctgaagagggtggggcagtcaaccatggactgctagagaataaactttctttgaagcttcctaaatggattagaaagaaggggttctgtcaaagggaaagggtctatacagatgtgaccagcagtttgattagtttagatgtatgatttagtagccaatataagaaacttgtaatttttagtaattagaatttattataaataataaaacagggtattaattattaatattatggtatctttggggtgtcacttttctggccagaaacctctgtggacaagtggcacctctgcccaagtattgcttgggcccactgggctcattccacccacccggcctggcaggctgcacttggctcatgctactggcctggatcccatgcctgccaagggagattgcatggagtgacaaggggtgtgtggggaagtgtggggtctggctatttttcagtcagatgtgccagctgctgcagtggggtggtcagctccaggtaccagcatgggcaccagctctccacgaggctgcagctggaccagtcgcactccaagcagc

SEQ ID NO: 96431 - DNA, 16594 bp, Homo sapiens
cctccggcttccagggccttccagaagttccagtctcttgggtttggttgtgcattcctgcgaccttcaccgcaggcctcctcctccacccactagtgcagagcctgggggctgccggtgggtttcaggccagggaagcagaaatgggtaatttccagaggcagaaatcagccgaccccggtggcccggtgggtggccaacaaagcttggctggccctcgcgggctgtgtaggagcccaccctagggaggtacccagagacatccctggtttggctctgccgggaaagtgggccgagcagggagagggggaccagagaggaagagatggacagagttttccggacggtgggctgggtccgaggcccgcggaccgtccgaggggggcctctgggttcgaggccgcccgcaccgaccagtgctgtggctcgggcagttcaccgccctctcgggcctcagtttcccgccctggcagacctcgaggcggcctcggagatcccgggcctggcgaatactgggcggggaggggcgttaactccagcctcccgggcggggtctcccggctcccgcggccacgttgcagcccaggcggaggcgcgggatctcgagctgggatcgccctcctgggcttcggtgcgatcggcggcgggaggtgagagtgggcccggcgggctccgggaggaggtggccccagggaaggtgtggccgcggggaagtggcggcgaacagccccgacgcgaggacggggaaaccaaggcggcagccagggagaccctgaccgaggtgacctctgtttagggcgacaaccgggttggggctccccgcagtggccactggcccggcggtcccgcacccccagcccgcctctcctccaacaaaagaatccaggaagacgctggggcgggcgggaggccgggtgtgcggtggcctggcccccctactggtggagaggagggagcgcccttccccagacgcgggggaggggaggggtcatggccccacgggctgcccaccccctccctgtgccccagtgctgggcccaggacccccagtgaggccactcctctggcaaacatctgtgatctcttcccccttcctgggccccccctactggaatggcgtctctccccatccaggggcctggcttgtttttctccataacccttagcattaccggtccttatgttatctcttatttcactaattattctttcattaatttattagtatttattttgtttgcctacagtgtgtttccccctgtgggaatgtaggctccaggagggcgggagacttcgatttgtccactgatgtatccccattaattcaacagatccctcctgagggcctctctgagccctgcacggtgctgggtattggggttctcctgggaacttagctgagccccaccctagacattctggggctgggaacagtgctgtaaacacatatgacatcgtcgtgggatgaaggaaacaaaccagaaatgggggggtctactggtcaggtgaccttaggtcaggccaccttggtggtcagggccaccttagatgatatggtgatcatggaaggcctcccagattaggtgacttcagttaaagccaggaagtgctagaagggaaaagctaggaaccatgagggcatgtgtagctctgacctggactcaggcagggagctggggtctgaagagtaaaggtcaagacaaggggacccatccccttaagctgctcaggggttcctggctgggtggatgggtggggggattctcaggggtcagggaaggcttcccggtggaggctgtggtttcattaggcctcgaaggtggagtaggagttctcattctttgggataagctgactgggcttgagaattgttttgcaggttccctgggaaccaggtggtcgaagggctgagctgtgtggccagacaagaggtccctgccctcccccagtgagccctgctggtaagtgggtacagtgtgagggatttgggagacgaagctctgcgtctcattggccatgtaaccttgggcaagttcccctcactgcgctgggccttggttttccatgagtaaggacagttggactaagtgccgttcatgatgctgggggcacccacattcaatggctgtggttagctcttctcagctgtaccctgggtttgtgccacactcttgtgtacagagtagctccccatctggccctgaaggctgcagattgagacagaaaaataatgttttatctgaggaattggagcccctttaaataatcaggcccagacatactgaaacgcaacagctgtcaagtcttactcctcccttgagctaaagaattatctctttttctttttttttcttttcttttcttcatgtcagatcggtaatgtgcctacatggtaacaaggttcgagggtggcacagctcacacatgcatgtgaacacccaatcatcacgctcatgaactacaaaaggatcaagaattacctcttgaagccacttgctatgtggctctagagtgacaccaagtagccataaaatgctgtacactggacaccctatagttcataccctatagttcaacaatgtatagccaatcactaatcaatgttatttctttttttttttttgagatggagtttctctcttgtcacccaggtggagtgcaatggcacaatcttggctcactgcaacctctgcctcctgggatcaagcaattctcctgcctcagcctcccgagtagctgggattacaggcacccaccaccgtgcctggctaatttttgtatttagagacggggtttcaccatgttggccaggctggtctccaactcctgagctcaggtgatccacccacctcggcctcccaaagtgctgggattacagatgtgagccaccgcaccccaccaatcaatgttatttctataaaccaaggagaattcctgccaaacaactttgtcatccttgcccccttctgcctataaaaacctgtaggaaaggcccaacgcagcacaccccacggcaacttagaagtttgttctgggcagttatccttactctcgctcaagtaaactctttaaagttatatttgtgcctcagcttctgcctgtaggtcaataagattcaacagctatatgcaaataagaggccagtagaggcccaggagggtcatggaaaccctggaagcttggcctcagagttggagttgagaggaccccagatgaggggatagtttaagcacagtggtttcgatgggtctggggtccatttcagctcagctggggcctgtttctttggattttagaaagccgtgcccaggtcctgccatgcctcctgtctgatgcaatctcgttattcttttctcgaagtccgccagtgtccagttttttttgcatgatcctcacgacatccctttgagagaaaaggaaggaaagacgagcccacttctcaggagactttagggaccttagggacacagcaagcgagtaggagtcccagggctggggtccaggttgcctctggagccggtgctgttccccaggagggcacggaaccacctccctctctgatctgctgccatctctcttgcctcacagttcccgtgggagccatgaagctgaacgagaggagtgtagcccactatgcactcagcgactccccagcggaccacatgggcttcctgcgcacctgggggggcccagggaccccaccgacccccagtggcactggccgaagatgctggtttgtcctcaagggcaacctgctattctcctttgagagtcgcgagggccgggccccactgagcctggtggtgctggaaggctgcacagtggaactggccgaggctcccgtgcccgaggagtttgcctttgccatctgctttgatgcccctggagtgcgcccacacctgctggctgcagaagggccggcggcccaggaggcctgggtgaaggtgctgtcccgggcaagctttggctacatgcgcctggtggtacgcgagttggagagccagttgcaggacgcacgccagagcctggctttgcaacgccgctcatcctggaagtctgttgccagccgctgtaagccccaggctcctaaccaccgagctgcgggcctggagaatggccactgcctctccaaggacagcagccctgtgggcttggttgaagaagcgggcagcaggtctgcagggtgggggttggctgagtgggagctgcagggccctgccagcctcctcctaggcaaggggcagagccctgtgtcccctgagacctcctgcttctctaccctgcatgactggtatggccaggagatcgtggagctgcggcagtgttggcagaagagggcccaggggagccactcaaaatgtgaggaacaggataggccctaagtctgggccctttgagtcaggaaaccagggccagttctttttcaggagttaaatgtttacccatttccaaggttgcgttttgggaggggacatgggttctctccttcctgctatttaggcattctccaggttcgagatccacccgtgtgtctggaagggactgcgggaccattccttccatcctctttatttcctgaggtccagagaaggaaggagacttagcagccacagagcaagaccccaatctcctgactgcactggcctgactgccccctcccaggggatgttaatgaaatgaaggaagtggggaatgtcacccgagactgtcacaggcttgccatacctttggcctacacaccgggctctagagccataatttccaacctggggagtctcctgtgcacttaaatccgaggtaggctgcagtatcggcttgaagctctgacactgtcagagaaagtggatttattgtgtcataggagtttctgggacccagctcttcctgagaggggtgggaagattggggatgggatcctcactcagcagtctgggtagggccctttgaggcagagggtcttcggccagtgaagagagatttattctgctcagagtgctggggtcccatcctttctccctggctgccctgttaacagatggtgctggaccttgccccggaaggggcttgtagcttttttacgtcaacgaaatgccctcctgtactctgtcttcagcagccaactcctggagctgccaagtgaggggttaaagaagaggtggggaggcagtgtggctccctgggaaaagtctgttgctttggttctcagtcctgggtattctaggagcttggacacgggattgcgtttcctgtgctaaaattctctctcctggctgggctccggtaaactgaagctgctcgagaaatcacctgggaactctcatagccgtttgtcacccagggtgtacttgccaggacctctccttgctactcttcccaaagtcgggaggcaaagcggctgggtcaccagagcctgaccatactgacgctccagggggaagacgcagaggccgggaagagacaccccctcccaaacacataaaacttgccccttcctagcctcggctcccctcactggggccttgggcaggaccgacccgcatccaactaggcctaaggggtaggctctgagcctcttacccctaagaggcggagatgcgcccaaggcgggcgcccggcctgttccccagccctgcctggaagccccgcagccactgcattttgtttaaacacagatagcacgggcctttctcttattgctacagtgttttgtacacggttaaaacactagtaaagctttttcgttattactccttccgctccctgggtttatttccacaaccggccgctgaggcctgttctgacggccgggcggacccaagaccgcggccacgcccagcaggacgcggactgagggagccggggctgcgccgccactctcgtgacgccaccatgccggccagtgacaaacacctccctcccgccgccccaggagccgccggcactgcgcgagtgggagggctgggcttctcgtgtactcctcaaactctcgcgaggcttcgggcggcttkcttcccgagggcggcacgagggctgggcggtggggtgcgggtgcccgggtgaggggcggagctgggggcatggcgtccggagcggctcgctggctagtattggcacccgtcaggtccggggctctccggagcgggcctagcttgaggaaagatggcgatgtctccgccgcatggagcgkctcaggccggagcctggtaccgtcgaggtcagtcatcgttacccgcagcggcgccattttgcccaaaccggtgaaagtgagtgtcctcctggagacggggcgaaggggctgaggccaatcattgtggggagtgcgtgagggcggcgctgattgataggagccaaggccaatcataacgattaccgtagactggaaggcggaccaagaatacgctaatgagttgctaattttgacaggtgtgtagaaaatggtaggtagacagaagatggggggcaaacgctgaggaagttggccttttacattagcttgtcctgagaggtgcggtgctctgctcctctggagtcagaagactaggccgtgtgcttctagcttagagcagtcctgtaatctctgccctgcctgtctcctagtttatgggatgaaatatgaattttgaaaggactctgtaaataaagggtacgtgggacgggcctcatctttttattagttgtcacctaatatttaattcatgtgatttacagtcctgatagatgtgcagggaattattacaatcacgggttttcaaatgaagaatcgggctagagcggtgaagctcgtatccaaggccagcgctgaggacgcagcatccgggtttcttcctggtaccgtccccaccaggtcctgtctttttccaacactgaacgctatcacatgcttgagtttttctagggaaaacggaaacagtcccttatatcaagcgaaagtttgctttacgactgcagggctgtgtggtgtgggagttaaaaaaacaaattctcttaaagctagtctagcctatgctaactcacacaattgactgtaggtccatgttgggaaagacctgccttatcaaaacagttgaaaaaaaaatttttttaattctaggaatacgagagaaatgttgctgagattttactgacattctcccaatccatctaaagtctttgagtgtaaatacatgcccactttcaaatacatctgtttctaaaatttttaaatcaaatttctcaggcatcagggaacctgttacttagtgaactgtgtagaatatcccttcactgtacatctttctgtcatcggttttcgtgtatttcgtgttcaggcagagctcaccgtagtctggccctcctagtactggtgcacccgattgcctgtagggatttaaagtaattagcaggctgtgtcctaactttagatgtctagggtgccttagacttttctttccagtggacttttcgtccattttgatggccataacagtcaccttatctccttttttttttttttgagacggagtctcactctgtcacccaggctggagtacagtggcacaatcttggctcactgcagcctccgcctcccgggttcaagtgattcttctgcctcagccttctgagtagctgggactacaggcatgtaccaccacacccggctaattttttgtatttttagtagagacggggtttcactatgttagccaggctgatttcgaacttctgacctcgtgatccgcccgcctcagcctcccaaagtgctgggattacaggtgtgagccactgcgcccggccttttgtcttttttttagacagagcctcactctgtctcccaggctggagtggaatggtgcaatcttggctcactgcaacttctgcctcctggattcaagcaattatcctgcctcagcctcccgagtagctgggattacaggtgcgcaccaccatgctgggtcaattttttgtatttttagtagagacgggatttcaccatgttggccaggctggtctcaagctcctgacctcaggtggtccacccacctcagcctcccaaagtgctgggattaaaggtgtgagccaccctgcctggccttctccttttctaattacttttcttgccctgaatttttccaaggactttaaaatcaagttgcttatgatgggtctgagggtatgtctgtgagagggccaggtcttctttggtcctgccagagtgggctctggagctcacagctgccactctgaccctctgcagatgtccttcggccttctccgtgtgttctccattgtgatcccctttctctatgtcgggacactcattagcaagaactttgctgctctacttgaggaacatgacatttttgttccagaggatgatgatgatgatgactaacaggtaagacttgctttaccctagatggagcaggaagcagggtggagcatctgtctgtgatgcagtctggcctggtagcagcatttggacactgggggcagaagcattaatgaattggcccacttggtggctaatgttttcgtttgtttgttttttgagacggagtttcgctcttgttgcccaggctggagtgcaatggcatgatctcgactcactgcaacctctgccttccaggttcaagcgattctcctgcctcagcctaccgggtagctgggattacagacatgcgccactgtgcctggctaattttgtatttttagtagagacggggtttctccatgttagccaggctagtctcaaactcccgacctcaggtgatccacccaccttggcctcccaaagtgctgtgattacaggcgtgagccactgcgcccagccaacttcatgtgctctaatatgtgctgcatggcattctgtcaagagatgaggacactcctgttccttagcctggcattcaaggcttgccataatctggtcacacctcttattccagtctcatcttccatatttccagccacacaccgattcccagtattcaccatttcttgagttttcacactcatacccacccccaaacattggctcattgttcctcccacatggaaggctccttcccagagctctgggtcttaattccacccattctacagtgtctttgaagtcttcgttcctcctttcatttgaaagttgacggctccttcctctaagcaaccagtacctctcttcaaatactcggtattatgtggctaaacacacacaaagcaaaattttactagactctgagcttcttgctggcaggggacgttttttatacattgcggcccccagtgcctggcctgtggtgaatgcccagttaacgtgcgcatgaacaaccaaacgtgctcaaagctgcctttctcctgccatgtttgatagaagcactttgtggaattctttcagtctgcggatggaagactacgctgttgcccagttcactgctgctttcctttcttacaggaattacagaaaggagaaagcactaactgragaaatggtgatgctctcagtttctctgccttccctatcagcagaaaggctcggggaaggccctcagcctcccagtctggtgaagcttcctgtatggtccatgaccgtattccaccccaggctctgggaggctccctgagatgtgctgtccactaagcactgcacaaacaagcaatcaaattatgaataaacataataaatatcagccgtgcgtgactgagtgatggctgcagtttctcagtatccctaggttctagttggtgcagttgtctctgctgtcctttatttatgggagaaacataggcccaggctatccaggctgcagtggagcctggtgaactattctgggggccctgggaactattttcattgtttacaaaagcccaacagaaactgtgcattttcccttaagaaagcttcatgggctaactaaagcctcatgccattctgtgttcagtgccagtcatgacagctctgcttgttagcatactacttaaatataactagaatgattcaaaactcgggttctgtgatatgaggatatagataggttttcatctatttcctggcttataactcccaaaacccttgttttaggcttttgttataatgttgggcacttcgggcctcagaaaacagcaggctgtttctcagatcttctcctgacctcctttcacctgctgctttttctccccaaggcaggccatagaaactaaaagtataatcttcctttgcccgtcttccagttggccataaaaagaatcctctgacctaccttgtctgattttaggtcatgagacccccatttcagaagggattctgccccatacctgagaggaagaaatgtagacaggccttgttggacttccccactccatctgtattagattatgcctcttttgtccaatcccatttctccagtgttgtccatgcttcaatcatccctatccaatgaggtctccataaaaggcccaagaagacaggtttagagagctttcggagaacagaacacttggctttgcaaagtggcacgcctggagagaacttggaagctccacgccccttctatacctcaccctatgcatctcttcagctgtatcttttgtgatatcctttataataaaccagtaaacggacctaagtgttcctctgagttctgcaagctgctccagcaaattaaaaagaaggggtcagccaggtgcggtggctcacacctgtaaccccagcactttgggaggccaaggcgggcagatcacaaggtcaggagagcgagaccatcctggctaacacagtgaaactctgtctctattaaaaaatagaagaaattagccgggtgtggtggcgggcacctgtagtcccagctactcgggaggctgaggcaggagaagaatggcgtgaacccgcgaggcagagcttgcagtgagccgagatggcaccactgcactccagcctgggcgacagagtgagactccatctcaaaaaaaaaaaaaaaaaaagaaggggtcatgggaacttgaagctcagaagttctggaggcttggacttgtgaatgttgtctaatgggggtgggagcagtcttgtgggactgagccccaaacctgtggaatctgttgctatctccaggtagatagtgttcgaagagaattggaggacaggcagctggtgtctgctgcagaactgactgcttgcttagtgtggggagaaaccctcataacgtttgatcacagaagtcttatgtgtttattgttattgagtgagagaacacaaaaacaccttgagtttttccctcaggttccttacgtgaaaagattataaagggatccttggtgccataaggtttggggccatgcacaatggctgatgcctgtagtcccaacactttgggaggcggaggcaggaggatcacttgagcccaggagttcaagactggcctgggcgcggtggctcacgccagcactttgggaggccacggcgggtggattacttgaggtcaagagtttgagaccagcctggccaacatggtgaaactccgtcttttctaaaaatataaaactagctggatgtggtggtccatgcctgtaatcccagctacttgggaggctgaggcagggagaattacttgaaccaggaggtggaaggtgcagtgagccaagatcacaccagtgcactccagcctgggcaacaacagcgagactccatctcaaaaaaaagaaaagaaaaaaagaccagcctgggcaatggagagacgccatctctatttaaaaaaaaaaaaaaagtatgggagtcctcagtgatcatacctatagattccaaaccccttctccatcatttggattgccctgggaagcacaagagaagaccaccatccaaacagagatcagttcttgaacctgtgttgatgtttattctgccactgagaggtacaccagggtttccaaagacagtaggaatatttctgttctctgtgtatattgaacagctgtgcacctaagcagggtgcctgagtaggaagttaatttcattttaagggctggagcttgttacaagtagcggagccaagcctttgcacatccattttcttcagaacccaaggaaaactagcccatcttgacagctctacttttgcgcctgttagtgctgccctgatccctgacaggaagagctggctaattttagataatctgtgccctgacactgaagtgtctaatcataggggctatagaaacaactacattaacaagtcgtccagcctcatgcccaatgtcacaatttttgaacagatggcctccttccttcctgtttactgacatgcaaggctctgagaaaaataattcaatccaatttacagcaaacaccacatttcaagaaaagggaaagaacaggtgatgtgtataccaaggtcccacttgctcaggcaaaaagaggctgcagaaaattggttcatcaatggaattctatcacaaagtgaccattgtatagtgagtttatttgtgctctaaaatagtatcaacgtgcatctttccactgaatgacttcatggatcgtggccaacatagaacttggataggaaatcctttggccttggcgcttctgtttcatggaagaaccgcataacatgtgtccgctgcttccatactttaattgtttcttccagttcgatctttccctgaacagtgaggagagaggtcatcagtcaaagttgtcaagttgaaggcatatgacactgaaggccaggattctattctctgctcagcatggacttgttgaatgaccttgggcaagtaactactctgtctgggcaaagtttctatgtctggacaatgaggtggtcagggtaaatcatttctgacacttttcagattctttaactctgtggttaactggtaccaagaggagaaacatacaggttaacaggctcctatcccatgactacctaacctgactggcttaacttatgtttctgcttatcatttcttctgttactgactggtctatgctgaagctcccattgatgctaacgtgactggccagggggacagaatcagccccaggatttgagtccatttatacaggactcataaccaccctaactgcctcttccagctgtaaactggcattcagatgaagtggtaacttctagggatgaggttcaagaagagttcaaactttcctccctatatctttttttatggttataaaatgcaagtcccagtggatgttcccttgatgaatcttatctatttaaccagatgataacctccaagttcaagtatttctctgaaacacagcaataatcactgccgaaccagtagctgctttctaaacttggagacaaaatgttcatttggaaagactaagaagtagtggacaagttggctgatcttttaaattggtcagggagggtcagttaccttaatgaccagaagatcaaccaccctggggtctgtgacatgggcattcttcataaacatttctcggactttatcccgtcccattttcacagtgatgtccagctggaattggtgcactagagagaaaaacatgactcagggtagaaattgtatggttaaataaaacctagagtcaaatgatactcattgaacacatacaggtcgcccattcatttcttcaccaaaaaattagcctgaccctaggctaggtgcttgaggatgagacatgtgattcatggtatttgctctcaaggaacttattatttgtttggggaaaaagaccactgaatttgaagaggcagtaaagcattgttcaagagtttgaacaacctgggttcaaatcccagcttttgttagctatatgatcccgtgtaagttaactttcttgtgcctgagtgtattttttaaaaaattattttatgggctgggcgcggtggctcacgcctgtaatcccagcactttgggaggccgaggtgggcggatcatgaggtcaggagatcgagactaccctggctaacacagtgaaaccccgtctctactaaaaatacaaaaaattagccgggtgtggtggtgggtgcctgtaattccagctactcgggaggctgaggcaggagaatggtgtgaacccgggaggtggaccttgcagtgagccgaggtcgcaccactgcactccagcctgggtgacagagcgagactccgtctcaaaaaaaataataattattttattagctgggcgcggtggctcacgcctgtaatcccagcactttgggaggccaaggcaggtggatcacctgaggtcaggagttcaagaccagcctggccaacatggtgaaaccccgtctccactaaaaatacaaacatgagccgggcatggtggtgggtgcctgtaatcccagctactcgggagactgaggcaggagaatcacttgaacccgggaggtggagggtgcagtgagctgagatgggccactgcattccagcctgggtgacagagtgagactgtgtctcaaaaaaaaaaaaaaaaaaaggctgggcgcggtggctcacgcctgtaatcccagcactttgggaggccgaggcgggtggatcatgaggtcaggagatcgagaccatcctggctaacaaggtgaaaccccgtctctactaaaaatacaaaaaattagccgggcgcggtggcgggcgcctgtagtcccagctactcaggaggctgaggcaggagaatggcgtgaacccgggaagcggagcttgcagtgagccgagattgcgccactgcagtccgcagtccggcctgggcgacagagcgagactccgtctcaaaaaaaataattattattttattagctgggcgcggtggctcacgcctgtaatcccagcactttgggaggccaaggcaggtggatcacctgaggtcaggagttcaagacagcctggccaacatggtgaaaccccgtttctactaaaaatacaaaagttagccaggtgtggtggcacgcaactataatcccagctactcgggaggctgaggcatggggaaatcacttgaacccgggaggtggaggttgcagtgagccaagatcgcgccattgccctccagcctgggagacaagagcgagactctgtctcaaaaaaaaaaaaaaaaaaaaaagtgagttatcattactgtttttttcattaaatacttaaaattttacttttgttttttattaatgctcaggctgttctaagttctcaacactattacttattccccttccttgatttgattcctcagctggagtcctgatgatggataccataaaacccgtgtggcacaggtttgagtaactggccagctacagatcactgatcttccccatagggatgcatactccttgaccccttcttttctctcctcttcccttgctttctaggctcctgtagccctctgccttcttttcctcctctcaagacccttctgactttgggactttcttcccaaaacagaatttgagggaaggtcttgggaggggtcggtttagaaagagctggatcctcagagtcaggatacctgggttctgtcttctacttggccactgatttacccttcacaagccaccctttttgaatgtggtcctccttcccccagcaccttcctcctgcaaccagagagggttctgggtactcctagaagtattctgccaggcaaacattatgttttcaaactgctgaatttgaatgcaccaccccgaaacacacacacacacacacacacacacactgctacagtcactccccacacacatcttttatctgcctgcccctgaaggcatctgaatttgcagtccctgaaccagcagatcactcaagtttctccttctctagtatcgcgtgggtttaagttctggtcagtagcaatttttccaaaagtcagcttgaagacagggactctgtggagcagacacagttctcatatgtcaaagaaccgggttctgcttggaagctgctgctaaggaaagccctataaataacaaaaataacaacaaaaacaacggcagcagctaatatttaatgagttaaatatgcatcaagtcctgttctaagcactctagatattttaacttaatacagtaaccttctgaagaaggaattattattcccattttaaagatgaagaaactgaggaatagatgaaataactggcccaaggtcacacagctagttgagggcagcgcctgaagaaaagtccgtgctcctaaccaccacattctaccgccttttcacacacacaagcagggactcgacagccctgaggagtggcaccgtgctccagctcactcaaaaacacctctttctcgcactttgggaggccgagacgggcggatcacgaggtcaggagatcgagaccattctggctaacacggtgaaatcccgtctctactaaaaatacaaaaaaaaatggccggcgtggtggcgggcgcctgtaatcccagctattcgggaggctgaggctgaggcaggagaatgacgtgaatccgggaggcggagcttgcagtgagccgagatcgcaccactgcactccagcctgagcgacacagcgagactctgtcacaaacaaaaaaatccaacgggcatctataattacactctgcaactctagactttgggttctgggtacaacagtggctcggcctgggccctgggcacatca

SEQ ID NO: 96432 - DNA, 72133 bp, Homo sapiens
ttattttttaattatttactttttattgacatataatagttgcacatatgttggggatacatgtgatcatttaagtgagactaatctcagctgatgtaatggaaaagaggcagtgtgcataatctggttggtgtagtttatactaggttatgaatgatagccttaatccaatcatcagtacatcagaaagcattttgattttgataaccaaaatgaacctttaagagaaaaaaagactcctggacccctccttcagaccaccatcccttcaacacactcaatgccaagcacactcaatgccaagcaaatagggtcctccatggggcaatctgtttctgaaagttttcccatttgagtttgttgttttcttgaaaagatcccttcagtgcattactttacaactattggctgctttttgcttctgtctctggactactgagatctttgcttcccatcacagctaataagtaattctccatcacagctaaataaggcaggggtagggggcagataagcacaagacttggctttgctgccatggaattctcttgtttttcaatgaacctagtttagctttttataaataagctggtgatgatgatgatgacgataaattcataaacattcttttattcataaacattcttttattctttaaagcacacattttctttctgagccacaaagaaatctccccacctccatatttacaaatgggacaatgaaactgatcagtatatatgctcaactgccaatacaaagaataaatccagtaaataatgttgtgtctgttctcaggaacaaaaggtcccaggtcattcttggggctcactcaataaccagggaagagccaacaaaacagataatgcttgttaagaaagagtttccctatccatgctatgacccagccacacgcgaaggtgaccttaaacttttacaggtacgtatctttgattgtcttctcaaaagtcatagaaccttctacaatctggccgccgacgtgaaaacctttccttggtgcccctgttgtaaaaactcacaataaagaggatcctgaaattttggactataatttaaaatgtaaatatttatcttatcccattaacactttatgtttttcttccaacagctgacggaaaaagcaaaaattaacaaatatgtgactatccttcatctacctaaaaagggggatgatgtgaaaccaggaaccatgtgccaagttgcagggtggggcaggactcacaatagtgcatcttggtccgatactctgagagaagtcaatatcaccatcatagacagaaaagtctgcaatgatcgaaatcactataattttaaccctgtgattggaatgaatatggtttgtgctggaagcctccgaggtggaagagactcgtgcaatgtaagtaaaataagatcccacgtttcagctattgaattaagtcatgcagacagagaaaatgtaatgtcatgctttgttttgtcatggcactggcttctacaggatcctagagctttttgaaataagtttaataaaaccccagtcaaataaatgaatgctcgcagctcaagtgagtcattaatcaaaaataagaagttcactgctagtgcatggggtgacctactacatatttttgattttttacaaaaattactaagaagcaatgtttggtctcatttttcatgttaacatacgtagatctaaacttgaagatatacaacacttatgagagctgaagtcagggttcctcaaggccactcagtactctttccccatttcagtacattccctctccttccccactacgttcctctgccatttaacatcggcatgtctgaaatgtctgtcaagcctggctgaatatttccagccagaccccatagcttcctagagcttagtttaatctgcagcaaacttcaaagcatgactcataccagaaaatgtgtaagcttccatcctagaaccccctgagaagaggtgggatagggccatgcttaaagatgagaatagaagaaacattttgcagatttttaaactgagtactaccttgcatttctcatttgtcccaaagaccctatagagccttacctgaagaaaggtgtgcagtatgcatggtttggcagttaccagagactgagaaatccaaaggtctctgtccttccctagatctatgtcttgctttcagaaccaaagctagccaaatcccaggaaaagaaaacatttgtcttcagtacctgtccactttctcttctctgccctagttcccccattccctcccttgtccaccaccctgggttcccaggaacccagaaccttcatgcttttggaacccacatgcagcatcctaaggccacggcagcatcccaagacgctagtccccatcccaccagccacccgccaccaccgaaacttggcaatccttgcctgttctctcaacaccctggaattggctattgatgaattaaacctaaaggactaattctgcaaatgccagttactgtaacaggcaggggaaataaacctgttcagggaggatcccgggttccaacatggttctttatttcatatctttataaggccaacttttgcctgaaagggactgatttggttttgtttcttttggaaggcaattatctgctagaagaaccagaaaacatagtgtttattctttgcttcaatgtatcatctgcatttgactattttgccccttgagttattaagcattttgagaaaacgacaaataaacaggagactttcctttccaaaagcagagcaatagtctcaaaattagctgataacatgtacaagtttcacttcgattttcactggctcataaataaaccaagtgaaccaattcaaaaatattaaaatatttccaaacattttaatttttaaaattaaagcactatcttcaattaagtcaaggttggtcttaactgcatattaaatgctgcagaatttcttccatttcactagtggtaatgctgaacactgaccccacaccctacccctcttgttttcctccagggagattctggaagccctttgttgtgcgagggtgttttccgaggggtcacttcctttggccttgaaaataaatgcggagaccctcgtgggcctggtgtctatattcttctctcaaagaaacacctcaactggataattatgactatcaagggagcagtttaaataaccgtttcctttcatttactgtggcttcttaatcttttcacaaataaaatcaatttgcatgactgtacctgtttctctcttgtaaccttagtgggcagatctgcgccagcaaagtgaagcagagttacatggcagccttgtagataatgcaaggattacgtgatcaatgtcaccagagtcatttgtgcgtcaagtgacatgggaatgcttcctgaattattcatctctctgtctccatgaaatccagcaagaacaaccctaagatcaggtctaataacaaatgcagtaaaggcctccacaattccacaggaaacagaaacagccagtctggaacatttgtgttaaaaggaaatatagggcattgttccacattaacacctgcttttcatgttatacacaagaacctgagtctatgggagaaaaagaaacaagcaatgccttacggtattttccaaattctagggcatacaaataaagtgcttgggcagccaagaaaattatacaatagagagtcagccttctttctcagtgccttgcatttaagccttggattacctaggtgatttctcagttctctttgttcttgagacggggtagatccaatcaacatggtggttacagtggctgccatcccatagtagggagtgagtgttgacttgtagccagaaagttttctttggaaaaaaccgtcataatattttttcaacatagtgaatttagtaggtagtcatcagcctgcagtcatttcaagatgtgattatgtgaacagattctttccatttctatagtccctttagtaatataaattttatatatgtatattatatattatgtaatacaaatttcaatatatacatatattatatatgtatatacacatacacacatatatatacacatatacacacacatatatacatggataatacatattcaaaccaataacatacagcaacacaaagagacaggctcttaaaataaagtgcaaaaaaaaaaaaaaaccaacaacaaaggaaggagcatagctcaaagactggctaaaataatagtaaattcgttttcaaccatggtagttcattagactcaccaagctctttaaaattaccaatgcccaggtcccacctctagagattctgatttaattggtatttggtgggacccaggatgtagtattctttgtatgagctctccagtgattctaatatgcagccagggataagaacccttatactagaaaaggagatctggtgctactatataaaagagaggctctgagagagtaactacgatgatattttaaatacttgctacaatccctcattgctagttaggattttaactgcaaaaagaggatggaatattccctactgtcaatatgtattacagattttgaactctgtttaaaaaatggttgtatggaacccttgttaattgctggtagaagtgtaaattagtacaacttcataggaaaattggcagtgtctactaaaactcaacatatatataaacctatgacctagcaattccattcctgggtagatcccaaacacacatgagtgcttttatccaccaaagatgtgttctggaatgtacacagcagctttattcttggaagtcaaaactagaaataactcaaatatccacacacaataaaatggataaacaacgttacacaggcatacaataaaatattacacagcaatgaaaaagaacaaacttcagttttatgcaacacaaatttaatgttgaggaaaagtgagataaaaaagaatatgcatgatgagattccatttatctgaaagttggcataaggaaaaactaatccatggggatagcagtcagaaaaatgtagagctgctaactaggagggggtacgagggatccctttagggtactagagatgttcgtatcttgatctagatgttggttacacacttatttattcataaatttaaaactcatcaagctataaagacttatgtgctttactatatgtgaattattattctgtgaaaaaattttaattacaaaatttaaaaataaattgtagcccaggcttttgtgtgctatctgaaagcttacctttttctttatgaaaaccatattccaaatttcccaacaaaactaattgtagtaacagatatattaatatttttcttaaatgagagcctcttgttcacatgccagtattaattgagagaagtgctctttggtcatgacatagtgtcatgagagtattaaaacagaagtatccagaacagaatggcaggggacactggaaatggtctaatcattttgctcattttcttctaaacattttcttacaggtaatacctggcatattaggaagatcaaattaaaaccattaaagaagagtgtgcattgcagaaaactatcacatctgtggctttcagtggcctaaaattttctaaggcaagaattactaacattaccaaacagatctaaatttaaaaaacaggaaaaataaaaatatatattgacaaattaacactaatttaacagaagagtcctaaactcccctggtatataatattctacttttgaattcttaaagtttttgttttgttgtgttgattttgggggcatagggaataggtatgtattagtaaaaaaaattcatgtcaaagcaaaaaaaaataatcaaccaatatttgatatctggcatatgcagaacatatgaaggagcaccaaaaaatataacgcatgctccctcaagccctcaattcaaactcctcaggatgttaaaacaaaacaaccaacgattcaaacagtaataaaagatttttttaaacagctataatagtataataataccaaatagatgatacaggctaatgccaagaactcaaacccaggtaacatcatttcaaaacacttcctggagaggttaggacttgtgtgggtgtgtaaaggaaaaggagagagaagcaagaattcagattagaagaaaagctccaataaggcaagaaatcacaagacttagccaaagtcttaatataggagatgaatgtgaattaacattcaaaagacagaacagcgaactgatcaagtttgaaggaaccttagcagtgatcaaattcctatccttgcagatgttgcaacacatccaaggttacagggtgtatttatggcagagccaaggcaaaaaaagatctcctaacttcaagtcctgggctgaggactccagaggttgaggtcaaaggtgtttggtaataggttgtccttgagagttgatgagcaggggactgagaggatcagcacaggacttttagatgttcaacctagcagtggtgtggagtcaagaggatcagttctaagacaattacagcagactggctgtcaggcacacaggatgtgactaggtgaagcaaaagaaaagagagcaaagggtgaactgaggaagcacagagcagaataatcaggaggttccctgagtgggagaccaggataaggatgagaccatcaggaggggaaagggattcctacagaactgatttttagagagagcaatatgcatgcttaacatactgcctagcatatagtgagattttartaagtgtttttcaagtgaatgagttgtgttttcaatgtgttgagattgagctaaagacaggaaagtatctcaaaagggaactatcctgaggcaatcagaaatatgaggtttggagctggggagaaaagtcatacgggaaagaagtagaaatctttgctatagatgttattctgaataaagtagtgaaaatgaatctctagaaaggggtaagaatgggaggaagaagaggagggggaggaagaggggcagaaagaagaaagcagagaagaaaagaagcggatctctgggaagcagagcaagtaaagcaatctgcaaaagaagaacaggagaacaggcattcacatcaagaagagtatttcaacttgtttgatactcataaaaaccccatggagaagacatagccaacatcatcatcttcactcagaaataaggaaactgaaacctagaggggctgggtgctagtagcaattccatacagaggccgtcccatcagctgcagcagaaaacacccrggtctggtctggactcaaagmcaggtgcagcactctgcccctgtggcctgggggaagaaggaaagacagttcatactcctccacgttacatgggctgctgctcaggactgtaggcaatgtaagttggggccatgagtcccatcccaggataaagggctttcccacacccaccaggttcagagctgccaccaactgagccatgctgggagacagcagtcagggccgactgggacagttttctccctcagtgctcttgcccctgtatcagtgtcctgtggctgccataacaaattaccacccattgggtggcttaaaacaacagaaattgattctcacagttctggagatgggaagtctgaaatcatggggtcacaggggctgtgctccctagggaggctctcgaggggattccatgctttgcagctattggcagtcattgatttgtggccacatcactccaggctctgcctctgagaccacatctcctcctcttctgtgtgtcttttctcctctgtgtgtctctcacaaggatacttgccattggatttagggccacctggataatccaggatgattttatttccagatccttaatgacatctccaaatgcaatatttctgaataggtcccagtctgaggttccagagatttagcatgggtatcctttaggagaccatttatcagcctaccacacccttcatgccctatactgttgttagttctgtcttctctaatccaaccattcctacgaatgacagtgctatgctcctgccacatatcccagccttcccccagaagtatcccactgggccccaggtttcaataaactaatcagataaactgaagcagcttaatgaaaaaggaccaaaaaagctctcccacagagcatgcatgagccacacttaggaagttctggagataatacttctccttctgttaaattattatttgccaaagaacattctatggcacagtagtcctatgagaggttaataggtattaaaaacaaaaagactgtttaatgttcacactaatttggaagctttgagttaagaaaattaaacatttccttatttcaggatttcttcattttaggactactagaagcattacaaatgtttcggagatgaggcaacaayaggcagtacttctcagatttatctgaccacagagttcttttaatttgagcatctcaagggctagtgctccttggaaaatgctttgcaaaatctggcccaatccaacagtgactttaatgatcaaaactttaggccaaaataggtgaagctgactctatgaaaggagcctgaggctaggagaatgagggaggaaaggaggtcagatatggttttgagtgggtagctatttgtgggcacagctgaaatcaaactagatgggtggtcactgctcaaaggaccagtactgcctacgactcaattgagagctggaatttcagaaatgatcgtgtactctgatacaaggttctcagcagaaaggagtgtgaaaacactattccactcccaagagagacatatttgagatgcttattcttctacacacatcactcccaacactctcctttgtgcctgtccacgtgcatgcgcaagcacacacacacacacgcacacacacaccacacacacacgcaccagtaaaggatgcctccaaggggacatgggattggccctgggtgtgttgggacataaaaaagtttacatttataacracaatgcaggccccttattttataggtgagggaaaagatttggggataccaaatgtattgcccaaggtcacacagctaatcaatgacagagccagaactaggatccaattcaatgctgtgactattcagaccacactccaaaccctgatgaaagaatctcttttttttatggaagaccactgtctattatttaaaaaataataaaccatataaatgaaaagcaacttgatttagttgttttaaaaggataaatataggagacggacacagtggcacacgcctgcagtcccagctactcaggagggtcacttgaagcaaggtgtttgaggctacagtgcattatgatcaagcctgtgaatagccactgcactccagcctgggcaacatagaaagatccagcctcctaaaaagaagaggataaatatataatagaacattactctaatgcttttatttatttatttattttgaaacagggtctcactctgtcacccagactggagtgcagtggtgcaaacacagctcactgcagcctcaacctcctggactcaagtgatccttccacctcagtctctcaaatagctgggactatagagtgtgccaccatgtctggctaatttttgtaatttttctagaaatggagtctcaccatgttgcccaggctgtgctgatgcttttaaattaataagaaagaaaagtctattcaacaaatgtaataggtaataaatatgccttcactcttttgtgttatgatgaagaagagaaaaagggaaaaggaataatggtggggggaaatcccaatcttttccaaagcatgtactgaaaactatcttgacttaaaaactggaaagctacttttagaatttgttaggaaaatggcatttggactggacgcaaagacattcttgaagtttttctctcacatcagtgacaatcttaatttaccagatagtgggaaatgtcgtctttatctcggacaaaggtcctttttaggctttattttctcaagttctaagaatacagacactgaaagcatgaaaacgttgtcttctttctgcaactatagtcataaatgagaccacatattgatacatggaatgatgaaaccaagccaaaggccagatctcaccctataagctaaaaagctacctactcctattttaaagcttaaaaattacaactcttgagtaggtgggaataatcataagttacctttcttctgtagtcaggtgggtgaggtctctttaactgaaattttcccccmaaaaaaaatcatgactatggttaacagggtacggcttagtaaaggtgtgaccagaatctagaatagttttgttccaaactttgtgaccacaatccacagccaaaactatattttatgtagcaaccccatacacaggcacatacatgtactacataactataacataagtttcataaaatactacttaattttccattttcccatcctatactattctatttcactttttattgctgatcttgactcactacattcataatccaatggtcatgacccccagtttgaagaccctgatccagatctcagtcatcaggtgtatgtcaagagcgctgttcttgacccacaatggaaacacagcctcacaacgaaagccataaaaattaaatacctaggccaggggacacagcagtgctccctcagtgtgttcatggaacaagtacttcaagatgtcatccactacagatttcccaaatgtgtttgggaaacaacaaatgctatcaccttctcttggtgatgcacaacacacataatctatccaagcctttggaaggtccttaagaaagaaaacagtggccaggcatggtggctcatacctataatcccagcactttgggaggccgaggtgggtggatcacctaaggtcaggagttcgagcccagcctggccaacatggagaaaccccatctctactaaaaatacacacaaaaattagccaggcgtggtagttggcgcctgtagtcccagctacttgggaggctgaggcaggagaattgcttgaacttgggaggcggaggttgcagtgagccgagatggtgccattgagcttcagcctaggcaacagagtgagactctgtctcaaaaaaaataaataaaaagaaaaagaaaagaagaagaaaaaactgttctagcttaaccccaaatttccaaacttactgaccacatggtatgtttttgtattaacaactttgtatgtatgttttgtataactgctaaacacttttgagaaatactgtatgtagaagaaactaatgggttagagataaaaatgagtgtctaagagctcaaaagtaacctcatctccaactataagcattttaagagaaaaggttaaatgcactcttggaaattctaatattaatgaaaaaactcgcaaggagttaaaactaaagtacttatagcttgtgaggaccagagaaacaaggaaatacacctggtaagtacattctttattctaagcatcagcaaattgatttgaatatcctatcacatgcccccacctagctgaaggccatacctagctgctggaattagttttgtaaacaaccaggttttaaggcttgatttacaatacttctctaatctgaaaaggtccagggaattgcatgtcttttgattaaaaatatgaggattgactcatgctcttcctacacttgcacctgatcaccaaaatggctctgctaagagttccctgtattctgatccaggccacagagtgtgacagctgaagaatacaaaggtcattctgaggctgaggtccagtcgggctcatcatcagaggcaggaagtctatctgataaggctgtttcattgttgcccactaatattctcagaatctccaaagagagtcatggtattatcactacctaacattgcatatatttgttttctgcatgtctcctctcacaaaagtgtaggctccctgagggcaagaacattgtctctcttgttcacctgtgtatccccagcaccccaaaaagtacctcccacataatagatgcttcataaataaataatcaataagtaaacctcagggattggccaggaggccaggtgagtgaacagaggaaaaagacgggatatataatcagagttctacaagagattggatgccggtgccctgttcttgcatcgaccaccagttttgtcttcctgtttccctgggctgggtagagragatactctactcacccttgagccccctttaacattctagatgcacaaaagaggatttaaggcccagaggacagggcctgggtcttgctccccatcatggggtctttctctcaagaagtacccagtaaaagtttgtagaacgaagctgagaagagtagtggtctaccttgaaagggcagatgttcacagaggaagctcatggtcattagtggcctcctgacacataatgtcttgccctttcagatcgctttatcttccacccattctacaccgctggtttttcttcaaaataagatgatttgtgatgctaactcgagttcaaaaactgcccaagatcaccactccatcattcatatacatatgcaaggaggagatgacttaatttaaagtgatgaacaatcttaggcaaattcagaaacattcaactatacgctctctgaggtagggtggatgtaggactttttcctctgatgaaatgtgtacttagaaaaaccagaaggataaaatctttcattcagggcttttccccccaacaacagctcactttgctataggtgcatggcattttactcacccatttgcttaccaaaaaacccacctgacctggacacagtgggacaggtccacacagtcacatcattcttgggagtaccttgaccagttgcaatctcctttgtcttaggtagccagattaaggaacaaatctgtaataatgatcaaaaatagagaattcttgcaatttctgattccttatgaatatagttaaactggttacaggcagtatgcactgtccatgacccaacctccagtacagctggggtaggatgttaaagaaattacaaccattctaggaaagtttatcccaaggcaacaaaggatcaagtatacaaataggcttaggtgcaataaattgaagaatttaagtgaactgtgatcattggccaggaagagccagattactctcaaagttcatggtcaaagcagtgatggggaaagaaaggaaatgtgaaaaaaagaaaacacaaattatattaactttgaactcacaaatgaagaggtttttacaataaaaagaaactcttgagaactcaaattccttatggactcaatagagaaagagagcttrttgggggcataggctctgttgtaaactattttcacaagattccagaagatcaaaatgaagatgaagcccagaggagatattaacctgtgagtttgtgcttggggtctggatgctcttcccagcatttatatccaagatgtgtaagcgtccatccttcattcctcctccaatggcaaggaccccagactgccagggacaccaatccatggcctttaaagtttcacataatagcacagacaggtcagcttcaaaggaggtgcactcatgaatgtgatgcacttaggtaagcagcaagtccccacgtctgcacctgtcacagctctcctgggcctgctatctaaaggcaggagcaactgcaccctccagagattattcctcagggactagcagtcacttctggaagggaaggtacctaatacgactcaaatcaaattgttatcaaatgatgataacaattgtggattttttaacatagactatgcaataacagttgaaaaactacatgcaatacatcctatggggcaaaaatctgctgctgggatagttcacatgtgcccttgcaaattggctctgaaaatgcaggctttctctgatttgtctacctgtgtccttatgttccaggtagtggtcagataagagaaaagagaactatatgtgattgctcacaactcaacagtctcaagcacttcaaatcttaaagcagttcagaaaataaaaytgccttctatttatttataattatagttaattctaaaaaataggatttagtatcacacatttatattgataattgaaattactaataataatcactttaaaggacattttaacaaatactacagttatatgtatctgtgtatccttatcaatcatcttggtaactaccctcatttttgcatcctctcttctacacataaaaatattttataaagtagcaaacatcgtgtttatactatttgattattttctgttgttttcacctattgtataaacagttttccacgttttaatagacttttcacaattataatttttaacaatcccataatattccatcgtgtygttatatcctgattaatttttgttctgctaatgctggacctgttttggttttttgttgtattgtggtttgatttgtattgggttgggttaattttttttggaaaggagtattttttttgtttttgtgcgtgtgttttatttgctgtttgctctcataaagtayattgtaatgaatacattctacatgtctttttttctgacaaattttttaagtaaattccaaggttcaaaagagttgacataaagttttccaagcagttataactttttacagcaccagcatccaatgagtatactaatttcaccctggctaaaggttacatgaagttaaaaatgttattttacatctagtgaaattaaaatcattacaaaacagattataagggtaatttattttcttcttagcaagaatgaacttttttctgtgtatttatgttcctctagcacttcccaccatgtggattttttgccatctaagcacctacatcttaacgcttttcttacaagtttgagtccattttttaaaaacatacatctgaatatacaatagttgctctcattcttcatttaaccaacttgctaaatttaccaaagttctccactccttctgtaaaacatacttactcctacccatagcatgctagtcttctgttctctagaatgctccacacttctrctcccactaattaagctgtgggtttatagagcccactgtgttttgccaaacctgtttatgacaggtgaacttgttattataactgtgatttcatcaaattacatgtaaatgtttaattaaatcacctactttatttggactaaagatgactgttacttctatgaactaaattaaacaatttggaagtcttttctctttttttttttttaagacacagtctcactctgttgccgaggatggagtgcagtgctaccacaaagggtcaatgaagcctcaatctccctggggctcaagcgatccacctacctcagcctcccaaagtgctgggattacaggcatgagccactgcacctggcctcactctattttaaagattctgcggcagattgtattttccaaagatagctacaacactgtctttcatccaacaagtccttctgagcctcgcccattccctccatcaataggtacaatctaattcctctacctttgaatgtgggacttgtgactatcctggaaccaataaatgtgacaaaagtgacactgcatgaattgcaaaattaggttatattaataaaaggtgttaacgctttcaccttgctctctgaagcactggacctattgccctgaagcacaaactcccaactggcttgaggcaaccatgttgtgaggaaacccaaatcagcccacacaacatgaagatgctctggaattacaagaaggagcatgcccaggcagctggcaaacaagtggtccagcctcccacacttttagcttccgatgctgtctgactgcaacctcatgagtgatcctgagccagaactgctcagatgacattttcccagaatccttacccaggaaaccataaaagataatgaaatgattattgttttaagccactaagtttttgagtaatttgttgcacagcaatagataaccagacagatactataaacagaaaccttgaacaatgaaatatggttatagttcatacaagaaagacaatgaggaattctcatcagcctacctacactcaaagtagaggtcttggtctcatatggtgaattaatgtacggtttaataaatctggtgaatgtaatgttttcagtcaaaataaaatatctacaatatatatcataagttaaagttccctgctttaattgtctttttcaaataaccattctccacctctgattaggctggagaagagggctatttcacagaacacaaaattttgcaatttcaagaggctcagaaattcccctgagcccatgggccccagttttaccatatgatggataataattttttatatttattaataatcattttcttaaatatcctacacttccagatagcttttataataaatattttggcaaaactagaagctacaccatgagaggaatcacgcacatgtcaacctgcaaagtctactcctgctccacctgttggttagctggtgactgaagagacacgactggtgactgttcagtgattccccaggtgctgactgccaggaggcttggcttgctctggtttccggagactctctcttagtgaaaaggactcccatttagtagttcactgcatcagatttttgacaacaaggcatttaaaaaggtaacttgtcttgcttggcttgggttttcaactawttttttgttttgtttttgtatgttgttttcagacagcgtattttacatatattttgcctacttcaagtcatgaatactgggaatttggaccgatcatcattctcaatatcctgtagacatgaaaaactacaagccaggaatattgggccagtacaatgtagtggcagcagtcactatatatttcaacctatattaggaagccctgtaataacttttaaatcctcttgtaataaatttgcttactgttaataaggtagaaccatttctttgctctgtgagtgacatatattctgggactacgttgaggtcaagacacatctgtgtcaccaagtcctcaagaaggaaactatggaatttttttactagaaataagaatttaaaagagaaataaataattatgcagaacatggtggagcattgatctaattccacagcaccctgccatcttctgacagttgatctcttttcttacgtgtgagcttgtgacccaggcccatcagtgtgcccatctctctggccacaattattaactgagagatgagaatgtgaccaaaggcagactagagtcctccctggcacatttccaccagagttataaggaaaaatggcttcttatccagcgcccatctggaagaatctgaatctgaagctgccaagagccatcttgcccagaaaatgaagtctgaaggaagaatgaaaccagagataagcagagccaagagctaaaaagatgggcccaaatgacattactcaaagccttagatccagctgatatttaaaaccagctgtatgtacccagractccaaagttacatgaaaaaaatagatttacttttttgcttaagcttaagtttgactttggtttcagtcacctacaactaaaaaatctgaccagtggaaagtataaatagggttgtctttcaggagagtgatgacaaactccaaagcaaattctagagaaagaaaaatctcaaaatattggcttaatgattttctttttatatgtgaaggatacccagtggcctctgagtaacaggaaacctagaaatctattgggtttcttaccttgactgccgtagactgggttatgactttcagcggttggccctgtgcactggcacctggatcgtggggccatattgtcagcagtccatcactgcagccgctggaaagcagcctgccatccggtgaccacttcagagcacacacagcttgcttgtggcgaagtgttccmacatgatgctgggctacccgaacatcgtgatgataaacacgccccagtcttgacccactgcgagtttacataacaaaaaaattaagccctgttgctacataaacatttgaaaacatggaggaaagcatagttcaaagtaaaacttctgaaagacccctaggacagattcaaaacacaggtggagattccttgggttaataaggatggagtgttctgcctggaggattcttttcacaagtgaaattgatttgtctggcagagtttgaagtctagatttaaaaatatcctttgatagatgtttctaatgactttaatctgatgtaagcagcgatggaaaaataagctgagaagattaccagattttcccaaagastagtttatatacaggacctaggaaatattaacacttttctgcaactttgaatatttcagattatctcaacaaaatggtttcagtatatatttacagtaaaatgttagacatagaaaaargaaataaatatctaacaggtagagtcctattaacctatagatccattcttagttttgctaaagaactaaacttctttgtaaaagaagtttaaaaccaattgaatgtcacagcaaactgcaatatgattcctaakcagtggataatgtctccattcatgctcagtgatgtgaatctaaacaactaaagatcacatcactttttcaaagataatgaacgctttctggattaatttaattttctctaaggagtaagtaaatgatgttccacaattatttcagacatttctcaaagtccagtgtcgcattgtttaaaactatgcaatgctgaacagcattgtgattaacaatatgggctctggagccagaccagctgggttattccaactccatcacttactaaccatgtgacttcaggctagtgtcttagtttaatttgaaaaaacaaaattgaggataagagaccaccttatcatgttactgcagtgattaaaatgaaattacacacataaaaagtatagcacagtgcctggcacagagtagtctgaaaatgttagctgctattattataagaaaggatctgctcattttcctcgtggataatgaaactaaattttaacaatgcagattagaaaaggagcttgagtacataattgactgcaataactaagttgttttaagaccggccaaaaacacaagatattcaagtctcaagtttacatcarattacttaaatacattttaaaagtctttgggatggccaggcgcggtggctcacacctgtaatcccagcactttggcaggccgaggcaggtggatcacaaggtcaggagttcaagaccatcctggccaccatagtgaaaccccatctctactaaaaatacaaaaattacccaggcatggtggtgggcgcctgtagtcccagctactcgggaggtggaggttgcagtgagctgagatcacgccmctgaactccagcctaggtgacagagtgagattccatgtcaaaaaaaaaaaaaaaaaaaacagtctttgggatttatctaacttaagtctaccttaaccttaagaactacaatatgaaaatgaatggctatgattaaaagcaatatatatttagaccagttatgtaggctcataggaaaaagtcccttaatttttctggttaaaaagaagcagtkaaactaaatcactagttctcaaagggatgtatcatcagcatcacttgggaaatgagaaatgccaattatcagcccctcaagacctaatgaatctgaagtccctcaagtgaagccagcaatctgcattttgaggagctctccaggtgattctgatacatgttctagtttgagaactactgaacaggataatctatgaggttccttctgctctaatttctgtgggtctatgaattggaaatgtgycccagagagcttaacatattccatagtatagatactgacagcaataaatacttgatttcagcaaaatatccctttagtacctattacttagcacagagaaaccttttgcttgaagggattttcacattttatctgaacaatttagtgcatcccatgcagaaggcacacatgatacatgtggccaccaagacacttacatgaccagcagatctgaatacctgagagggtgggatcatacctgatattaagtccaatggcctattttgttttatttttgattggtttaggttttgaatattacaactgtttactcaggccccataatcaattgttaatacaaacataactgtctccaacaagacgcttcttacctgctgaggataaagtgattccagctcagagccccaactactgacaaatgaccaagcatatttctcagccgctttttagttaccacatcccataactgaaaaaatgaacaaggagagttatgtagcattggagttttcacagcccactgtcttctcaaaggcctgagagccaattactgctgatattgttagtttttgtactaagtgaaaacccagcacatctagccagcagttctcaattctgactgtgtattaggatcagctggggagtctataacactatggatgctgatttagttggtagagtagagcctggggatatatggcagttgttttaaagctccccakgtgaattcaatgtgcagccaagggttgagaattattaccacatttctagctccttctaaattgtgagaattccaaatctggaaatctacccacagttaccaacaaatgtattaataagatgtgggtacccggacacttcctagaatcagtaattccacttactgctaagagactcccttcctgcgagctacagataatattctgatccacatggggaatgacaactttggtgtaagaagaaatcatgacatagacttcacagcattcattatcattgcagagatgagaaagcagtgagagagccatctgtggccctcctaagtcatttgcacatgagtgatattgtttattctattggtaataaacaataataatgatacatgagaaatcagatagattgatggaaatttgataaatccccatctcaaggagcctatcagaaaaaaaaattcactcattttctataactgtactcttaatcacggcttcaggtgaaaaggagaactgaaagtatcttcctctctccaaagctccaaaactggagattctacaagcccaactttagtttcagagaaaatatatttttaaatatgacagaaagattgtggtggaaactaaccagagtatccttacgttttcattaaaaaccattcagtaaaaaaaaaaaaaaaaaagcggaatgtcatctccttttattccccatacttcaagagccacacctagtttctctattttacattaacttgttattaaaagtcaattatagtgtaataatacacagagaacatgatgagaaaaaaaaaaactggccagtacttgcacttctccctcgctggtgccaactgccaggcaagttccctcttttatccaggacacagaagagatatagttacaagtgagacttaagtctatgttttcaatcccattgtggttctccccattccagatgtatacagcagagcccagggctatggcaacaagattctgaaaactccaatctaggatattcagatctataagaaaagcacttcaaattagtataattatacagccacatgaaaacatgttcaaataaacaactttataggtagggggaaaagaataataccatccccatggttagctggaaaatggaaacatggaaccatgaaaatccttaaaagttcaaaaatgaaaagtggaatagaatctagtgtcaacactcacagtctaataagcaataatgcttattatttacactgaaatatatttatttagagccatttaaagaacttggcagattcatctaccattattagtacatgtagacttcgtttaacggatcagtaaaagttaaaagcatataattcttatggagacactcttggacctaggatatctatatgggagatgccaccatcatttctaaccaaaaacaccacccagctagaagaggtggtggttcatgtatgatacctacacgttctcaacagtattctatagcttatactaataagaaacctttgactgctaagagaaaacatatttgtatgaccatttattaaaatataccctatcttatttcttatcagtcagaaactcctgactgacacgtatcagtataaaactaagtagcacaccagttcccctacagtagtttaaacccctacaatacattccgtccccatgataaatataaactctgaatgaaatataaaaaacaaacacctggagatcctgtaaagtaaggaaaagcagtaaactaagtaagggagtcaaaatttggagaagcaaactggcggggggtaagtttcccacttttcttctttcacacctttgccctgaggacaggccccattgatggagtgccagcgaagactctgacaaaaaggccaccatatttctggtcagagaaaccatggaaaagagcctgaggcatagaactgataccagtatgagggaaaagtcctagacatgggaaagccaaaagaaagagatcctctgagtgtgagtatattaattcacacacatctcagccttacccctaaatcacctacatgcagaagagactcaaatcaccttagtaaaggctttaagaaacgaactgagatttgaaacatccatacaagtctcagcctaggctctgatccacatgtatgagatacagacccaaaccagcatggtcaaagtttaagaaactgatctaagatttgaaacaccacccacaaatggcaagacaaaacttaaaatgtgaacctaactagaacaaaaacatcaaccagaacaaaacatcaacattctccacaggacccagtgactataacataacatctacaatatccagacacaattcaaaattactggataaatgtaaagacaaaacataaccaatagatgaaaactccaaggtgacctaggtatagaaattatcaaagactttaaagcagccattatattctccatgaagtgaagaaaaacacacatgaaatgaatgaaaatttatatgaaactttatatgaagctttaacagataaacagaaaaatcaaaagtattttctaagtaaagaaaatagaaaccataaaacaaagctctaaaatggaaatcaaatatacaaaaaccacaaaatacaaactttaaaatggaaaaatataatatctgaaaaattccttggatacactgaatagcaggatagaggtgatagaggaaagagtaaacttgaatatagataacagaaattattcaatctaaagaatgtggagaaaaaatttcttaaagaatgaagcctcagcgaattgtggaataatatccaaaaatctaacatatgtgtaagtagagycaggtcttagaagcaggataacaaggygaccatggggttctcaccagataccatggaggccacagtcaatggaacaacatcttttaaatgctgggggtagggggcagtggtggatctttcaacccagaattctatatccagcaaaaatctcatcaactggaagatggaaaatctaacagaagtctgtgccaactgacctgatctgcaagaactgctaaaggaagctcttcaggctaaagggacaatatatgaaagagaaacttggatcttcagaaatgaaggagaacactgaaattggtaaatatttgggtgaacataggagccattttttcctcttaagctatttaaatactttttaaattttaaaacgtttacaattggatggttttcagtgtatgtaaatataaaatgcatgacaggccagacacagtgtctcacacctgtaatcccagcactttgggaggccaaggtgggaggatcacttgagcccaaagagttcaagaccagcctgaggagtaaagtaagaccccatctctataaaaaatcaaaaaattacctgggcatggtgatatgtgcctgtgggcccagctacttgggaggctaaggcaggaggatcacttgagcccaggaggtagaggccacagtaagcctctacagcctccagcctgaaccactgcactccagcctgggtgacagagtgaaaacctccctcaaaacctccctcaaaaaacaataacaaacaaacaaacacatgacaactacaataacctaaaaagtagtggggactttgagagacctatgtgattgcaagatgtttatatattgtgtgatgtgtacaatagtaactctacgtagactaagaaagttaaaattacattgtaatccctagaaaaatgacgacaaaacmcaatacaaagagatatagccaaaaagctaagaycaattaaaatagaacagaagtaaaaaaagaaaagatgtccaaggaacaggccttgggtactccaacatttagaggtcagggaaatggaagagaaacmcaaatcagcaaaaaaggatgagaaagagtgaacaaaagacactcttggacaaaacccaaaagagtgggatatcaagaaggagggattgatcagctgtctcaaatatagttgttagggttcggtatgaagtctaagaagtaactgttggctataacaatgaggagttctttggtaatgtttggaagagtagtttcaattgaatgatgagacttaaaacttgactagagtggatttgagacaatatggggagagaaatagaaaattataagtataaagatcttttgaaagttgtactgtcaaagggaggaaagaaagagggctgtgcgtctgggcatggtggcttatgcctgtaatcccagcactttgggaggccaaggcaggcggatcacttgaggtcaggagttcgagactagcctggccaatatggtgaaactccatctctactaaaaatacaaaaattagccaggcatggtgcacatgcctgtagctacacgcccagctactcaagaggctgaggcacgagaattgcttaaacccaggaggcggaggctgcagtgagccactgcactccagcctgggtgacaaagcaagactctgtttaaaaaaaaagaaagaaagaaaaagggctgtggcttaaaggaaaaatgggaacaaacattgtttctttttaatataacagttttttaacattttttgaaaatgcatccttcttagttggtcatgacaatacattctcttggagaaggagctgaaggaatagggagatagagaactgttcccttcagggatttttctttttccagctcatgcctctttttagatattccatggagcccagaccccttccctctgctcctctctccctcatctagggagcttacactggctcctggattcaatcataatcatctgacctacgggctagtccatcctctttcaactaccagcattcgtttcaaataatctgccaaactgcttctatgtctgattgtctcctttaaaataatattcaagcatagtctttcctctccaaatcacctcctctgccaatctgtcttctcagtgacaccacccttctttctcctgcttcaaaaacttggaataatcatgaattcatttctcatcccatttcttttcttcatggaggaaaaataagcctttactctttggcagctctttcctactaagtgcattctgcatactctgccatgaattttcctttgatgtttctcttagtcaacaactcccaaaacaaatctaaatttctgaatttgaatttttctccataatctgtacccacctattcaccagtccccaatgtatcttcttcattgccattaaatatcttaattaccaacatcctgccttcttcatgctgttaacaataccaaaaatggtccttctcctctatacctttccaagttctaaygatcttccaagacccagcttaagtataaatatctccacaacgtctttctggacaacaccgaagctcactaagctccttctagtctttatagctccttatatcccatgatttattatttataatctaccttggcatatggtatcagttccgtgtcagttagtcctgtcctccaaactagattacaagctgggcacataacaagtagacccaatgcagttgtttgactgattcgatttacccatatttaaaatacatacataagaatagaccatcattagtacaattctttctaatacagtaacataaaatgtatatttcccacaccatgccaacattaacaataccatccctaaatatgaaagttgcaccaggaaaagccaagtatattagccatatttggatgctacactatttggatatgagacataaaggccatctggtttaatcaaatttcaagtttataccagagcacaggatgcattttgtcatttcaacttttaattcccaatctaaatgataacttacagtagtcatttcgaagaccagtaatatgaatcttcacctctggttggagtatggaatcgtttatatcaccagaacttttaagatggaaggattcatctctgactccatctttgcagcctacaagaaacaaacacttctacacagctctaagatcctgaaaatataatatttattcttgtgggaattaagaaataacattaagtgaaaaagcttaattaagtggaaaataagtagtcatcatgataaaactacagtacaaagagccggggaaggaaggaaatgaagagcacttcagtattaatttaaacaagaagattaaaatttttttcaatgacacttcctactaaaaagcacatgcatacagacctgaatgtagaagatagatcttgtgaggagtacacagagatactacatcatgctttgaatatttattctgttatttgggattttaaaaccaaagtgaattttgcttttccacaccaagacttacctggtacacctatgccctactctgagacttcatcaataaatatttattgattcgttgattttagctctttctctcaatatttcagtattggagcacacagactccaatactggagtattgttaatatatttatagttggaatcatacaatatttagttttttcagattgtctgcttttggttaattttacccatgactatctaaggtcagtattctatcttttgttcagttctcatcaaaagacyatactaagttcaaaccacaggccgctgtcttttcatctccaaccactcagcttgtgatcaaactgagaatgataaaatcaaaagaaaccaagaccacccaggtgacttgtggtgtctatgaccagatggcttctgataaaagcatgagagcttcacaatgctacaccaagaaaccaaattgttactcataaattcctgcttccgtgttagctatgaaaacctgtagytgagggcaaaactgcaagattactaaaaatacttaggcttgctgataaagtatcaacaaggttaaaaaaaaaatcaatacccaaagaatgaacaaaaaaactcctggggctgggcacggtggctcatgcctgtaatctcagcactttaggagctgaggcaggcagattgcctgagcccaggagtttgagacccacctgggcaacacggtgaaaccctgtcactacaaaaaatgcagaaattagccaggcatgctggtacatgcctgtagtcccagctacttgggtggcttaggtgggaggatcacttgagccaggagcgccactccacatcagcctgggtgacagagtgaggttctgtctctaaaaaaaataaaaaataagacatgaagaaaccttaaatgcatattactaagtgaaagaagacaatctgaaaaaactaaatattgtatgattccaactatatgacattctggaaaaggaaaaactatagatacagtaaaaaggtttctatgggaaggggagagacggatgaacagacaaagcagtgagcatttttagggaaatgaaactattctgtatactataatagtgatacatgtcattatacattggtcaaacccatagaatacataacatcargaatgaactctaatgtaaactatggacttttggtgaccatgatgtgtcagtgtaggttcattgattgtaacaaatgtaccactctggtgggagatgttgataacgggggaggctgtgcatgtgtggtgacaagggatataagggaacctgcaccttctgcctaactttgctgtgaacctaaaacaaatctaaataataaagtgtatgtgtgtgtgtgtgtctatatatatatatayacagagagagaaagagagagggagagagagagactcctaaaatatcagaataatataggtacattatctctggcttcatagaacatatatttttttattctaagccaaatactcagcaccttacagaaacaaaaacttgttgctgtttaggacaaaagacgagggagctgaggaaagacatgtccccacatattttattttgcttttaagaaaatatcattctaaggaaaagacaaggttcacactctcatcccaaccatatattcccaaacccccaaaagaacatttagaaggcctgaaattttgtgcctatttttatgcatctaactcaatttttttcccctttttactgctgggaaacagacgcttgaggaataaacatgcacaaagttctagctagaagcttgtccaatctgcagcccacagggcacatgcagcccaggagggctttgaatgcagcccaacacaaatttgtaaactttgtaaaaacactgagatttttttgtgattttttttttttttttttttttagctcatcagctatctttagtattagtgtattctatatgtggcccaaaacaatccttcttccaatgtggcccagggaagccaaaagattggacacctctgtatttagaagttaaaagtgtgtatctatgtgttatctacataatttttaaaagaaaatttccaaaaaaaatatttttttttttgagacagagtctcactctgtcasccaagctagagagcagtggcacggtctcagctcactgcaacttccgcctccctggttcaagcaattctcctgcctcagcctcccgagtagctgggactacaggcacccgccaccacgcctggctaatttttgtgtgtatttttagtagagacagggtttcactatgttggccaggctggtctcgaactcctgacctcgtgatccacctgcctcggcctcccaaagtgctgggattataggcgtgaaccactgtgcccagccccaaaaaatatttttaataaaaaattgggacacggcaggtgcagtggttcacacctgtaatcccagcactttgggaggccaaggtgggcagatcatttgtggccagagttcaagaccagcctgggcaacatggtgaaaccctgcctctactaaaagtacaaaaattggccaggtgtggtagcacaggcctgtaatccccactattcaggaagctgaggcaggagaattgcttcaacccgggaggtggaggttgccatgagccaagatcacactactgcactccagcctggacgatagagcaagacttcatctcaaaaaaaaaaaaaaaaattaggacaagccataaaaatagaagtctactttagcattgaggatttctgtctccttgttcacatttatttttgagaccttgccaaagcaccccatggatatgcttaccagaacttattccagaggggaaatgtagcaggcaagtttccttggcatttatgaaatgaaccacgctagttctctcaagaggattctcacacakaattctggctcccaaacaattattttccagccatgacaataatctcatgaataacacaaaaacgtccatgatggcaacagaaagtaggaatgaaaacacatggggctcagggtcaaaagactttgggaggccaagcacagtggctcatgcctataatctcagtattttggaaggctgaggcgggtggagcatctgaggtcaggagttggagaccagtctggccaacatggtgaaaccccttctctactaaaaatacaaaaattagctgggcatggtggtgtgtgcctgtaatcccaagctgagacaggagaatcgcttgaacccgggagacagaggttgcagtgaactgagatcgcgccactgcactccagcttgggcaacagagcgagactctgtctcaaaaaaaaaaaaaaaaagaaagaaagcactgagagctccaaatgtagcatggaacaggaccttctagaaaytgccacaggcaattatctccccactgcatggctacagagcttccctgataacgctcacaacaccaccatccaaagtttcctaccagctttgggcaaagaggtacacctgaaagtttacaggggctgcctgctgtaaggtttcagagtcattagatatggacaaggcataaagaattgctttatatacacagcatttggataacatttgtccccgtgatccactgatgagcaattacttggcttatgtgggatctgtttcatagtttaagttcccttaaaagaatcaacaacagagccttgcatagagtattcagagrgcctctcaattagtctttgccaccaacatcctcctgttcaaatcgtttcttcatgctgccactaaagtgatytatgggaaggggagagacataggtaagtcaagtcaagttggaggaatggccatgtaagtttatttcctctgcctcytattttcaacctaagtacagcaaatgacttttttaaggggtgaagacacaagaacaaacactrtgggagtgaatatagcagtgggcaagagagcccaataattttctagacagtggataaaggattaataactgaccaagaagagcataagaaactacccctcaagtgcctgcaaagggagacagtgaagagaaacaagctgatttgccttgcaaaatcccacaagggctccgaggcacagagaagactgagaggtgggttagttaaaagactgtcaagttcccacacatacacacacaccctgcccaaccaagtaaatacagacacacatatatggatataccagaagaaaccagatgtttattctctggataaataaaaatgacaattttttaattcaatagcgccaggcaccatggagatgtatgaaacaaaaaaatagattttgagttaaaaaaaaaaaaaaaaagacagagctcactctgtcgcccaggctggagtgcagtggcgtgrtttcggctcactacaacctccgcctcccaggttcaagtgattctcctgcctcaatctcccaagtagctgggattacaggcgtgagccactatgttcagctaatttttgtgtttttactagagatggggtctcaccatgttggccaggctggtctcgaactcctggtttcaagtgatccactgcctcggcctcccaaaatgctaagattgcaggcttgacccaccgcgcctatactaatatctttatactgaatttaccctggtactctttaacctacgaaaggagaactaagctctttaccctagtactatttttaaaacagcacacctttcaggaaagttttcactctgagagaagccaaagtaaatggggggttggagggagagaaaaccaaagcaaaggaaaacaacacagagagcacagaagtacttctaaaaatctataaaataatattgtcagagatataggagaagatagtatatccatgaagcatgaacaggatgctgtaaaaaaaaaaaaaggaacagagtacagaaattgcttttaaaaaattaaaagtaggatagccaaaataaaaagtttcatagcgaggttggtgaacagagttgaggaaatcacccaaaaggtttaaaaataaaaaagtgagatgaaaaatagaagataaaagataagagaattggagagtcaatccaggatatttcataaagaaggaaaaaataaatgacaataaaaaaaatattaaaaaataattcaagcaactttccaagaactataggatatggatctccaagaatgaaaatatccaccaatgggcttttgatttacaatgagtttttttttttaatgccaagctttatcatcatgaaatcttagaacactggtgataaaagacttttctaagagcatcaagagagaaaaagcaaagttgaagtcaaattaacacatgacttctcaacagcaacagtggatactagaaaaccataaagcaatattgtcaaaattctgagtgagactagaatttatagccagccaaactatgaatcaagcataaaagaaaaataaggacatcttcagaccagcaaacccagaaagagcacaacatagctgcccaaaaatagtggatataatattgatgaaaagtcccagaagacaactgtgcaactggccaagaaagcagcctgttcagcaggctctgaaagggaggacatcaaggaaaagaagaaactggagtgagtgagtgcatggaaaatgttattgacagctacggaataaaacattggagcatttagaggaaatattaatggtgtcatagttatctagtaaatgaaaactaaggcaacttttaatactcagctaaacaattatactagaaaagaagcataattatattatttggcttgatagtgaataatagttgtgtagtaatatgatgtaaacattaactactaattttacttttttaaagtgtgatataagcaygtygagaaactgatgaaactgaatgaggcaggaagagaactaaattcttatctactatgcctgtaatcccagcactttgggaggctgaggcaggagggtcacttgcggccaggagttcgagaccagccatggccaacatggtgaaacccaactctactaaaaatacaaaaaaattaaccaggcatggtggtgcatgcctataatcccagctactcagggagctgaggcatgagagtcctttgaacccgggaggcaaaggttgcagtgagccaagatcgcaccactgcactccagcctgagcaacaccaaaaacaaaaaagtcatgattaagtctaaaatcacaagaaatagtagtttaccaatattatttagaaaatagatgtaaataccaggaggacagctggaagaactaaaggtggtcacctatagagaatgggacttggaggtaggggtagttagaacagaggattatgagaattattcatattttacaattaggttgatttagtctagtaaatattaaaaataatatattttaagattaggaagaaatgaaggaggcagagagagaggagcgcaggaaagaaggacaatgtcttgatcctgtacctttccaaacacattcggattgctcacagagctgcatttttccattagcctgctgaaccacgttctgggttacaaagagttgttttaggcatttctgaaaataaacacacataaggagaatatttctttaaaaacatacatgtacaactaaaatgtaatgtataatatagaattacaactggtaattcactaaggagttcaaagattccacattgtcaaagccaacaccacaataatcgctattatttattaactaaacaatatattatgaacagtgctgagcattttacatatattatttctcaactatggagttcaacaactccatagagcaggtattttttggctagaataaaatctttttttactcttctagcctaaaaatctgtttagcctatacaccataggccagtgatatcagcaaagcctgccacagctgaatggccatcttaaggtccttttttgttaacaccttcacagagctcttaagtaactttactaaaattccatgtgcacaaaaatctgggtcccatccctttgggccaatatataaagagcccttctgacactcttacatccaacttcaatcaaaaacacctgggaaaattagtaataagtggaaagaaaaataactgttggaatttcctaaaaacatagtgataaatgattaaagcagagaagattctgttttgcttcttcacaataaaatatttgctctcccaaatatgacaaacactgtgtcaggttcagaactaygccaaaggtcatgttgaggtctggagggagtgggtggatgagcagaaagaacactttggggggccgtaggcaggtgaatgattttattcagcagcagctctcatcaacagctttcttacactagctctctacactgttcacctttatcttggctgcttaattgatgacccacacacacagctgcaagactggctctcccttgccttcagggtcagcagcttaacactttctttctctgggcacgagcaagccaagctgtgtcctggctcccctcatccatctgcaaagacagctctggctttctctttctccaggtgccagcttctgcacagtgtcaacagggcaattataccttttacggacaatagtggcttagagccaagtgatggccttcccggtgttataactatagtggtgagcttctctatgttgtgtctacatggctatgatgacaagtggagttatacgcctgtgctctatactcactgagtcrcgaagaatgtaaacatcctacctcggcctatccttgaccaaagcacagccatgttccttacactctgggtccccacggttcagacagaagtctctctgacagacaacattttggtattttgtttttcttccttgatgttatgtcacataattggcattgctgtcaatgaatcgtggtttttagttattcaaggtagaacaactaactagaaagcagggtttcccaatcttggcactatgggcaacaattcattgttgtgggagctgttctgtgcattgtaggatgtttagcagtaacccaggccttcacccacaagatgctctccccctgagttgtaacaatgaaatgtctttagatattgccaaatgccccttggtgagtaaaatcaccctgagttgagaaccgttagtataaaataatattcctaaaatggcctgctcatcagtagttcaatgaactcttcacagactcacttctttagaatcccacagttaccacaaagctgatcacagcaaggtttagcaggcgcttctgttctgtgggtgcaggggtgctctttcctagatgagatcgacttactactttaatcagcaacttaatatggagctcctggaagatgaattctgaaagtctccacggctatgcaggccctcgttgtggaaacaccctccagatgatcagtgaggaccacatgaagacacacgtttactctacaggggaaagacctcgctttgagtcttcaccactctcgatgctatttgacttctaactaatcatgacaaaaaatgctctccttaacaccatagaacagcttccattatcccctgcccaggttcttcagtgatgctgggatgatgttccagctggtataacaattgctaaggagtatcttgccaacaccatcatgagcccacagatggagccactaaccttgctgccaccagttaccagaaaggataagaggaargaaaaggaagtcttaaggggtagggcagcaaaaactccaatcagcagtagagggtggaaaacacaggagtgtcaataatctggcccatgtttgaggccaccagtgcaccctaattatctcagtaggactccccggccattccctatcccccaaacccatatccaacaataaagcacacatcaaaatacctgctctaaaacattcacttccaattgcatatgagttcagataactaaaatttatatgaacaatattttattattcttctagcaaaatagccaagcacagaaaaaggcatacactgaataagtaattttgcctaaattgagaatttatgacttttctagttcaaagctttcgaactgaaayatggattccttcaaagactcttcattggatttgataaattcaaaaacatgctgttgatatttaatgtgcccaaaagatttacgtcagactcctaagatcttaaaactataataaataaaagatacctaaatgtaataaatgtacttaaccaagaaaaaaacaaacaacaagaaaggcttaagggaaatatttaaaagaccatcatatagagcaataattcaacttttcctaagagaccccaaaggacagatcacatcatcaaatagttggaaatgatgacagcaagagatccttaggctaagaggaagcataccgtaataagtataatttcattatatttttaacctttacctstttgtaaagataaaatagttattctcattttcacttttttaattaatcccaactcaacattttctcatatatttgggggatatcttctttcttttacaaagtggctctattcatatccttcaattattcattttttatcaggaatgcatcattttcttattgattggtaagagaactaagcaactcttcccttacatttgcaactaagttgtctcagcttctctagatgtgggatcttcagtttttttctctttacctacctgcccttttgaggcaacactttctttccagtctctgtccattgcatgaggtgccttgcaaaaatggagagcagagttacttgtttcagaaattcctttgctgggggtcttcagttgttctttgcrggatcctacaagaaagacatttatctttgaatttggtttttaaaacmagataatcactttgattgtaggtctggctgtggcatctttcacagaaggacagagtgaaaaagcccaggctctcgtcactccaaagtccattgcagagagcaggacagagtgaaaaagcccaggctctcgtcgctccaaagtccattgcagagagcagtacagaatcctatccagactgctgacttcataaggttgtcactcaatgagaaagctgtctcagtggcctctagagcagggaagaggtgccaagattaaagacctgacttcatttgctgcagcagcagtgtgaatgctttatctctgtatggaaaaaaaaaaaaaaaaaccagatttgcacatttgaagaatggatagaaacagttccatagttttaaatgrtagtggaaagagtatctggtttgcccgagctatggtcatcctgcaaggaaaacattaygggatgcttgctttgccagcattgacattcactacataatcatgagcaaatcactttgcctctctcccmctttctattgcagaaagatgttttaaagatagtttaagatggcatcagtgaaatactttctaagttaaagtaatagaagggtcaatgttacttgcatcaatattattcctatctactctcttctcaagattgagaaagccctttaccagactttcaactgccctggaaacctgtcaagtcattctctaaaactaaatatctgccatatcacttgttcatcacaggagccaagggaccattggaaaatcttagccttttgccatgtgacaatctcttcttcatttggacaaccatgagcttgataaattctcactaatgttcctagagcctagtaccttaagtactgggacattcaaaatttaagcaatatatattacatttagggagaagaaggataaaaatatgaaatgctggtcaaagttttagatcttgctctttgtcctgagaaattatgcatgcttgctttcttgtgctatttgtaaaagtgtacaggggagaaaaagccagctctcagaacttcaaatgagaaagaaaaagttgcagtcagaggctagtactgacaatcrtcacagttatatacaaagaggtcaggtccatcagcctaagaaagaagggacctctcaggttctgtccacagagcatgactgaaaatgaacctctctgtaaatgtccctttggaatgggaggatcttcagtatctgctcttctaaaacaaaaagaaagaaaccccactagcaaagcactgagaaaccagtagatctgattaatccctagtattaacttcagtagaaaataaaatggtctttcttgtaaaatcctttttgttaatatctgatttctgaatttctcacacaatgtcatacttttttaaaaaatcaataaattaattaagaacctagaaagtaaaagggagcccctaattttagccagaaattcttccaaaaacaatcagcatcaaaactgtccctcaattgcaatgagatacaaaagatttctttcagaagatagtcataacaatgtttttcacaaccctttatctcctactgcttccctcctcggttattaaatactttcagtattaaagcctgtcgttacatgggaatttcattgatttgaaaaaaatctgggctctctttcaatctgcagaactgcaatgcatcatcatgtctgatgtcattgaaaagagttggcacttctattaacatttgtcttaataaatacgctgatagtcaaaagaattatgttgcctaggattctcaaaagaaagaatgggaattacatcagctgatgataggtggcaaattttgcttctgaaggatgggaatgaaaatgtctgtgcccaaatgagaattacatatttcagaaagagagtttgtgtttcggggctctggcaggttgatcatggatcctgcccatcacactggtggtttggagcccactcccccatctctgccccaacataggcatcagactgtctctcactctcctttccttccctcttcttcttccctactactcttggaggttcttctttcttctttcttcytcctcctcctcctctgtctcctcctctcttctctctttctctttgtctctctccccccatccatcccctcatccctctctcttgcttccttcctcttactttctcttcctctcattctctcctgcttctgtctttttcttccatttcacatctgattattccattactaacgcataattttttctgactctgtataccagtaaccttaccagtcattaaaattctatactttgcaaaacaaaagcacatatatatgtgtgtatgtgtacatatacatatatacatatacattcatacaatctttacaaaagtaatcatctaaccaatgcaagtctcaaaaacatattaaaattaagctaaattttgcctgaggatgtaggatgagtccctacatctyaaactgcaacctaacttgggatgtaaactaactgaaagcctaacttagctgagtctccgccaatcacwgaagctgagcttcagtcaatcacaggcggccaactaatcagaccacgtgcaaataaggcgaactgagctgtagccaatcaggccggctcctacrcacttccaattcctatccataaatgctgcccgcccccacatggagtggctctctggttgcccattggccaacggttctttgcacaattaactttgtaaaatttaatttgtctaaagttttgtttttgtttttgtttttaaayacatacagtacctttcctttgtttttgtgtcatttctccccaccttggaaatttcttattcaaagggagaaaaagagaaaagagttgactcaaagtgacactccttagttctacaagacaaagattctctcaggaatatatcttttattcacgttscaaaacggggctgtggcgtttggggcacctcacctagagtcaaggtctctttctcaggcggtgtcttcagcactgatccggaagcttctgggaggtaggwggttgactgctcttccccaaaggaatcagaggacagagccctagtttgactttgctgccaccttgtggtaatggggctactcgcaacaggaacctctgcggacagcctcttcgcaaagttgctcttaaagtcagaatacgtagcattaactgaatcgagtacctgtttaacaacaaaaacagctgtaagtccactggcctcagtgatgcaaaagtaaaaattccctataagagaattacaaatgactcatctagtacaacaccaataaaatatatataatgagatttttttaatttttgtaacctagatattattttatatatttgtatatatttttgtatatagttatacgtaaaatgttatattttatagttacatattatataaacataaatatgttatrttttatatatttatatattatataaacataaatatgttgttttatatatttatatattatataaacataaatatgttgttttatatatttatatattatataaacataaatatgttatgttttatatatttatatattatataaacataaatatgttatgttttatatatttatatattatataaacataagtatgttgttttatatatttatatattatataaacataagtatgttatgttttatatatttatatttatatataaaatatgttatattttatatatttttatattgatatttatatacaaaagttatattttatgtttatatttataaaacatgttattttatatgtatttatatataaaaatgttacgtatttttatatatttatgtgtaaactgttacatttttatatgtatttatgtgtaaaatgttatttttttatgtttatatgtgaaatatattattttatatgtaaaatagatatatatttcttctatctaaaaaacaccaaaatgccactacttacttagagcctctgctcaagggtctgtaggtataccaatgtagtttagggagtaattacatttataaatattaccattacatatcagtgtaaaatatgacatatgatataacactatgtactgaacatgcaagatgtttgtatgaaatgataaaatttcaaatctggatataaacagcaattttctagtccaaacccttcatttcacagatggggaagctgaggcctagagaaagtaagtgatttgctcaacatctgtccatcttctctaagaaacaccaggagtttgatatttatagagcctgtagtagtgaaccatcccatgtagccatgtgaaattaaaatgcaagtgacaaactggaattatcttttaataaaatgacagacaatttagattaaaatcctagtcataaagagctcttatagaaattgacaagtttaccaactcaacagaaaaactgggccataggacattaaaaagacaattcataaaagagatatataaatgcccaaaagatatttaatctcactagcaatcaaagaaatgcaaatttaaaacagcaatgagatgttagcaataatttttttgtgacaatccctggtgttgaaggtgccaaaaacaaacactggcatacactgctgtggaggttaaattagtatctggaaaggacttttggacaatgtgcgtcaaaagccttcatatatgtgcataacttctactgacccagcaatatcacctctaagaatttaaaaaagaaatcagccggccgtggcggctcatgcttgaaatcgtagctctttgtgaggctgaggcaggcagattgcttgagcccaggtgttcgggaccagcctgggcaacaagacaaaaccctgtctctacaaaaaatacaagaatgagttgagcgtggtggtgtgtacttgtagtcctagctacttgatggggctgaggcaggaggattgcttgctgcagtgagccgcattggcgctgctgcactccagcctrggcgacaaagtgagaccctgtctcaaaataaaaacaaaaaaagaaaaaagaaatctaagatatgagccaagatggagaaaacatccagcatttattgagtagttactatgtatgaaaccrtatgtacagggttttacacgtttgtatttaatcctaagaaacatctgtgaagcagatcttatttacgcccattttatcagtgaagaaactgaggcttagaggtcaagtgaattgtccaagactacacagtaagtggcgatgccacacctgaggctcacctgtctgaccccagagtccaggctctcaactgagaacatgagggtgtgtactgcattttacatgtttgtaagtacaaaaagatgtgagacagagactaagwgtttaccagtggagaactgactaggcaaactaacaggacatctctaagagggactgctctgctgccatcagaaatgacatacattagggaaatgtaaactaarccacaccaaagcaccacttcacacccacgaggatggctagaatttttttaatggaaactaataagcattggtaaggatgcgaagaaactggaatctttgtacattgcaagtgtacagaatgtgaaaggatgcagtcattgtggaagattagtttggtgatacctcaaaaagataaacctagaattaccacatgaccaagcaagtccactcataggtatatgtactcaaactcaaattcatgtgcacatatgttcatagtagcactaatcacaataagaaggtgcagacarcccaaacactcatcaacagatgaatgcataaacaaatcatgggacgtatctacatatgcaagtgatctacatatcactcccaagaggaatgagttgctgatacatgtcataatctgcataagccttgaaagcattatgctaagtgaaagaagccagacaggaaaggtcacatattgtgtgattccatctatatgaaatagtcagcacaggaaaatccataggcggagaacacagattggtcattgtcagggattaggggaggaggaaatggggagcaactgcttaatgggtatggagttttcttttgaggtgatgaaaacattttggaacaagagagaagtggtggttccagaacattggaaatacactaaagaccactgaattggtgacttaaaaggttatttttggccaggtgcagtggctcacacctgtaatcccaacactttgggagactgaggtgagttaatcacctgaggtcaggagttcaagaccagcctgaccaatatgatgaaaccccatctctactaaaaatacaaaaattagccagccgtggtggcatgtgcctgtaatcccagctacttgggaggctgacaagagaatcgcttgaacccaggaggcagaggttgcagtgagccgagatcgcaccattgcactccagcctgggcaacaagagtgaaaccccgtctcaaaaaaataaataaawaattaaaaaataaaggtttttttaaatatgtgcatttcacttcaataaaagaaatctttttaaaaatggtaacrtaggataatagtgaataaaacatgcaaatgcttacaatatattgctagctgtaaaacagggactataaaagagtattccaatacagtcctacttcctagctctaaatgaaagataggaagggaatatgctagaatgttgaagcagtaagcattggttcagtttgggttttttactaagcgtgtgtgagggtgctggcccaccctgcctgcagcccccagggggcgaggccggctctctctccactgctgctctgtgctctccccaccagctgaccaaagagaacttctttcgcagaagacaggagccaagaggctgaggccacagctgttgtaaagtgttgttgggggtcagtttttctgtcttgtagttcttggtttttgagtaggaatgggaaggatgaaaagaggctgtacatgtcaatcaggcatctcaatctcagaaaccttgactagggggcagcaggtaaggtgatgagtaatgccagcctggatgagaagcatggcccactctggccttcttttttgttttgctttgttattttgaggcagtctcactctgtcacctaggctggagtgcagcggcacaatcatggctcaccgcagtctcgacctcccagagctcaagcgatcctcctgcctcaagctcaccagtagctgggactacaggtgtgcaccaccacacctggctaatttttgtgttttttggagagacggggtttcaccatgttgcccaggctggtctttaactcctgggctcaagcaatactcccacctaagcccccaaaagtgctaggattacaagtatgaggcccctcacagggccactcgaactttcatttccccacttttttatttctctccgctaagaaaaaaaccgcagtaccagctcagaggctttggggtctcagccccagaaactgagggaatctctcaaactttaatgcttgtgttttagccacagcaagaacacattgagacacatcgtctcatttcataaaagatattagaaatttagacttttcatatgaattttcccactttttaaagtgttcaactgattctaatttttcaaaaagactggaggactcaacagagcatgtctgtgggccacattcagtgggctacatttgcaacggctccactatgtccaggtagcccttaccctcacaggtaccaagaaagggaggagacaccgcattggaagataaacttagtttgcagaaaacatggcagaggacagagacacttgctcaaaagtttccttagagcaaaattccaaagaaattctaaactttaaatatacatttttaaaattctgggtttaaaagaggaaattaaagaataataattggatgctatgtcagctatgtctgcgaaaacaacatgagaagttgcacgttaacaatatcctaccgccttagcaggtctgagtttctgtgattcgtctaccgtcactctgtccaccccaaatgtttcccacttaggatgttcatccccagttttctgccagggtaaatcccagccaccttcacttctgggttcagccatcaactccttcaggaaggtgtctctgacattcccttcctcccgattccaaactagattaggcagccaatggtagctaaataatggtccctagagagatccagatcctaacccctggaacctataaatgttacttcatatggcaaaggggctatgcagatgtaagttcaggatgaagttaagttgaggtgaggagactattgtgaattgtcaggatgagccctaaatgcaatcacatgtatccctgtaagaggaaggcagagggagatgtgactgcacacagaaaaggagcagcaatgtgaccaaagaggcagtgaccggagtgatagggccacaggccaagaaatgctggcagtcaccagaaaccagaagaggcaaggaatggattctccactagagcctctggaggaggccaggccctgctgacaccccagcttctgcccaatgaaactgagtttggacctctggcctccgtaactagaagagaatatgtgtgtctaagctacaaagtttctggtaatttgttgcagcagccctagggaacaaatactcagccctgtgcttccacactcactgtgcatgctccagcatgaccaccttgtgctaataacatttaccaaacacttaatccgtgccaagccctgggatatatgaatcrgagggagtgtytattttagtttcatcacaaccctctgaaataggtactagtattatttcagaatacagagttggaagacaaatcttaatggggttaggtaattttagcaaggatatagagctaataggcagctgtacactacatacagctgtatagatcattgtctctatgaatggcaccctctggaatatgcagtgcacaaccctcacaaccaaccagagcaaccctgccacagtttgaactctgacaaatcaatctagtctaatccctatgctaaaaagcaggtctgctcatattccacttttttactttctctcctgctatatcatacactccttaagaccagggactttgtcttttatcttactatcctcgggacattggtatctagaaaccccataatgaataaatagatgaatctcttcccctagaggcagttagtactaaaaaggcacaaggcatttgagaaagaatccagaggcaaggaaataagctgttttcatccttctccattaaggagaacaattctcagggcaggcacggtggctcacgcttataatcccagcacttggggaggccaaggcaggtggatggcttgagctcaggagttcaagaccagcctcgacaatgtggcgaaaccccatctgaacaaaaaatacaaaaattagctgggcacggtggtgtgtgcctatagtcccagctgttcaggagactgaggtgggaggatggcttgagcccagaaggcagaggttgcagtgagccaagatcgtgctactgctctccaacctgggcgatatagccagaccttgtctcataaaaaaaaaaaaaaaaaaaaaaargaacaattttcaaattgtacagagtaaaataaacatttctgcagaaattagagaatgagataaatgaaacaacaaaagtgtatctgggcttttaaaacaagttcaagtctgtagggccaaataaataaaacccagagtaatgacagcactttcagaaccaatacttgttagtgatctatgagcaaaacatgacaaataagaaaaatacatgccccctgatagatatatgtattatttttcatggttctccaataggagaagcaagtaactagtaataaatttgctgccagtgtcctagatggcacaagtcagcagatccacgttagcctgaataaatccccccggggtggactgaagggtttagtctctggccttctgctattcaacttgttatcagcagcttgaatggagatttatttatcaaaattgttgattactctaagctgaaaatatagttaaaatactaaaggacagaatagaattcagaataaagtctgggacaagggccaaagcagcaaaatttaattcaataaagttgcatgaacaatattcttatttagattttttttcttcattgcacaggcataagatggaagagaatcaacatgcagtgaaaaagattggcagtgttaggcagaccccactacaatatgagcaaacagtatggtgaaattattgtaaaaaatcagtacgattttaggtcccattaacagaaaaatagtgtccagaacaggagcaatctaaactctgtgtctctgcaccgctcagaacacatctggagaaccacgtccagtcccagaactgttcttcaagaagggagatggacaagtcaggattcgaaccctgagttcatttggaggaaagagaccacagtgacaggggtcaaggtaaacaccgtaatgggacaacacyccagcacatccaagggtggaaacctggggtgcttagtctaggagaaagaagattcaaaagggtctggcgcagtggcttacacctgtactctaagcattttggggggccagtgcagagggggaatcacttgaggccaggagttccagaccaggctgggcaagtgagaccccatctctaaaataaaaatcaaaaaactagctgggcatggtggcacgcacctgtggcccagctacttgggaggctaaggtgggaggattgcttgatcctgggaggtcgacgctgcagtgagccatgatcatgccactgcactgcagcctgggtgacagagtgagaccgtgtctcccaagaaaaaagaaaaaagaggaaaacccaaaaggaactgtcttcaaatatttaaagggatgcaatttatgaataaaagaaaaacttactttatattgctccctgtgatacaaccaggacccatgaaggggtagattcaattcagagaactttgaaagagagcacagtttgaatataaagtaaaattctctcagtccctgcactagggacatatggttcatagtggtatagatgaacactaataattatgtatttaatgtcattttataatttttcaggtttgatgtaaagttttccttagaaaaattaattttagaaaaataaattgtatttaawtactcatttgttagtatgagtattaaaatgttaagcaaataaacgatatacagatatggcaaaatcacagaggtggtactccttcaatgactgcagtgaaggaaacactgctgcagattgtgctatttcatcttcagtatttttaaacttctgttccaggatctatctcctgccaaggaaatgcctgtcgcatagttttgaatgactcaagtatttattaatagaaaggaagaggaagataagaaaagtaagacaaagaagggaaaagggatgaatgactcggtactccaagcacatcagttcagcttgtttacctgtagagttcacatcatagtgacattaaaccaggaggaattcagagcaccagtgccaaaaataattagaaaaggacccagaggggttaaaaataaggtcaggaagtagcagaatgaaacaactgagaaaatagaaacaaatatgtctactgacaaataatttgacacacaaatatccagtgggttggaaaaacctagacatcccagaaaagacctgctggcgatgctagtcttgctagaacctcaagagaaagataaaagtagcaaagacagcccaggtagctctgaagcataccccaaccccgttccttaacctctgagtgtgtgccgctcccacccaccaccagcccaatgcagcagcattctgtccacaagatgtttcaaatgtagggtctcaatactatttcaaattagtcatgaagaccaaaatgttcatcgtctcatgtttgaactttcaacgccctcccatcctagtaggcaatatgacccacacactgtcaaggtcattttcaggtaaacatcatcctttatctctatcgccagcagctgcccgcagggtctacagagcatctttagcacccacccccttccttccatcatgctggccaaggctaccttcactaagactcttcgcctatcatctggacctgctgctctgcagacctcccgtggccccttccagataacttcagtacacacagaaaagccttttggtggtgttctccatgccttcccctttctgggcgcttatacagtgatttcttataaaacaaaatgcctcctcacgaatgaaaccccttgtattagtctgttctcatgctgctaataaagacatacctgaggctgggtaatttataaaggaaagagatttaatggactyacagttccacatggctagggagtcctcacaatcatggcagaaggtgaatgaggagcaaaggcatgtcttacatggcagcaggcaaaagcttgtgctgaagaactcccatttataaaaccatcagatctcgtgagacttattcactaccacaagaacagtataggggtaactacccccatgatttagttatctccatctggccccacccttcatatgtggggattattacaattcaaggtgagatttgggtggggacacagccaaaccatatgacccctccaccagagtactacagccatctcacctacaatgttttcttctaaataaatttattcacctattacacagaaacagtttcatgaagttgaaataattttggttatgaagtcgaaagttcaaaactctattcttcattgttccattcactaattctgtgatcttggctgagttaactgctccctatttcaaagaattactgtgaagaaggtaatgtgtctactaaagaagattgtgtgcagtataaagctctctaaaaacataagtcactggccaggcatggtggctcatgcctgtaatcccagcactttgtgaggccgaggcgggcagctcacgagatcaggagttcatgaccagcctgactaatatggtgaaaccccatcactactaaaaatacaaaaattagccgggcattttggcgcgtgcctgtagtcccagctactcgggaggctgaggccggagaatcactcaaacccaagagatggaggttgcagtgagccgaggttgcaccactgcactccagtctagccgacagagtgagattctgtctcaaaaaataataataataaataaaaaaataagtcatttatttagcactcagttatttactgccttgtaatccttccgtttcwtgtgtgttctcatatttccaaaattgcttttacagttgcatgaggctggctccttcccttgcaccttatttgtatcctttccagtgcttgagttggttgataactgagtcaactactttatgcccttcttgacccagtagcttcctcttgccttcatcatgaactcatcaatctcttctcctcctatagaagccttccttcatttactgaaagagcgctggtggtttttctaacatactaccccttatgcagagaaatgtgccattttgatatatgtatagtctgagaatagagttagtatagacagaacatgaaaacaataatggtggatccccagaaggctgagagatgatgacatcaaaatgtgtgcagagaaagactgccaaaacaacaaagaagaggtgtgacagggccaaaatctgtgttcatccaatgctgtccagcgcacaagttctccaaagtgctgtctgaatgtttggttaatgggtcagtatgaaaatttatatatcatgccttcattatttgaagctcttaagccttaggaacattaaattaacaaactggctctgatttcatccttgacaggagatatayacgtaagttttcaaagttgtattcatataatatggaattttgtggtgaaaccaacctcaacatcaggcctgcataatgttttatttctggtgtaaaaactggcttattcagcaatcacaagcaagtttgtaacagcataattttggcattttcaaatccattcatctctggatcacttgataagagtttctgtacttataatacaatggactagaaactatcacagtgattttatcaaaataatatcaccctagggggccctgcctaagcggtggtcagtcaacatccctgccaaagataaatcactctctttccacctcaaaacacagttataatgacttgggtttacacggctcaaattacagcaggtattctatgaattaattttaaaatgcatgttcctaagccatttgcttgtacagcctgaggagttaaaatatctcgtgtattcatagagacatgaacacatccactatggaaaacaaagacaaaccaaagactcttgttgctctgaaaccaaaaaaagtttgaggtctaaaggttctcaaacttaaacgtgtgtatgtgtcatgaggagatcctgtaaaagtacagattctgactcgggaagtctggggtggggcccaaaatgctgtgtttctaacaaatgcccaggtgatggtactgtggaaggtcccagatcccacttagagagcaaggccagagagcttaagcaacatagcagtgttcatgtcatataaacacagggactttgactttttaaacaattcagccagagaacaccaaagtaaaattatcaggaagtgatacaacacatcttacatacatttttgttctttactaggaattatgtttaaaagggaatactttctgcataatcattgctttttctactgtatccattcttactgagccatgagagtaggagtcgagcggttcctctcacaagttttacacagtaggctatgggctttgctcagccacccgaaaacacacatgccacagagcgggaaccagaagagcaggcagcaccctgagcaccctctctgaagctccacaagctaacagtgacaggaagggcactccacaaacatctcagctcattccctgcactttctggaaacacatcatgatcaaatggcataatgccccttcatccagatcttgccatgagtcttaaacagagcagaattgaaagtgaatggcttttaggatatacagccctcaattgcctccccatacctacccctaaaattcatgaccgttagcaacagcaaagttaggccccctgtgccaggcaacagccaggggagggaaataaagagaaaaaacgaagcaattagatgacgtgcccaagtagaggtgggttttgcagggtttgtttgttttcagggattttttttggtagaattgccttatttaactgttaaattactactttattatcgagttcaatttttgcttttttccctcttcttcttttgttctgattttaagatagtctcactctgtcacccaggctgcagtctacaaacacgactcactgcagcctcaacctcctgggatcaagcgatcctcccacctttgccacctgtataactgggaccacagccatgcaccaccacaaccagctaattaaawttcttttttagagacaggggtatcgctttcttgcccaagttggtcttgaactcatgggctcaagtgatcctcccatctaggcctcccaaagtgctgggattacaggcgtgagccaccatgcccggcctcagttttttccatctacaggttgtagtgcatcggtgaatgatgaaatcattttgataggtcagaactgggttgtttaaaaatgcaacaggtgggggtgcatcacagttcaaaggagaagtgttgtttctcagttgtgtgttgtttgtacccagttatgttgtaaagtgcactgctgactgggggtcatgagtagaaatttgaaaaacactggactatagtttgctctatgatagagaagggtttcttttaacaccttcactgtttttaacatatttattttgactgtattcacytggtatttgattgccttagctagatgaatcagggtaaatagcctttttcagatatttccctgctctttccactataaatttcctgaactcatatagcatgtttaacccatacatgtaatagtaacgtccttcagggtatacaccatatgagtaggtcacatttaatctacattctaaactattgctgagcatcgtactccatcctctgcatccaaacagttgctcaataaatacacagcttagcatggggaatgagccctccgtagctttcgagttacaagagcaccatcttctggcgaaatattttctttgtagggagaatgtcaaagacctaccaaaaatgtcctgatttttctagcaaaaattataattacatcacaaatactttgaaattctgtagagctccttgcttcattcaggagtttcgcttcatttcccctctgagaagtggtctttctgttccttagcagtgaaagcagtcagcctgtccttcctggttttccgttaaactaagccggtttcaagtttcagctcctccttgaattccaggctgctgagacttccctctagaatcctccaacatggagcctcttgcagcttacccgctaaaatgttccgggcccagagcaaaggtatttgcagttttgctgtctatagttctatgcacagtaacgctatttcttctacaactaaaattcctcaaacctaaaatcaacagcttttatgcctttgaagtgaaggatgcaaaaggaagaactgtttctctggaaaagtataaaggcaaagtaagttgcatcatctgatttttattgttatcatttttccttgtctctgtttattcctcttaataaaatcaattttttgctgttacatggtcataagttggaatttagtcttcagagtaatggtattagtacatcactttagttattacagttctgatagtttgcttctaaataataaattccgattatctcgttttctttaaaatgctttaattttgtgctgaattgacatgtaaagttgtttggaaaatacttatagttagtaatgtgaacatgatgacatttattaataaaagtattggttctataatctaataactttaaaaagaacttatcaaggatcatagttttatctttaatttaaaaataaactttcatgagtatctaatgcttttttaatggcagtactatttcagggccttaacccaggcatctaggttacagttttcaatagaactgtgtatgtccaaaaatatgaaaaaaacatcaatcagaggttatagtcccccscaaattgtttaggattttaactacttgcagaattttttaaaatcttttgcttcactttccggttggatttttttctttttccgggaggtttcactagttgtaaacgtggccagtgaytgccaactcacagacagaaattacttagggctgaaggaactgcacaaagagtttggaccatcccacttcagcgtgttggcttttccctgcaatcagtttggagaatcggagccccgcccaagcaaggaagtagaatcttttgcaagaaaaaactacggagtaactttccccatcttccacaagattaagattctaggatctgaaggagaacctgcatttagatttcttgttggtaaatatctgccttgcatatgctgttttaaattgcttttcatttttaaacaattataccaggacaatactttcctatttcatttgaaacgttgtatcgggaaagcttcataaaactatcatcaaagagccagaatctcatcctttgtaacttstaggagttatgctcccctgaaatcaatgttttagcttcttagatggtaaaagaattctattccaatatattttattccttattaccatcttcctgaagaatttacttaaagtgtgcccatggctattttcacaaaatatcttaattctcctctcttgtaactagcatctggagaaatgtcccttcccgtcattatagccacacagctctcatgaatagtgctgggcattattagttaacatatgtttgtggctaattttatgttgtctttcttatctgaaacaatattctcaaagatgaatatgtcagcttaccagatttttgctaaaatccaaaaacatataacttggttttttcagagggcagtagtgttaggctatttctccaattaagctagctacagaaatctgtttaaagacttgccaaggtcacttagcacaaaggtcatgaggcatacagacagcataggctttggcctcaagctacctgggttcaaacccctgctcttttgtttttgctatgtggcttcttaacttctctgtgcctgtttctcatttgtaaaatgggctatcaatagtaccgccttcttaagattgtttggaattaagtctgttaatagtaaaaataaagtacttatacactgcttgctctgtgccagacactgttytaaaccatattagtcaaaaaaaaaaaaaaaaaaaaaaaggccgggcgcggtggctcacgcctgtaatcccagcactttaggaggccgaggcaggcagatcacttaaggtcaggagttagagactagcctggccaatatggtgaaaccccatctctattaatagtacaaaaattagccaggtgtggtggtgggcacctgtaatcccagctattcaggaggctgaggcaggagaatcgcttgaacccagaggcagaggttgcagtgagctgaaatcgcgctactgcactccagcctgggcgacagagcaagcctgcatcttaaataaataaataaaggacattagctaatgttctctcatctaacttattctgatgacatcttcagtcctattttcactgtaaataagttgagttttgatcaaactattacctcactcaggcaatcaagcttctaatccaacaaaccaaatagtgatctataatatttcacataaatgtgaagtcagaatcttctaaaaacattatatttaatttctagggaaagttgatataatgcctaacgccataaatggcaaccacagtgaggtctttattcctcttattttgaaggtccactgaggaaagaaaagcccaagcacatgccattgaactaatcattcttcagttacagcagccagatacgtgggtgcaatagctcataggttatttctctttatcactacaaaccttctaaaacccttcttagcctgtgtaatcaaaaaggtaacagtgagttaaggtgtcattccacttagataggaaggatcatagagcccaaaggttaagagcatgagctctggagtaaaaggcccgtatatcaaycctggctcaaccactcattagccacgtgaccttgtgtctaggcttccatttatctcatctgcaaaacggggatgataataatacccacctcatagggtccctgtaagattaaaagagaggatcaatttgaagcacggagcrtacattaatctggcacatagtaagcacttcataaattttagttataattattatatttttcctcatgttagtcaataaaatgaacataaatcttgagtggtataaatagaaaaaaaatctacatttcttacataaattaagatttatcaaaaggatatcatggctgggcatggtagctcatgcatgtaatcccagcactttgggaggccaagacaggaggatcactttagtgcccaggagttcaagcccatcccgggcaacacagcgagaccctgccaaaaaaaaagttattgcttttcaaaataaggtgattattcactttgggaggccaaaaccctatctctactcaaaatacaaaaatttgcctggtgtggtggcacacacctgtaatcccagcaatttgggattacaactttgcttcattttttttggcttttaattttatttgacacagagtttcactcttgtcccccaggctggagggcagtggtgtggtctcagctcactgcaacctccacctcccaggttcaaatgattctactgtctcagcctcccgagtagctgggattacaggtgcacaccaccacacccggctaattttttgtatttttagtagagatggggtttcaccgtgttgggcaggctggtcttaaactcctgatcttaggtgatccacccgcctcagcctcccaaagtgctgggattacagactgagccacggctcccagcctactttgcttcatttcttgatactaagatcacatactagatgagtagactcataggtgaagtcatcaagtatattgaaatctggttactctaaccttgagtttcacttcgtttgggtgttttgttttttatattatgacagtcctagaacttgatactaaagttatcatttatgcagatactaatagaagtgaaaatcttgacaaagaataaaattatgctcatgaaaatatgttctggatattttagattcttcaaagaaggaaccaaggtggaatttttggaagtatcttgtcaaccctgagggtcaagttgtgaagttctggargccagaggagcccattgaagtcatcaggcctgacatagcagctctggttagacaagtgatcataaaaaagaaagaggatctatgagaatgccattgcrtttctaatagaacagagaaatgtctccatgagggtttggtctcattttaaacattttttttttggagacagtgtctcactctgtcacccaggctggagtgcagtagygcgttctcagctcattgcaacctctgcctttttaaacatgctattaaatgtggcaatgaaggatttttttttaatgttatcttgctattaagtggtaatgaatgttcccaggatgaggatgttacccaaagcaaaaatcaagagtagccaaagaatcaacatgaaatatattaactacttcctctgaccatactaaagaattcagaatacacagtgaccaatgtgcctcaatatcttattgttcaacttgacattttctaggactgtacttgatgaaaatgccaacacactagaccactctttggattcaagagcactgtgtatgactgaaatttctggaataactgtaaatggttatgttaatggaataaaacacaaatgttgaaaaatgtaaaatatatatacatagattcaaatccttatatatgtrtgcttgttttgtgtacaggattttgttttttctttttaagtacaggttcctagtgttttactataactgtcactatgtatgtaactgacatatataaatagtcatttataaatgaccgtattataacatttgaaaaagtcttcatcattttcagtatttctctctgcattattttttagaagcaactcaaattctgtaatcataatattaccaagtaagtcagtctttatttttgcgtgaaaatcccaagtgtagaaaaaaggacatgagtataagatcatttaacttgattccttataggctgatttgggttgctaatgtattcgtactagattagccacttgggaggaattcaatgctgcatcattctgatagctgaaatagtaaaagtcaactccaaacagcctaaattctagtataaaaagggggtgatcatacaagtcctaaagtgtagatcagcagtcactgaacctcttagagtcacaaggcatttcttctcccaaagtcatgacctttatattttgttagccttataattgactaacaaagcaacctgccaagttggtgaaggttaattattgcctcatgaaatatacattcatcgcataaaagaattaaataggaagatggccaaaaatgtaaaaaagtcgtataaatttgtctaagaagaaaaagacccaatttaagtagtctgtgacttgactcccaaattctgacctgatggatgaaagtgaagatgtttcgtatggcaaattcagtaatgctacctcagtatatagttctgtatacgtatttggaccaaagttattagataaaccaaaaatatttcatgaagcatcttctgcttcagagtccatatccagccacccagctatgaatgtatttagaaagatatttggtggaggtggaatttctaccagaggtcaagaggatttgtagggatagcctcaagaatgccagatgagtgtgtcagaaagcctgctcctacctctcgccagctgcgtgactttaggcaagtcacttaagtaccttatttcagtttcctcacctgtaaattgaacaggggttgaatggaataaaaagccctttgcaactctaaaagtcaattaacacacttactaaggtgttttaagtgaccaggaaggaaatcagaactaacctggattgttagcgaagaaaacagaagccaccaacaagcctatctgtcctttgcaattttgctccaagagcctattagcaatttgaattctgagcctctaagaaaacttatgctcaggtggcccctccaagtgttggtgccagagcactcttgccttgtatcctcacctacgccttccatgaactcatagcagtgctgtggcactgcaggggtgttttatgcattcacgttaggrgcatgagcagaactgcatatgccagcaccacatgggcagcagagactccccactgccagatggatgataatggagctgcactgggaacaaccaggactgtcccagtcaacatgatacagatgaacatcctgccttaagtcactagctctctccaaagccagataaagtgggtttcttcacttacatctctctaatcttggctgccttattcaacctacagactctatgtcagtgctggattttctccccttgccctttaggtaagcagagtaggcaggaggagatttgaaagcgtgtcatacatattgccttgaaagaaaggacattcaggtgtcccttcggggttctgtaacaattaggctatgtgtgctgagagagggagcggagtcatttgctgatgtgctgctacctgtaactcaaatgcctcataggaataccagcggacaaacacatagaggaaaagttgaatctttcctatattggacaatcytccttcagtcttgtttctgcatcaaaaagtctgggacacagagtgctacaggatgcctgggctaaggactgtaacagaaaaatatcaacatcagagcctggcacagtggctcacaccggtaatcccagcactttgggaggccgaggcgggtggatcacttcaggtcaggagttcgagaccatcctggccaacatggtgaaacccccatctctactaaaaatacaaaaattagccgggcacggtggcacatgcctgtaatcccagctacytgggaggctgagtcagaagaatcacttgaaaacaggaggctgaggttgcaatgagccaagattgcaccactgcactccaacctgggcaacagagcgagaccccatcttaaagaccctgtctcaaaaaagagagaaaaagaaaaagaaaaatatcaggcatcacatgaaagagtattcagctgtcrttcttgtgaaaaaggaaaaggacaaaatcaaatgcattttaactgtggtaactaattcactgacttgaagtttgctttgtttgttttctttggtgcgtagagaagaatacttcatactaactcctgatcatcttacagcagacataacaacagagtgttagagactggaataaatatgaatttggctgaaatgtgccctgaaagttgtatttcatttttttaaatgtttaacaattacactgtatcaatagtatatatacgtgtacatatatataattcttaataactgcagtgtatctagcatatatataatggtggctggtacatgtttaatagcagactctggaggaggaatcctgacatacagcatttgccagctcaatgtaaatgctcatgctccctcatggtcaatttcaatctaccactggtttagtaactaggatgcaaaatttctaaaaatgtgataattggtgatgggcatgatggctcaggcctgtaatatcagcactttaagcagctgaggtgggaggatcacttgagcccaggagttagagaccagcctggggcaacatggcaaaaccctgtctccacaaaaaaaatcaaaaaattagctgggtgtagtggcacatgcctcaggtcccagctacataggaggctgaggtggaaggattgcttgagcccaaagaggtcaaggctgcagtgagccgacatggctccactgaactccaggctgggcaacagagcgagaccccatctctacaaaaaaaatttttaaattagccaggtgyggtagcacacacctgtggttccagctactcaggaggctgaggtgagaggattgcttaagcccaggaggtagaggctgtagtgagccatgattgcaccacattgatttgtggtgttcctttgaaagaaaaatgacatgtttgggtggagctgatatgaggacactctatccatatttagtcctctgcttgattttatctttcccatcaaataaaattctaataattgttaggcctagaaactaatccaccacactccttcccactcttcccttcccctcatccagctgaactgttaaggctgtctcttgcagagcagtgcaggggaataaaaagcagcagagagagagaaattaggaagctatcactataatagtgacaggttcagagggcagcgatgggaagtagtgacattcccagcaccagtgaacagccaagagactgccccaagagaaaacacctgggagaaaatactttgccatcagcagaacctccctcctctttttaccatcccttttccctctgcttgacccttgacatcccagtgtgtatccctttctttccctctcccacctatggaaacattttctcttttaatttgtatcttcactttcctcctaacccattcatctctttaacatattttttatttctttaacatatttttatttcattccattccttccctcttttctcatcatctcgataatatgagactaaaccacaactttaaatgtcttctgtttattgaatataaagttggtttccctacagaatcaaaagttctaaaaaagaaaacttaaaaaaatttaagttggcattttcagaaacagaaaatcaattacggcatgttcctcacttctaagtgggagctaaacaatgggtacacatggacatgaagatggaaacagtagacactggggactccagaaggggtagaaggaaggaatacaaggactgaaaaactatctattgggtacaatgttcactatttgggtgataggttcactagaagcccaaaccccagcatcgcctattatatttatgtaacaaacctgcacatgtaccccctggatctaaaataaaataaagttggcattttatatcttgctctttaatttaaaaaaactaacacacaaaagccaaagcttctaaatttagtaggttttatttttatcactaggtcagtgattctttatagaaaataacatgttgaaatttaaccttaaaaaaagacaagatgaaaataatatttacatggaagatatacttaaacataaatctcctgaaagtgaataacactgggcaacatcaaaaagaggatgtgatttgaaagtagtaaaatgcgtaagaatcaaattatagatatctatttaacccatgttctagaaatatgtttaaataaggaaagcataaaaattattttaccaataacttataatccagtacagtagagaatgcgaaatatttcttatatctcatctatggcttaactaactgatggcaccaccaaagtcagttccactgactggctgcaaatgtccgcacaagaatactgcatgtctggaagccagcacatatctatgctacttcgtgggtcaaaatgcctccaaggtaatgagaatatatttaaggtcatattgtatggtcagttcttcccacttcacaagttgttagatctcatgctgtcttccaaatatttcatgaacctgtgattttacagaaaatgaagtgaaaggattgaggtagatcttccaaaaaaatgtaaaccatcccccacccaaaaaaaatccccaatattcttgatatttcaagtgaaaaatgttttagttgactgactcatctggaaaattacctcaactttcccttcagttggtacacacacagtcatggctatagaaaccaattctaatgctgtatttagaaactaatgatgcagaggccgggcgcagtggctcacgcctgtaatcccagcactttgggaggccgaggcgggtggatcacgaggtcaggagatcgagaccatcccagctaacacggtgaaaccccgtctctactaaaaatacaaaaaaattagccgggcatggtagcaggcgcctgtagtcccagctactccagaggctgaggcaggagaatggcgtgaacccgggaggcggagcttgcagtgagccgagatcgcgccactgtactccagcctgggcgacaaagcgagactccgtctcaaaaaaaaaaaagaaagaaactaataatgcagaaagaatcctaaagacttcactgaaaatytggggacacattgtaggtccattccacattgttattacattctaaaccttatagttaaaaacatgtaatttcataaatacttaaacactgtctactccgaaagactccaaagactccaaaaatatttcttaaaaatttttagttatggaaaagcaggcataagtaaatttttcttaaaaggaaaaaatttaagtaattgtaatactttccttaccattataaaactgtgcattgtaagtattactgtattataagctaatggcaataatatattatggtaaatagtggcttgcttcatagcagaaagtacacataaacacacactaattacagattcagttacactctgatgttcattgtatatgcaataagacagcagttgcatgttagccgatgccattcacatattcaaccagctaacaatacactgccagctcatcacacacaggtatccagagcacttcattgacaagaagaatttatccagaagcaagtggcagggtagttgtggctgctgacttgacccaagcagccagctaacaatacactgcctacctgattcaggtcactgccgattctcgtggcccaggcagtcactgaggctaaatttgtaacatgaaacatagtggcagaactctaatcttaatagtcacattaaagaaaacttatacacaaaatgtattacttcaagactataagaaataaaatcaatatttgcttgaatctagtcaaaaacataaaagttaaacaaaaactttaaaactttcagaatacttacatttaggttttccaaattaaatgcttggataaaaatatgttctacagtacaaatgaattttaaaagttacttaactgtaggctgggcgcagtggcttatgcctgtaatgccagcactttgggaggccaaggttggctgatcccctaaggtcacaagttcaagaccagcctggccaacatggtgaaaccccgtctctattaaaaatacaaaaattagcccagcgtggtggtgctgcctgtaatcccagctactcaggaggctgagacatgagaatcacttgaacccgggagctggagtttgcagtgagccgagattgcaccactgcactccaacctgggcaacaaagtgagactctgtctcaaaaaaataaataaaaagttacttaactatagcttttcaaatcacttctgtttactgatccaaagactacttgtctgtattagacagtaaaatatctaggagtcgtgataatacataagctgtgcacgacacaaaactgcagcagtgtttgggggaaaaaatcaacattaaagtatttaagaaatgtaagggcttaaatgcaattagttttctcctactagaaatgacattagtaatcgagttctgaaaatgcaattatgtattcaatataggatgttaccacttgaatactgaatttttttttttaagaggcagggtctggctctgtcctccaggctggagtgcagttgtgcaatcatagctcactgcagccttgaacgcctgggctcaagcaatcctcctgcctcaggctcccaagtagctgggactacaggcacatgtcatcatgcccagctaatttttgcagtttttttataaagacaaggtctccctgtgttgtccaggctggtcttgaagtcttggcctcaagtgatcctcctgcctcagcatcccaaagtgccgggattacaggcatgagccacagtgcctagttgcaaaatttatataagatctagaaaaatctattaaaatggtggtggatttggaactagaatctctgcgtacaggtcaaaggaagatgaactattgagcctagagagaagcatggtaaatggtgacagagatttaaagcagatgaaggctctttatgaaacacgtttataaaaccatttaaatttgtttccttttacactgattacaggagacactaaagacctttgggtttggtctttcaaggagaacaggtactacattggatcaactttaaattgctcacgttaagaaccatggtttatgccacttctccacattgtccacaagatggcaccatttccatttctttggggggcgtgcttctgaatgcaacagagaggagtgcaactagcwactgttaaaatcattaacagccgctagcaatacactgcctacctgacacatcccagctttatcctttgctgtggaggcagaaactagaaagtacgattcagatgcaaacgattgcattatttgtctgggatcttcagtttcataaagaaattttttttagtatgtaataagatactaaaattctcatattttcagaccagctcaaacttcctacaaatacattatttaccaagaattcgtttgttcaagatcagaattaaaacagagaacaagaacaagccctggactcacgttggcggaatcttgacttctcttctgcttcaagtctttggagagcacacgcatgatactttcctttgaaaacacagataacatattgagggagaaactatttaggaaaatcataatttcaggtgtggaatttttctagatcttgtgcttgtcagattacacttttttttttttttttttkggcaactaggcaccttcaraatataactaaattacatcactcaaatttacgaccagggcttaragtttcgtaccacctcttggtcctaaacagatattatgaacggggccttcggccccgcattagagagttagggagaatgcagaaaagggtgttactcacccacagcatctcctyttccgtgcggaccctccgaggcgcggkgcgctccagtttccactccatctccggctgacttcgccctgcctggcgtttggcctctctgctcgactgcctctggttttcttcccaggtctaagtcagtcttgacgcctaatygtcaaacccctggagtcccgtcccccaggaccattctatttcaccacctccctccaggtcccccactcctcccaccgccgctgcaaggtgttccccagggtaccatttaaaaagccggcggggcggcagtcggcgcgggaatccccctcgccggcttcttattggccggcgccgcggtgtcgtcagagcccgggtgggattccccggcgcgcgccgcggccccgcccctgccggccctctctgggccccgccccgccaccgcctccggccgaggcgcgcacccgggcgccaagctttgccgcgagccgtggcgggcctgcggctgggcctggcgccgggggctgccaccgcggcaggaggcggaggggttggcgggcgaagaagcgggttctgggagttcacgatctttccattttcagaaacaagaatgtttccttataacggccctgatccctgttcctctgcacccacttctctttctccaaccacaccctgcctttgcaggatccgagcgtgcacagctctccggcctctgtccgttggtaatcgctgtgtcagctatagatgtgaggcgtgttcgtcagctcttcgttttcagacaggcaagaaaacgtggcaagatttctatgccgatcaaaagggagagcgttgacatatttatgcaataaattattccctgctctatacattgggagtagtcaggtcctctcactcgggcttctgagccctgttccttagcagggggtaggtgagagaggtgaagaggtagtgaaagaaccagtgacaggcaggacctcataaggcgtgaagagggggccagaaagctgagcacactggggactccgtgataaagggggagaggaagatattgagggttgaggaagaggtctggcgggaaatgacagggaaccagatgggctgtgcagccttagctgcccatctgagctgccaagagagccgagttgtgccatatggcaggaggggacactgcatctgggaagcctctgacagcctggcagcctgtttgtccctcccttgctaaccccccaaccatttttgacattggattgtattttgctctaaggcaatgtgagtttgtgtgtttttctggggaaacagttcatagatagcagatactcaaaagggtcagtgattcaaaaaaaaaaaaaaaaaaaaacctaaaactcactcccctgctttccttcatactgaaagcaagaaaaaaatggcattagaactaagacccaatcttagaccagttttctatgtacaataataatgctgcatagggtaacttaatcttcaaatgacatatatcaaaatgtttgatagtcaaataactagtggattaaaagatctctaagtttcacccacaagaagtctattttccttgcagtggagtactcattccaaattccagtaaatcctttcagcaaacattaagactaaataaaagtaaactattattggatgagagtcagatgcattgttaatttaaatgatcagttttgcaaatgccaactaaaactcaaagtatattggaaataatatgaaggacatattatctttgttctatttttaaatatagtttacatttaaccattttgtataaacacagaataaaagcaattcaactaataagctcataaatccatgtaaattgggatttttagaatccaatttcttacaagtactaagaatagtgaatcattcatttagaatgcaattatctgtaaaaatacatttataaattccattatagccattaattccacagcatacatatacacagcctccaaatgtctttttttcccctagtgtgaagtagagaaagtattagtcaaatatctttaggaagtaattatgcagttgaatattcagattaaaacttaacttcagaatgatggaaacagaaactcgccacttggcaaatattacagtaataactgtcaagaatactaaaattaccttgcatatgatgagaatacttccccctataattaaacacaaaaaataaaatcacaacttttcactggccaaaactggcagagaccaccttaaccaagtgatcaaagttaacatcaccattagtgagacatgttgacatactgtgcctcatgagaaggacacatcacttctgtgatatttttgccccacaaaatgcataaccttaatagtgagaaaatactagacaaacccaaattaaaagactttccacaaaattggccagtacttttcaaaagtatcatagtcatcaataaagaaagagtaagaaactgtcacagattaaaagaaacaagacatgccaaccaaatgcattgcgaggtcctggattgaatcctggaccacaaaaaagaagatattggttagataactgtagaaatttgaattgatccatatctgcagattagttaatagagtagtagtaatgctgatttcctagttatgattattgtactatagctatataaaatgttaagatttgtgaacgctgagtgaaggatataatggaattatttgcaccatttttgtaacttttttctaagcctgaaattatttcaaaatgaaaaatatttaacatcatgtggtcattctattaaaaagcactttggtaagactgtttggggaaaacagaaacatcctgtaaacatattatcttaatttttatcaaatatggtttaggaacaatgtccaattcaaatatttatgcgcctaagagtagctttactatctttcaaatgtttcctctttgagaatgggttttgcagggaggatgtgacaatgagaaaggctgtgaggaagactcctggacaaaggccaataagaaggattttgaggaaagaaaggcgacgggagcgaggggaggtggactagtggaggaagggagagaaagaatttggaaaagcttcccttaactctcaaagtcgccggtgctctgagaatctcagtaggtccctatcaatgggaagcaagaggatattcaagcttcccaaatgcgatctctttttttttttcaattacactttcattctaaacatcaagaatgttaaatatctcaaaaatatgccatatacatgggctcgcttcagcggcatatgcactgaatgtgcaatataccaagtacactcccttcaatccgctctcccaacctcctccttccccgaccttcgtcagacccttttcaatgtatttgcacgtgcacacagagtctggccctgtggatctttccccacaaatgagatctcattatacttctcatttttcaacttgttttctctaattcactgtattcaactaatttccgagcagtgcaaaccggagagctccccattcccagcgccaacggcaggtttgcgcgcccctccggcccgcggttactccccgccctgctccaggctggtgcctcgccctcagcccgctcgcgcctggctacgcccgcgcccgcgcccgctcccgcccctagcttctgcgcgccgccctgcagcccctgcgcgcgcctactgggccaaagggacggttgggagtttgctccaactgtccctggggcacgccttccccgcccagcaggggttggggagcgcgagctgggagtgtgagggaaagcgccacgccagtgggggctgatacagctccagcctgtgcggggcaggcgttagactgcagaaggggagagcttaggataaccgcactcaggtggcgcaaggaagtcagccacgaagaaaaagaaagggaaggaaaaacatcgtcccagactgataaactctctgctccccggtgtaacgtcgctcagtatagcgagagcatggatggacgaatgaagccctcttgatgcagactatccaaaaatttaatttacaaagggctccaaaaatttaaattgcaaaggttccagcagtgtaaaagcctcagtcagaagagtggtcaataaagtagcacatcacctctggttacatggcttattacttattttttcgattacaagtggttcgtgtatatgcatatttttctattactgcctgatttctaagtacagtacagggtctgtcctttaaaattatttctccattcatacccaaattaacaaggatagagggaaaggtttgcccagcttcactgcatgaaaatcttaagatcacttccaaccacttatttcctttagggcatttttcctttcacttcctccttagggtcgttcttgcatagggtaactgcccaaataaggtagttctctaccattttaaggcaatgcaaagaaaattttaaaatgaaattaattcaaatctgtataaaacaatggatgaaatcaggcatatgaaaatgatcccctctcaaagaaaagctggttcatgaatgctctagacctgaaaatctgttttcactagatattcttccagaacttcaaatgcaacataatccaaaacagaattgagaatctttccttattcccattctgcccagaccatctatctattcctccctctgtgtgccctgttgccagtatcaccatcttcctggtggagcagaggcaaagtcagctttccttaactctttcccttcccccatatgcccaaatccacctatcaaatatattttcccctctgctgtgttgattacacctgccctcttcttaaacaataacgataacctgataatctccatctattccttctccagtccgttcatttaacatatgtctttgcacccagcaagtgtcatgcactatgcaaagaagtagagatccaataataaagccataaaaggcaataagctttatcttaagctaatcatatttctcccctgccccaagtcccttgaaaaaccttctttttttttcttttcttgttttgagacggagtcttgctctgtcgcccaggctggagtgcagtggtgcgatcttggctcacggcaagctccgcctcccgagttcaggccattctcctgcctcagcctccagagtagctgggattacaggcgcccgccaccacgcccggctaattttttgtatttttagtagagactgggtttcaccgagttagccaggatggtctcgatctcctgacctcgtgatccgcccgcctcggcctcccaaagtgctgggattacaggcgcgagccaccgcgcccggcctttcaacacttagaattaagttctaagtttctaattcacataaaacccctttaggacttaacttctctctgcctttctctcataatctcccacaacaccaccaacacctcctatcttcagatgtacttgatactagcactctcttgccttcaggtctttgttgaggctgccttacttttggattgtcttttttcttatctcttcctggcaaattcttactctcaaatttcagccaccttttccaaagagccttctcaaatcaaatcgtgctagttagaatttctttatcttccctctgttcccataccatattgtttgtacttctagtctgcttacttccagattttgtgtgtgtgttacatacattctccagtatattgtaggctccaagaatacaagaatcttgtgtttttcatcttgatttcctcttcagagatcggctcagtgctttgcgcataggaagttttgcacttggttggtgatcaataatttgttcagtgaaccaatttgtagatgagattagaacattttccaaatcatggaagtggcaatatagaatcacaaaagaaagactttcacatgccatatttggaatgtgataaactcagttttaagaaatatgtgagttaaaaagtatgcaggtcctaggcctgacacctgctaattgtataacttgaaacatgttattctaccccttgaagtctcaggttcctcaactgtaaaataggataattattatctactgtacagatttatgatgaggatcaagagagaaaatacaaagcttctaaaagtatacatttctttctttgagaatgaagtggtggaacttagatgactaagtaaaatgagtatttggataataaatatgtctttataaagcacttccagaagacactatccttaggtccagagccatatactaggtacgtggcacatagtaggtggtcaataaa

SEQ ID NO: 96433 - DNA, 13073 bp, Homo sapiens
atctaagggctgagccatgtttttatacatctttgttatagcgcacttctagtagtaagtatttaatggcgtttgatagattgttgaaagaattcttcaataattggtttatttttagattaagtacatattcatgttaaatatgtgttacagtgatttattttttgggggtttgagttgccagtatcttttaagtttattttctacaggcaaaaactctgcccctataatgtgtaattgttttttgaggagatgaagtgatgctggaaaatttaagacagcaaagcatttgtaaagtatacttactatatgcctttcctatgagcttggccagaattatattgaatttaataatccgtgagaatataggtttgagttttgcttttattctggaaagattttattaagtttctttaaagagaaagcattctttactgtttttcttaatttagtttaacattttaaaaatccttttctcacatcattataaaatcagtgttattccaaaatcacaggtagaacatgtacttcctcttttgaagaggggaattggtattcaccatggtggtttacttcctattttgaaagaaactatagaaattctcttttctgaaggattgataaaggtatggttttatttttattttttatgcccccatatcatgttgtatgaagagtttgaaaatgagagaacattgtttataggcaatatgtgtgtttttaacaaggcttaatgaaatgacttaaataatgaacttaatttttatatatgatgttatacttaaataaatcttgaagtgtaggtaaaaaaaaaacatttgtttcctttcttcaagaatgtagtggtggcagggtacagtggctcacacctgtaatcccagcactttggtaggctgaggtaggtggattacctgaggtcgggagttcgagaccagcctgaccaacatggagaaaccccatctctgctaaaaatacaaaattagccagtcgtggtggcaagcacctgcagtcccagctactagggaagctgaggcaggagaatcacttgaacccaggaggtggaggttgcagtgagcggagatcacaccattgtactccagcctggacaacaagagcaaaactctcaaaaacaagaacaaaaccaaagaatgtagtggtaacactattggataccacagaatgttgcagaaggtgtatttaattactaaacccggggttgtaaacttctttctgcatacagaataaaaggattagtttagagaagacaaggaaattgctggttagacttaggaaagagagtttttttaatattctaatttaaaccaaagagcatctgatttactttttttaaatgatattgatatttataccaagaaatgggatattaaaaatgggaaacaacatcaaaatgtaatcataagtctatatatgactcatacttttttttttttttttgaggcagaatcttgctctgtcacccaggttggagtgcagtagcacctctgcctcctgggttcaagcagttctcctgcctcagcctcccaagtagctgggactacaggagcataccaccatccccaactaatttttttttcttgttttttgtttttgtttttgtttttgttttgttttgttttgttttgtttttgtttttgtttttttgtagagatggggtttcaccatgttggccaggctggtcttgaactcctgaccttaagtgatcctcccacctcagcctcccaaagtgctgggattataggttaccatgcccagcctcatacattatgtttaaaaattattagaattttaaaaatcaaatgtgagatttatcatgagaacctcagcactaagtaaaatatttaagataaatttacttatcttgaagaacatatttgaagtcacttagataatgaattttatacttacttagatcctggtatgtcccttctagattgtatattttgctgagccctactttttaaggatcttttaaaaaatacacaagcagtacttgttgggtgtaaaattcaaatagagcagttgtatgtaaagtaaaaaaatgaaagatcatcccatcacttgccagaaatatctactagtatacatacaaataatgcattagtcattttgtaaacaacaaaaaaagtcattatactacccctattatataatttcatcatatgtcagattctttttcattctttttaatgaatgaatagtatgctattgagatgatgaactaaaatatttttacttctttcctagagaatttagtacttcagtgactttacttatacatatatccttttgtacctaaaccactatttttgttggtcttagaagtgaattacagagtcagtgattctagtcttccttgagagatcttctaatactgaagtggtcctcaaaatcactgtgtcatcagttgcaaaggccaggaaatgtgttcgtgtttagaaaaatattctatgacctaaaactttgttcgtaagaccagtgtgtattctctctagttggcactgttagaatttaagaaagtctgttttcccttaattaccaaacttctgggctacgagagacattaaatgttaattaataattttatatataaaatacgaaataggtttgagaacatattgtttgttatttttgtaggatctcattaactaattttaaagattaataatgcatttacttaaaaattataaaaccagattttcagcttaaaatacatgtttaattatagaattacttatttacttaggccttatttgccacggagacctttgctatgggaattaacatgccagctagaactgttttatttacaaatgcccgcaaatttgatgggaaggatttccgatgggtaagtaaagcaattcatatatcaaaataatttttgtctttgttatactatagataactggcttacatagtctttgagattttaagtcccacctacttaagaacttgaacctgagctaatacagtttcatcaaggttaaaccttggcttttggccatttgtggtggcttaggcttataatcacagcactttgggaggccaaggtgggaggatgatttaaggccaggagtttgagaccagcctgggcaacatagcgagaccccatctctacaaaaaatgcaaaaatcacctgggagtggtgatgtgcacctgtagtcgcagctacttgagaggctgaggtggaagaatcacttgagcccaggaggtcaaggctccagtgagctgtgattgcaccactgtactcgagccttgaggacagagtgagaccctgtctctgaataaattaattaattgaacaaacctccgttcccttaaatttttatcctaactccttcactcctacctctccttcaaaaaaaaagagattcctttaagtgaaggagtttgatgataggaggttaagtgtgcaagtggtttatgaatgctttaaatcattttaaatatgtctagagttttcatttcttaaagtttaaggtattaaagcaccactacagtggctgtacttgcatctattttgcccttcagatttaaaaaagaagttctaacaggtttgcacacatgtccaaggcagaagcaaagagagaaagttgggagcataggtgaaacaatgaactggggtaaaaagcaaatccttaatcccaaggcaagtactccatttagtaaacaattaccaaacttaaaatatgaatttagaactctgtaggtgactgggatgctgaagtagaaacagagcaaaaagacaatccagactcgtttctcttgacagatatacaataaaatgttatgctgtaaacactcttgagaagtatgttcagggatatagcataagaaaggaagtcatttgggggtcagggaatgcttcattgaaaggcagtccttaaaataagtaacagcagatgagaatttgctaagcagacagtagaatattggcgggggtgaaaggaaagtgatggaacaaagatttctagtttgaattcacatagcctggctttggggaaaatagtcctttatttaaccttttttctttgaaattggtgattctctctgcttggagaagtttctgaaaggaattacaaatcatcaaaatgctgaaaagtaccctcgctgaaactgtaaataaaggcgaaacatttttcatgatgtgttttattttaaaatgttggatgctctacaaaagaggaatacgagtatggtgaggcagtgacatttctgggccagaacttcttgggtcaggagggcctggcccaaggctgcccctgggaaaagctgagtagagctgctgagtgggagccaaaccctctgtgctagcagggactctgcagtctggctaaggctgggccctagccccttcctacccaataaaggcagctgtggagagagggaatttgggttccagcctggtttgtggtggggggaaggtaccatgacagatttgaggatgatttctagtggacagcagtcaaccaaccgcacccacctcccacagggactccctctagcctgagactcatcggggtccagactggaaggctaatgccatgagaggaagcaggcacagggtggattgggcgagggaagctctgagaaggtcagtgcccagccacccagggttcagagacatttcacacaatatgattaagtttcagggagagatgcgtagaagctcaagagaaggagagagttaagcagcctgggaccctccctcacaaagcaaccctttccttcctgcttccttgtggaggacagtgggtgtgcatgatgggtgtgtatgatggatgtgcagtgatcactcccaggctctctatactatgccagatgccagatagcaccttcatgccactgtagaagagggagcactggagcctgatggaaaagggctatgggccatatcaaaggattgaaccagggctgacaatggaatcctaatggtgaaccccctgccctctgctttggccctcaagggtcccattccccaggtagcagcagtgagactccctttaacccctccactgttaagaaggaggcacctgggggatggaatggacatccaagggggaaagggaggtaatagtgggctctgcaaagaaggcattgagggtggtaggctggtgggccagggaccctctcatagtcagagataggctggaccctggggcaaccctgccaccagcatggccacaccatctagaagggttaaggtccatgctgttgccctaccaccagagctcttggcgaatcctggggccaggagatgtctttgtgggggcaccatggagaaagaaatgtcttggctgggaggtaggggactgtttggatctagccaggggctacgagtccagtcaaggcataagctttgtgtttacctgggcctcccactggagcataatcttaaggatcaagatgccttggaatgtagagagtcagggaagaaggctctgtggaggaatggggggtagttctagaattaactgtcccaaagggtcctgaggctatagaacactcttcagccagcactgctgccccgacttgttctggggaagagtcaaagggttagggagacagtgaaggccaggttctgtcctttctccaactcataccagagcagtttcccaccaaaatgagtgtcagtgccagaccagatgcctcattcagggagtcacagacagccccctgtgccacctctactcttgtcacatatggcccaggcccatggcaaggagtggggctgctgaaggcacagagaaggaagtgggaccagacattcttcaccttttgcttgctgtatagacctatttccagagagggtaacagtcctagatggtacagcaatgaatggccaggctgagatcatgctgtgtctgtaccaagccaggtgggtcagccattgtactgttggctggtaatgcaagtttgagtttctgcagctcacgctcttgcatgtgactcagcttggagcctgtcaagtggctttaacacgtggactgggcatatttggtgctctggcagtgtgaggaggcacatttgaggaggttttgggagatgaactggtgcagattcttcgtggatgaagaggctgccgtgtttaccacccacaagtgtctcagggcctgcagtgtagtcatatgagctccagggtccgctgtcagcaggcagtcagtgaaatccttagccaggttggacatactgggtagccagggctcattcgagtaactatacttgtctctgaggcatgattgttgtccccaaagggcatagtgctactcagcaggatgtagacgatgatgcctgggacccacacgtgcactgaatggtgtagtacttgmaggccaaaacctctggggcacggtatgctggtgtgccataggtggtcttcatcaggcctttgtagttgttgctgttcttgcaggcactgaccagattgaagtcagtgatgatgatcttggagtcagtgcctggatggtggtagagcagattgtgaggcttgaggtcttggtttgtgatgcccagtgcatgcagatactggatgccatctagcaccatctgcagcattcacatggcgtcatgctcagtgaaggaacccttggtgatgatgtggttgaacagctctatgctagcagggatcagttgtatcaacatgtatacatgctcctgcatcctaaacacctccaccggctggacaatgttggcatgacgcacctggtgcagcacgcacagctctgactcccacacctcctacccctcctggtacttgatctcaattatcttggtgtatgctgccaagtggctcagtgctccatgcataccacttggcagaatctcctttgccaattggggtcttcatgtcatacttaactgtcatatatgggttgaacttggccctgtatttagccaccctggctgtgtgatcacaagggaggctcttcgtggccggtactggggacactgcatattgactggctgctggaaacctgcctgcctctatgatgaagtgcttatacataccactctgagtgccactgaacagctgcaccttcttgaccagatccagctagacatcgttggatggctagggaaggaccttgcttttccctcagcccatcatggacataaaggcatcttctccagtgaggctggtgggatctgctctgtaggcagtgttccatctatacctcatacaggcagtgggctttcagcatctcagcagctctgctaaccatgtctgagctaggactgccaccaccatcctcaggcatcagcattgtgacctatagtggtttttaactctttttgagttacagtttttttaaaagaatctggaccctttccacagaagagtacacatgcacttacagaaaaaactttgtccagtgttgaagtggttcagtggtgccctgaaagcctgtatacaggtggcttactaaccttcttctatcaggttgttcctggtgacagatggactcaaccaaactccaagcatacataccaagaaaataggagagaattttgttttttccaaaagcatgaattatagtcatctcattttgcagattcagaaagttaattatgatcaagtcagaattgatacttggttgagtttgagtcattgcattcttagattttgctgttttcgctgggcgtggtggctcatgcctgtaatcccagcactttgggaggctgaggcgggcagatcacaaggtcgggagatcaagattttgctgttttccagaatatccagctcaaaggtattttttactgccagtgaattagccaatatttcccagaagctgtcatatatttgtaagcataattaacagtaattggcttatgtggaaagccaaaatttttaaaagcctaaattttaggctttaaatttagattaaaagcataaattttcgatccaaaatgataataagtctaaaatttagttttgttatgtcagtgtgatgtcggtttgaaacattattctcacatgttttgcatttttgtgctttgactttaactcttctcaaacttcatgttgtttttaatcatgtttcctttcttagggtttataacttgttataaattttataaaaagagaaattttaagaatatgttttttaccagtttttttcctaaactctgaattttaactatgttcattcagatttcttctggtgaatacattcagatgtctggtcgtgctggaaggagaggaatggatgatagaggaattgtaattcttatggtagatgaaaagatgagcccaacaattggaaaacaattacttaaggtaactacattaagattgtgtacctttaccaagaattccagaaatatacttcaggagccatttcagaattggttgtgtcagtcagacacctaagtgaaatgagttaatatactgaaactatctgggcttgggaagatggaagggtgtgattactcaaaatactaacatcttgtatcctacttcacctaataggtggagagcaactcatgtaatggatagggtgtgaagatctccagagagggcagaaatgtttactttgtcctccaaatttaagaaatctctttatttgacccatccactgcacaagttgttctttacctggtagaacaggaagttctgttctactgataatcaagtgttttgggcaggcaatgagcttcctctacctttgcaagcgcagatagcttaataggttaattcagcaatctgcgtttacactttaccctattgattataaatatcccaatcaaaaaggacacattttaagctttattgcagattagacttttattttgcttgcttagtatttgtgcttcggatggtctaggattttgttttgaagagcttctcaaggaagattggcctggttgccttttttcttcttatccatatagagaaaagtgttaataagataggaaactttaattaaaaacacaaaattaattgccagcttattagctacttaaaagtagctacttcaaaacatgttaagacacacttaggtcagtatctatgaaacagattgtgtgtctaactttttagacttgggaactttgtggagaatttgagatatagtcataatgaagcttggtatgttgaagcaaaattgatgaaggtgtgtatatctttatatgtctttacatgagtgaagacaaagcttgtctgtacatattcataataatcgtattgtgtcttattttcaactttagagattaacacttggaaacctctttagtgcttcatgaaaggaaaattaaacaaggctgaaaatttgtatttttattcttttctctaattgtgccagatatagcacatgctatttttctttccttgtactgtgtgtgtggaaagaacagaatcggattgccagattataggaggtaatattttaatgacagcatctggttcctttagtgcagagttttcattccatttacttgacgtttctggatttgttactttgtaagtgtaaagttctatcacctttcattgcatttttaaaattaacttttctaatagacttattgagctataattcacataccatacaagtcactcatttccatggtttttaatatattcatagagttttgtcaccatcaccacaatcaattttagaatattttcatcaatccaaaaagaaacccctgtacctattaacagtcactcttctttcttcacaagaccacccctacctcaagccctagacaacaactaatttgctttctgtctctatggatttgtctgttgtggacatttcatataaacagactcgtataatgtgtacccttttgtatctggctttttttcacttagcctaatgttttcaagttttatgcatgttgtaacatctatgagtacttcattccttttcattgctgaataatatttcattgtatgggtatgccaaacttgatctgttcatcagtggatggacatttggattgtttccatgttttggctgttgtgagtaatgctgctatgaacttttttttttttttacaagtctttacttgaatatgtgttttcttttctcctgactgtgtacctaggaatggaattgcagggtcatagagtaaatctatgtgtaaccttttgaggaactgccagactgttttctttagtagttgcaccgttttacattcccacaagcattatatgaggcttctaatttctttacattctagccagcacttgttagctgcccttttggttaatagccatccttggggtatgaaggagaacatttcactttgaatattatacagtttgactgattgaaaggagtacctgtttttgtgtctgcatttctaggcatatttcttttatcaagactggcatacaacctttttcctctaggtttttttccaggtggttttactatcattaaggaatttataagtaacttattcagtatttgtaacaactaatacttattgaatattcaatatgttccaaatgttaattacaataattatgttattatctccattttataaatggcatgcagaggttaaaaaatttgtccagagctatgttgttgttaaatggcaaatcctgcttttgaactcaggcagtctgatttcagagtttatgcttctaactactatatggtactgcttctcagtacctcttgcaaatagatttttcaactattagtttaaacactatttgacatgagacaacagtttgttctttgatgtacttaaagtagataggctaaaaaatagtcatgtcaggtatattttcttataggcaaaaataattgatcattcttaagtaatttcagaactttaatagaaatactgagtacttaaagtcattttctcaaaaattaaaatacgtagcttcttcatagtcaccttatatgtagaaatagtaggtttactttatacattagtataattcaagtctatttgtcatatttaattatttttcctattggtgttagaaacatggcaaaatacatgtgtttgttgctggttggagctttcaaaatctcagtacattcatacacacacacatatttatatatttgagcatgtaaataatttaatgattgtgaatttgaaatattttaataatttttttccttcatttttatggcttgagtaattttttaacttggtcactgcaagtgattctcctgcctcagcctcccaagtagctgggattataggcacctgccgccacacccagctaatttttgtattttttttagtagaaacggggtttcaccatgttggccagcctggtctcgaactcctgacctcaggtgatctgcctgcctcggccccccagagtgctgggattacaggcgtgagccactgcatccagcccttttttttttttttaatagagacagggtctccctttgttgcccaggctgatctcgatcttctgggctcaagggatcctcctgtcgcagcctcccaaggtgctaggattacgggcgtgagccaccatacccagccttgttgttgttgtttgtttgtttgtttttgtttttgtttttggagacaaggtcttgctctgttgcccaggccggagtgcagtggtgcagtctcggctcactgcaaccttgacctccagggctcaagcgaccctcccaccttagcctcccaagtagctgggactacaggcatgcaccaccacgtctggctaattttttttttttttttttttttgtattttttgtagagacaaggttttgccatgttgctaaggcttgttttgaactccaggctcaagtgatctgcccaccttggcctcccagagtgctgggattacaggcatgaaccatcgcgctggctggcttggcgaatttttaaaggagcaatagagaaaccttttcaacttttccagtcctgctattgttgaagtatctgctattagcttaaacagaatttgacataaggcagcagtttttttgttttttttgtttgtttgttttttgttttgagacagtttctcgctctgtcacccaggctggagtgcagtggtgtgatcttggctcactgcgacctccgcctcctgggttcaagtgattctcctacctcagcctcccaagtagctgagattacaggcatgtgccgccatgcccagctaatttttgtatttttagtagagatgggatttcgccatgttagccaggctggtcttgaactcctgacctcaggtgatccacccaccttggcctcccaaagtgctagtatttcaggcatgagccaccacgcccagccaagacagcagttcttttgatacatttttgattacttgatatgagctataaaaaaaaatcagttttcataatgtgtgttcaaatgaaaagttgagtaaatgagaaagtgtgtattattaaacagcctttcagaaagactggtgaatgcatcttttatttgttagcggttaggtattatatttttccagtataactagaagaaatacatgctccaatatagtgcccatattttccaaagaatgtaaaaatatcacagtactttgagtaaatgttattattggttttatcaaaataaaaccatttctataatttctgaaattactaaataaacatactagttacttagagtacataaagtgctcatttcaatagtgtgatacttctagtcagtggtgtgttcttttcaacaatgaatcaaattttcctgaattgaaggaaaaataattttgaccttactggttatttaaattatttgtaaatttaagaagcacatacctattctattaaagttagttctgtaactgtacataagataacaatgtacaggccttttttgaagaagtgggaagactcacatttatttatttcctcatcttccacgtttatggttcataatgcaaaaatatttagcctgttaatttttagaactacttgcctaaatgaaccatatattctaaaatgtaagagatcattatattagtatttataaaatattacaaaagcttttctagaaaattggtatgtttggctctctcaatcttagtatcttttcagtaagcaaattggcaaaaaggaattcttcgaagttttcctgga

SEQ ID NO: 96434 - DNA, 28370 bp, Homo sapiens
gtattttaggcgagttacttttttgtgaaactttgtttcccactgtaaggacaataatgctcaaattggtttgggggagctataggaaacagtctctgaagatgcataaggggcaggattggagctcagtgaactgttaaatcttaggactaatccagtttcagaagctgctttcttaatgtttccctgctttctgtaacttttttttttcttaatagagaagtgaattctggctttttttacaagagtgcagaagagagagaaaaactcgtgaaagctgaaagaaaattcattgaagatagggttaaaaaaataatagaactgaaaaggaaagtctgtggcgattcagataaaggatttgttgttattaatcaaaaggtgagaatgaaaactcaatgtataaactaaatagtacgtatcatcctttttacttttaaggtgaaagatgttgaaattaatttttatttttgttacagggaattgaccccttttccttagatgctctttcaaaagaaggcatagttgctctgcgcagagctaaaaggagaaatatggagaggtatccgagtaatttgacttttactcattttgcaagtgaattgggattatttctttttccttatactttatttttgggtttttcaactgtatagttaattggcattaactatattcacattgtgcaccccgtcagcactgtccatctctaggacttttttcatcatcacaaactgaaactgtatacccattaaatagttactccccatttctccctcccccttgccccttgtaaacattattttactttttgtttctgaattcaatatacttttttccaaagagctccccacaataaaaagctttttttaaaaattttttattattattttttgagacagtcttgctctttcgtgcagtggcatgatcttggttcattgcgactaccacttcctgggttcataggattctcagcctcccgagtagttgggattacgggtgtctgccaccatgcccactgaattgctttgtgtttttttagtagagatggggttttgccatgttagctaggctggtctcaaactcctggcctcaagtgatccacccacctcaacctcccaaagtgttgggattacaggtgtgagccaccatgcctggctaataaagagctcttgtccaccttttagatttcatttgctaacttggggagagtggtttaaatggagggttaagagaaaagactagtttttagctggttgatggcaaatggaaaggcttaaagtacattttaaaatttaattttgtgtgtaattctgaaaaattccttcctaaaaattactggtcttatctttgaaattcactggtaacgttgcttatccatctcccttaaaatgctatttcaggctgactcttgcttgtggtggggtagccctgaattcttttgacgacctaagtcctgactgcttgggacatgcaggacttgtatatgagtatacattggtaagtgtatttttttcttaaaggtaatagaaccttttagctcgtgaattatttttgtttgtttgtttgaggtggggtctcactcctgcccgggctggagtgcagtggtgtgatcacagttcactacagcctcatcttcctgggttcaagtgatcctcccgcctcaggcttctgagcaggtgggaccacagacgtgtgtgctaccatgactggctaattttttttttttcttggtaatttttgtagaaacaggttcataattgtgttgcccaggctggtcttaaactcccgggctcaggctgtccttcaccctcagcctcccaaagtgctgagattacaggcatgagccaccgtgcctggttcatgaagtctttagcagaaaaattaattgaaattcaggatcagatttttgtttatatacattttgaaggtttatgtgtagtaatgggaagccattgatggggaaaatcacatttcttttatgtgatttttcaaaaggagataatttgctttaatgtgatcaagtttgttccttattaatatgctacttgtcattctctgtaagtccctcttctctcttcactctgcacaaatcctgtttttgaaaatcatattttttctacacatagggagaagagaagtttacctttattgagaaatgtaacaaccctcgttctgtcacattattgatcaaaggaccaaataagcacacactcactcagatcaaagatgcagtgagggacggcttgagggctgtcaaaaatgctattgatgatggtaagatcctcactgtatttcaattcttttatattgttttgctggtctgaaaggcatggccgaatactgtgtttttatcagtagtttacacagccagacaccatgcaaaagcagtcttccctttagaatgactgatggtatgctaaggtttttcatagcatatcattattaaaggtgaatacaaataaatgaactaatactgatctgttgaaagctgccagtggctagtgaagccattctggttgaaccattctcctatttggtatgttagtcacttgtattttgtcatagtaaatttgtaagaaattaatggctttcatatgtatattttgttattcataattagttctgcagttttcttagcatttttccttttcccccatccaacaggctgtgtggttccaggtgctggtgccgtggaagtggcaatggcagaagccctgattaaacataagcccagtgtaaagggcagggcacagcttggagtccaagcatttgctgatgcattgctcattattcccaaggtgtgcatgcttttaacagtcaatcttccaaaagattcagctgatcaaacctttctgataatgtaggatttattcataaagtggattttggataagcaagtttgatcagttttctttctgactctagaacaggtattcctcatcatccagatatatttggtttctctgggaagcctgaatagctgacattgcagatggcaagagataacctgtagtttaatatttgcagtattaggggttatacttgagtacaaacttgctttttgcttttgttttaaactgatatcattgttttctattatataccagttttgatatataatttatgactggtgtattgctgctgggtttggggtagttgagagagttgatcagtaacttgtgtctggtattctctgaagggaacataaatgttctgtctttatgcaatgagtttttttttttttttttttttgagacagttttgttcttgtttcccaggctggagtgtaatggtgcgatctcagctcactgcagcctcagcctctcgagtagctgggattacaggcacctgccaccacacccggccaggtttttttttatttttagtagagatggggtttcaccatgttggccaggctggtctcgaactcctgacctcaggtgatccaccttccacggcctcccaaagtcctgggattacaggcgtgagccactgcaccaggccgagattttctttttcttttttctttttttttttttttttttttttactatcagttattagttcctgttttctcaagaattaaatttgtttactttaggttcttgctcagaactctggttttgaccttcaggaaacattagttaaaattcaagcagaacattcagaatcaggtcagcttgtgggtgtggacctgaacacaggtaagagaatgcaactgttgtagagggaaaactagatgtaatacgtgtgagttgaagccaggaaagattaaaaatgttttgctttgcaatttgacaccagtgctgttagggaactctgggttctaaaatgggataaaataggatattaataaaaaatggaatgactaggtataattaagggacgagtagacatgagtaatttggggatacaattttggagatgttgagtggtggtagatggttcagattaatgttgaaggattttcatattgcatttgccttactcagtttttaatcaagtactatgataagaaaatagatgtggtgattatattcatgggtgaaaaccagctaaagatagcaattaatgccagaaaaggggatgtagaaatctagtgaaatggtgacagccctgatcttaggttcctgtaacaaaacaacacaaattaagtacaaagtaggagataacaggtacctccatgcagtatgtgcaagacctattgtcaacattaatagaaaaggtttctggaatgagggaaatgatcagtccattttagtcagattatagttgaagtgctatacttcagtatgagtaaacagaaatgtatccagaagaagagaggggtgttcaggacttctaagtataagtcagacattcatcaaatattgtggacgggggtcatggtttagagtagaaaattgggctaacagagaagctttgaattctcatagttaatactggaggaaatgagtcatcagtgataagcaaagctgcacacaatattgttggttcttactgactgaacttattttaagatttggttgccttttaggtgagccaatggtggcagcagaagtaggcgtatgggataactattgtgtaaagaaacagcttcttcactcctggtaagtttgggaaaatgaaaactaaactgttagagaatcatacttttttcatttggtgttctctgtttagttgctcctttcccccatgaataatgtgatcagctggaagtatggaaactgaactagccctctgatgtgtagaggggaagggggaaatttaattggatgtaatgtgtgcagcttggttggaagtgggaagttgagtcgaattagggctcctaatcatctgagccatcttatttttgtccccctttcagcactgtgattgccaccaacattctcttggttgatgagatcatgcgagctggaatgtcttctctgaaaggttgaattgaagcttcctctgtatctgaatcttgaagactgcaaagtgatcctgaggaatacagctgtggaatttttgtccaagcttcaaataattttgaaagaaattttcccatatgaaaaaaggagagaacactggcatctgttgaaatttggaagttctgaaattatagtatttttaaaaattgcactgaagtgtatacacataaagcaggtcttttatccagtgaacaggatgttttgctttagcagcagtgacataaaattccatgttagataagcatatgttacttaccttgttattaaatatttcttgaaaagcaaattttaatggtttaattttatgtggacgtatgttaaattatccaactaccctattgttaagcatttggttttaaaatttttatgctaatataaatgctcaagtaatttaaaatattgaaagcatccctgttggtataaatttctgagtaaatgcattggatcagttggactttgaacgcctttgaaatggctttgctaaaatgctcccgccacaaagttgtaggaaatgggaagaggagtcaactagaggcaagggagttgagagagctgcaactgtaaagggcaagaacaggcagaggtaaaaagatgatggaaggtgtggtgactaagggccacggttattgggtgaaatttgagattgtaggccaactgtattttcaagcttctgaacttaggcaaaatattcatcgcaaagtctctagcgtcatatttttctcacccaaattacgtttccacgagattatttatatatagttggtctatctctgcagtccttgaaggtgaagttgtgtgttactaggctgtgttttgggatgtcagcagtggcctgaagtgagttgtgcaataaatgttaagttgaaacctcctttctgttcttgcaatggtatgacgcacaaaagcaatcttaaggggaatgaaaactgtccaaaggttcagaaaagtagtgaaggggcctctggaacggccgggaccctcaacgtggttttccttaattccctgggcggtcctgaaggtggtgtggccagtcctccgcctcgctccgtcagtttccccctgctgaactaytgggtgcggggcgggtggtggcgcagcstgcgcatgtgcataggggtcgactgccgctgcggtgcatgagggcgcatgcgcagcggggccgtgggtgtacgcggcgcagcgcggcagtcctgatggcccggcatgggttaccgctgctgcccctgctgtcgctcctggtcggcgcgtggctcaagctaggtcagtgaaccggccgtccatcctgggggcgctgggaaggggatggggcgytccgccctgacgggagagagccttaggcccttctgccggcttccgggatgcggctgcagcggcaggctggggaggtagctctcggtgcgcgtggcgcctcaccgccttatacttttcaacttcttgttgtggaatctttcaaacctaaaaaagggaaagagaggccgggcgcggtggctcgagcctgtaatcccagcactttgggaggccgaggcgggtggatcacttgaggtcaggagttggagaccagcctggccaacgtgaaaccctgtctctacaaaaatacaaaaacaaaaaaacacaactatccgggcgtggcggcgggtgcctgtaatcccagctactcgggaggctgagacaggagactcgcttgaacccaggaggcggaggttgcagtgagccgagatcgtgccattgcattccagcctgggcgacagatcgatactttatctcaaaaaaaaaaaaaaaaaaaaaaaamaaaggccggacgcggtggctcacgcctgtaatcccagcactttgggargccgaggcgggcggatcacgaggtcaggaaatcgagaccatcctggctaacacagtgaaaccccgtctctactaaaaattcaaaaaattagcygggcgtgatggcgggcgcttgtagtcccagctactagggaggctgaggcaggagaatggcgtgaaccccggggggtggagcctgcagtgagcggagatagcgccactgcactccagcctgggcgacagcgagactccgtctcaaaaaaaaaaaaaaaaaaaaaaggaaaaaggagaatataacgaggaacgacccccgcccccacgtactcggccrgcttaaatagctgccagtttgtggccagtcctgctcctgcggaatcgcacactccccctctcctggagccatttggaagtgggtccagacattatcccattttattctagggatttattaagcttgaatagtcaaaccgtttctcacctaaaaaattgacagtgcttcttaataatatattcagtctgttcagattcatctattatctcataaatggtttttaacgtttgctggctgaattagggacaaaataaagctcatacattgcaattgtatgttatttcttaattccgattcaatctgagatttccctacttactccttttatttatttatttatttatttttggtggggcgggggrcaaggtctcgacgtgttgcccaggctggagtgaatggttccatcatagctgactgcagcctcaagcaatccctgcctcagtttcccaaagtgctgggattacaggcgtaagccaccacgccaggatgatccgttttttccctttgcaatatatttgtgaaagaaactgaaaatgggccaggtgaggtggctcacgcttgaaatcccagcactttaagagcctgaggcgggcggatcacgaggtcaggagttcgagcagcctgcccaacatggtgaaaccccgtctctactaaaaatacaaaaaaattagccgggcgtggtggcgggcgcctgtagtcccagctattcaggaggctgaggcgggagaatcgcttgaacccaggaggcggaggttgcagttttccgagatcgggccactgcactctgaccgggacaacagagcaaggctccgcctcacaaaaaaaaaaaaaaaaaaaaaaatcaaaaacaaaacaaaacaaaaaaaacgaaaaactgaaaatggatgaaatcactgagagtgtgtcagaataagagatccaaagataggatcttgaggaacatcaaaagacaaggactctgccttgaaagaagttgtagtgcttagacatcctttcttggaaagacactgtgaagtggtgcatcagctgaagcagtatggcttattggaaacagcaccgtaaagagacctaaatctagtcctgtctcctgctaaccagctctttaagtcatatttcttttttggatcttggtttgctcctgtggaataaggaggttgaagcaaagatccttttttattwtttatttatttatttattttgagacagagtcttgctgtgtccctccaggctggagtgcagtggcgcgatcttggttcactgcaacctccgcccccccaggttcaagtgattctcctgcctcagcttccsgagtagttgggattacaggtgtacaccatcatacctggcttatttttggttttgtttgtttctttgagacggagtctcgctcctgtcgcccaggccggagtgcagtggcgtgatctcggctcactgcaacctccgcctcccgggtgcaagcgattctcctgcctcagcctcctgagagctgggattacaggcacctgacaccacgcctggctgatttttgtatttttagtagagayggggtttcgccatgttggccagactggtctccaactcctgacctcaggtaatctgcccgcctcggcctcccaaagtgctgggattccaggtgtgagccatcgcacctggccagtcctttttaattctatgattttctgaggcattcatacaagtctaaaggtgctcattcaactatttggcaataattatgcacttatggcagaggccagggatatactgtcatatatgtattatatgcttctcttctggctcatataatggtgagaatcactaagaactgataagagttcagtaagtggagaggaagaggcagagaaacagcatgagcagaaggatggaaagaaagtgctagatgtattttaggatagagtgtctaaattcacctagctgggacaagggcttgtgtagaggaagaaaaggacttgtgtagaggaagaaagaggtaagtgcaaatctaccatgtgttcaacatttcacccatgctatcttattgttattattatctttttattttttattttttgagacagggtctcactctgtcacccaggctggagtgcagtgacacaatgatagctcactacaaccttgaactcctgggctcaagcaatcctcctgccttagcctctgcaccctgtctctgagccattgctcctggttccatgttattttaattgatacagctgctacctaagagatagtgagataktatccctatttttcatacttattttttcttttattaataagctatggtcgtccatagatatccccatttttcagatgaagaaattgaatctcagctgggcgtgctggctcacacctataatcccagcactttgggaggctgaggtggaaggatcatttgagctcaggagtttgagaccagcctgggcgacataacaaaaccccatctctacaaaaaatacaaaaattagccaggtgtggtggtgcacacttgtggtcccagctactcaggaggctgaggtgggaggattgcttgagctgacgggggcagaggttgcagtgaacccagagtgcaccactgcactccagtctgggtgacacagcgagatcctgtcacgaaaaaaaaaaaaaaaaagacaagaaattgaatctcagattaagtaatttgcctaaggtttcccagcaaattaagtggcagaacaagaatgtgaagccaaacaaacaaaacgcaaaaggaattttctttttttctttctttttttttttttttttttttgagacagagtctcgctctgttgcccaggtggagtgcagtggcacactctcggctcactgcaagctccgcctcccgggtttacaccattctcctgcctcagcctcccaagtagctgggactacaggcgactgccaccacgcccggctaatttttttttttgtatttttagtagagaaggggtttcaccgtgttagccaggatggtcttgatctgacctcgtcatctacccgcctcggcctctcaaagtgctgggattacaggtgtgagccaccgtgcccagcccaaaaggaatttaaagccagatttttaagcctccacattttttgttgtgttttgttataccatcatgagtattgcatatgatccaaatattaccacttgttttatatatatgcatgtattactggtaactctcttttttctctgcaggaaatggacaggctactagcatggtccaactgcagggtgggagattcctgatgggaacaaattctccagacagcagagatggtgaagggcctgtgcgggaggcgacagtgaaaccctttgccatcgacatatttcctgtcaccaacaaagatttcaggtacatcaggtattcttccaggaggaatgaagaccctctctaatctcattcttttttctttcttttttttttttttgttttttgagactgactccctctgtcacccaggtgctggagtgcagtggcgcaatctcgctcactgcaacctccacctcccgggttcaagcaattctcctgccttcgcctgccgagcagctggaattacaggtgttcaccaccacgcccggctaatttttttttttttgtatttttttagtagagacggggtttctccatgttggccaggctgggctcgaactcctgacctcaactatctgcccacctcagcctcccaaagtgctgggattacaggcatgagccactgcacttggcctcattcttaatatctaaaggaaaactaacttgttcactgtcacgtgtcatctttgcagtgtactatgggatatgttattcagatgaagaacctgaaatccaaagaggtttgactgactctctcagttagtggatgagcttggcctggaactcaaatccctgggctcttgagccagtgcattttccattacactgggcatagcactgagaaatataagcaaacgccagtcactcaacagaaacctcttctacatggggaagggattgggagaagggacatcatagtagagagtcctttaaattccccttataggccaggtgtgctggctcacacctgcaatgtgagcactttgggaggccgaggtgggaggattgcttgagctcaggagtctgagaccaggctggtaacatagggagaccctatctctgctaaaataaataaataagtaaataagtatataaatatacatacacacacatatatatataaatacatatatataacaatccatcttaccctgacagtctgccccctgaaacttactaaaccataccaaagtatatgaaaattcattttattattattattgttattgttattatttttttgagacagggtctggctctgtcacccaggctgaagttcagtggtatgatctcagctcgctgcagcctctgcgtcccaggctcaaaccatcacctgggactacaggtgcgcactatcacacccagcttattttgttttgtatttttggtagagacagggttttgccctgttgcccaggctggtctcgaactcctgggctcaaatgatccttctgccgtggcctcccaaaatgctgggattataggtgtgacccaccatgcctggccttgaaaatccattttatttatttgtatttatttatttatttagagacacagttttcctcttgttgcctaggctggagtgcaatggtgcgatctcagctcaccacaacctccacctcctgggttcaagcgattctcctacctcagcctcctgagtagctgggattacaggcatgcaccaccacgcccagctattttttgtatttttagtagagacagggtttctccatgttggtcaggctggtcttgaactcttgacctcaggtgatccacctgccttggcctcctgaagtgttgggattacagctgtgagccaccacgcccggccaaaaatccattttaaaagcccaatttttcacttctatttggttcagtgtttttcacctcttaaatggagttaataacaataacacctgttacatctatctctgatggttgttgtgagatgagatatgtgatgaagggctggatgcagtggctcacgtctgtaatcccaacaatttgggaggctgaggtgggaggatcacttgagcccaggagttcgagaccatcctgggcaacacagacccccatctctactaaaaattaaaaaaaaaaaaattagcccttcatggtagcacacacttgtagtctcagctattagggaggttgaggcaggaggatcacttgagtgtggaaggttgaggctgtagtgagccatgattgcaccactgcactccagcctgggcaacagagagacatcctttctcaaaaaaaagaaaaaaaaaaaagatgtgctggagacctttcagaaaagagacacattccccacccttaaatctcctgctccagtggctttattcatgatctccaaaaacaggagataactcacatgatcttcagctggtaagtgtatgaacaaaatatggtatgtccatacaataagatactactcatcgataaaaagggacagactactaatggcaacaacatggatgaatctcagaagccttttgctaagtgaaggaaacctccgccagacccagaagactacatactgtatgattcaagttatatggtgttctgggaaaggcaaaactatagggacaaaaaaacctggtccgtggttggtgagttgcagggaaatttttttggaggtgaccgatggaactattctgtatcttgattattgtagtgactatatgctttgtcaaactcacagaactgctgagcacagtggctcatgcctgtagtcccaacactttgggagtccgaggtgtgtggatcacttgagctcagaatttttagaccagcctgggcaacatagtgagaccccatctctacaaaattagctaggcatggtggcatgcacctgtagtcacagctacttgggaggctgaggagggaaaattgcttgggcccaggaggtcaaggctgcagtgagctgtgattatgccactgcactgcagtctgggtgacagagtgagacccagtctcaaaatataaataattaaaataaatcaggaggctgaggcacgagaatctcttgaacccaggaggtcgatgctacagtaagccatgattgtgccactgcactccagcctgggtgacagagtgagacctggtctcaaaaaaataaatgattggttgggcgcagtggctcacacctgtaatcccagcactttgggaggctgaggcaggcagatcacaaggtcaggagttcaagaccaacctgaccaacatggtgaaaccccatcactactaaaaatacaaaaattagccgggtgtgctggcatacacctgtaatcccagctactcaggaggctgaggcaagattatcgcttgaacccaggaggtagaggttgcagtgagctgagttcatgccactgcactcaagcctgggccatagagtgagactccgtctaaaaataaataaataaataaataaataaataaataattaaataaaaaataatttgggcacagtggctcatgcctgcaatcccagcactttgggaggccgaggcgggcagatcatgaagtcaggagtttgagaccagcctggccaacatggtgaaacccgtctctactaaaaagacaaaaattagtgggcatggtggtgtgcacctgtaatcccagctactggggaagctgaggcaagagaatcgcttgaacccaggaggtggaggttgcagtgagctgagattgcaccactgcactccagcctgggcaacagtctttttgagacagagcaagactctgtctcaaaaaaaaaaaaaaaaaatattggccaagtgttgtgcctcacacctgtaatcccaacactttgggaggccactttgggtggatcacctgaagttaggagttcgagaccagcctggctaacattgcgaaaccctatctttacaaaaaatacaaaaattagctgggcgtggtggtatgcgtctgtaatcccagctacttaagagactgaggctagagaatcacttgaacctgggaggtggaggttgcagtgagctgagattgtgtcactgcactccagcctgggcaacagagtgagactttgtctcaaaaaaataaataaataggacaggtgtggtggctcacgcctgtaatctcagccctttgggaggccgaggcaggtggatcactaggtcaggagttcgagaccagcctggccaacatggtgaaaccctgtcactactaaaaatacaaaaattacctgggcgtggtggcagacgcctgtaatcccagctacttgggaggctgaggcaggagaatggcgtgaaaccgggaggcggagcttgcagtgagccgagatcacaccattgcactccagcctgggcgacagagtgagactccatctctaaataaatacacaaataaacaaacaaataaaataaaaaattaattaacctcacagaactaaacactgaagagagtgaattttactgtatgtgaattcgttgtattctaatttaaaagaaaatcactcaggcttcaggttaattccttggcaatcatgaacactctgtggtgtataacttacaggacagggatatctgaagtktcctggagcaggagaagatggggtgggcacagaacctcaccagctgaaccagctgaactatgtctttatagggattttgtcagggagaaaaagtatcggacagaagctgagatgtttggatggagctttgtctttgaggactttgtctctgatgagctgagaaacaaagccacccagccaatgaaggtgagagaacctggtcttgcagctgaggggataggagtgggacctggacagggaatcctgtgggacatgggttacctgggacacagtggagaatcagacctgagaggtggaggcagaggggaagcaagagaaactcaccatggagcgtcagatcagtacacactcccaggaagttaaccctgaacccaagttagctcttgcctaaatgtccaagtcaggataggatccaaggaacttgaatcaagagatcaccttggtgggccgagcgtggtgtctcatgcctataatctcagcactttgagaggctgaggtgagtggatcacctgaggtcaggagttcaagaccaacatggcgaaaccccgtctatactaaaaatacaaaaattagacaggcatggtggcacgctcctgtaatctgagctactcaggaggctgaggcatgagaatcgcttgaacctggaaggcagaggttgcagtgagccgagatggcgccactgcactccagcctgggtgacagagtgagactgtgtctcaaaagaaaaaaaaaaagagagatcaccttggcaagccaacctctaataagggtggtaagatgggctctataaagattccagtctcagctgggcgcagcagctcacgcctgtaaccccagcactttgggaggccgaggtgggacaattgcttgagcccaagaattcaagaccagcctgggcaacatagatcccatatctacaaaaaaaagaaaaaaaagaaaattagctgggcatggtcatgcacacctgtagtcccagctactcaggaggttgaggtgggaggattacctgagtccaggaggttgagactgcagtgagctctgatggtgccactgcactctagcctgagtgacagagcaagatcttgtctcaaaaaaaaaaaaaaaaaaaaaaaaaaaatcagccacaacctcacttagaccacctgagtctcagcctgacgtctctgttctgcgtcctgtggctcagtcggggaggtgcctttgctgggccggagcatcttgcagtcggtctccttctttttcgcagtctgtactctggtggcttccagtggaaaaggcattttggaggcaggtaagggctgattccgctacctcattttctacccctgcttgactcttattctccaggcccrgcctcctctctacccctcgtacatccaggaacactgagtttcaaagaaggataggggaatatcagggaaagcgctcagcaggcctgtttcacctgcccgaatcctgtttcctgttacccatccatttctcccttcagcctcctgtagtctcttttttctgactccgaccactggtcactcacccggctctcttccagctctcttgctccatctagtggtaaaagctgaacgcgggcgccctaaacctagcctgcctccgacttaatgcgctcccggaagcctgtctcacttaatcctggcygtcagcctgcaggtcctggctctggcatccgagagagactggagcacccagtgttacacgtgagctggaatgacgcccgtgcctactgtgcttggcggggaaaacgactgcccacggaggaagagtgggagtttgccgcccgagggggcttgaagggtatccagatgataaggcgattttcctttattcttctccccatcctgcccagcatgaggggctttaaagggtggaaaggggctgggcgcrgtggcttatgcctgtaatcccaacactttgggaggctggggcaggaggatcgcttgaggccaggagtaaaagactagcctgggcaatatagggagaccctgtctctccgaaaaatacaaaaatgagctgggcctggtggcatgtgcctgtagtcccagctactcaggaggctgaggtgggaagatcctttgagcctaggagttcaaagctgcggcgagctatgatcgcaccactgctgtctggcctgagtgacagaacaagaccctgtctcaaaagaaaaagcggggggatggggcaggaagggtctgtgttccctagagcagtgcttcttaagctatctgtggtggaggaccagtgttttttttttttttttaatttctagtccatctcagactgatataaaataccataaaaattaataactggaaaattgaaagaacagacataaaatattttattggaaattccacagacatgttacatttcaataaatataactagagcaacatagcataaggaaaaagaattaccaagactacacacttctgcctctggggtacagagattaatgttaagagtcactgtttgcggccgggcgcagtggctcacgcctgtaatcaaagcactttgggaggccgaggtgggtggatcacgaggtcaggaggttgagaccatcctggctaacacagtgaaaccccgtctctactaaaaatacaaaaaaaaattagctgggcttggtggcgggcgcctgtagtcccagctacttgggaggctgaggcaggggaatggcgtgaacctggcaggtggaggttgcagtgagccgagatcacgccactgcactccagcctgggcgacagagtaagactccgtctcaaaaaaaaaaaaaaagaatcactgtttgctcctaactcggtcatttgtcattctgcaatcctaattacacaaaaagttaggacagcaaaaagcaactccgcacattaaacccctctacacaatctttcagtgaacaccaggtacatcagtgatcaaagttttttgttttttgttttttgttttgagacagtctagctctgtcgcccaaggctggagtacagtggcacgatctcagctccctgcaacctccgcctcccgggttcaagggattctcctgcctcagcctccctagtacctgggattacaggcacctgccaccatgcccggctatttttttttttttttgagacagagtgtcgctgtgtcgcccaggctggagtatggtggcgcgatcgcggctcactgcaagctccgcctcccgggttcacgccattctcctgcctcagcctcccaagtagctgggactacaggcgcccgccacctcgcccggctaattttttgtatttttagtagagacggggtttcaccgtgttagccaggatgatctcgatctcctgacctcctgatccgtctgccttggcctcccaaagtgctgggattacaggcgtgagccaccatgccctgcataatttttgtatttttagtagagacaggatttcactgtgttggccaggctggtctcgaacccctgacctcgtgatccatctgcctcggtctcccaaagtgctgggattacaagtgtgagccaccgcgaccagccagtgatcgaagtttttaatatgacctgtgaggttgcctctggctcattcatttatgcaatctaagtccaatttcaagtttctcgatttctgtacttttctcaacatgaactgataacagatgctttataaactggctcaggtcccagaaccatgcttaggattacattgccctggagcacatgaggaggccagggccctctaatgcagttcagcgagtggagaggatgggcatggcaaataaaagcaggtcattcactcttttttctcatcaccctctaacttccttttgattccctcactctttctgtgttcttttttccttccctaattcttcacctccccctcctctgctgcctccttgctctcctcgcaggtcaagtttacccatgggggaactggttccagccaaaccgcaccaacctgtggcaggtaagacctacgttcctcctttcaccaagcattgacagagacctgctggaggctgggcactgtgttgttaggccgcggcatccagaaggcttgggttctaatgcaactgatgactcataagctggtaaagcaaaagacaatgggtcataagtgctttctttttttttttttttttgagacagagtctctctctgttgccccacgctggagtgcagtgagctaccactgtactctagccttggcgacagaacgagaccctgcctcaaaaaaaaaaaagtgaataaaaaataaaactaaaataagcaaataaaaaagcactgtcctgagaaggccagcaggaataggctgcagtgctcaggcatgagacatgggggcaggatgcagaggatcctgtcttcttgaggcactgtggcatgtggggttccaggcagagggcaggatgttgctgagagtggagaagtcaggtgtgggctgggcttgacctggagccctgtgggtacaggggaaacactmttcctaatccagcagtgggggtcaccctggggatgtaaggtgatgggtttgggagctctagataggaatcttaggtcaccrccccgtgcccttccccttccccagatgcaacagcaagacgaccttggttttcctctggataggcatgaggacctgctttgggacaggtggtaaatcctttacccttcctttctcccatcagggaaagttccccaagggagacaaagctgagratggcttccatggagtctccccagtgaatgctttccccgcccagaacaactacggtaagagctgtcttgggcttgcggctgtgcccatgaactggctgttgggaccatcatgtctgagagaggaggcagagggaagcacctcccttctgccatttggcccccaggacctcagagggtargcggggtggtcggcrggtcccagcctggcctgacccgccggtggggctgcagggctctatgacctcctggggaacgtgtgggagtggacagcatcaccgtaccaggctgctgagcaggacatgcgcgtcctccggggggcatcctggatcgacacagctgatggctctgccaatcaccgggcccgggtcaccaccaggtaaggggcttggtcccaggcaacacggggccttgtagctgggggctgatgtctgaatcccggtcccagagtgtccctaccttcacaccaccaaccgtctgtgtgtgaygagctggtcccagcacctccctgagcctgtgcccagttgtgggtacaaaaaagaaagccagcagcacttgctatgaaaagcaaagggacccaggacaccttgtgactctcctgccagctcttggtacccagggagactgtgtgtggcatcttaattatggggtttctcctcttgtccttaccactaggtgggcaaagggagggaagtagaatgaccacaccagtaggtcattactggtggtcatggacttactgactcttcaaactggtgggcacacgaaaaatcttttttttttttgagacagagtcttgctctgttgtccaggctggagtgcagtggcacagtctcagctcactacagcctcaaactgccaggctctagcgattcttccacctcagctcctcaagtatctgggactacaggtgcagctaatttttgtagagatgagtttttgccatgctgcctaggtttgtctcatactcctggactcaagcaatcagcccgccttggcctcccagaatgctaggattacaggtgtgagccactgcacccggccgtgatattctcattgcttgtggacaggttttctctactgagctgttgtcaactgctaacatagaagttagtcactgtcttttctgctctycagtgctgtctcttggggccactgtccctccccctactcttgcaagactccttttgtcccaaagccccttcttgtcccctttctcccaggactggcacaggctcaggacctgtcctcacaccaggcttctttccagaccatgctctccccagccctcatgctccctgatcatggccggccctgcggatgaggcaggcaagatgggtaagccctaggcctttttctcaggacgtgtctgtcctctctccccttctctgctggcaggatgggcaacactccagattcagcctcagacaacctcggtttccgctgtgctgcagacgcaggccggccgccaggggagctgtaagcagccgggtggtgacaaggagaaaagccttctagggtcactgtcattccctggccatgttgcaaacagcgcaattccaagctcragagcttcagcctcaggaaagaacttccccttccctgtctcccatccctctgtggcaggcgcctctcaccagggcaggagaggactcagcctcctgtgttttggagaaggggcccaatgtgtgttgacgatggctgggggccaggtgtttctgttagaggccragtattattgacacaggattgcaaacacacaaacarttggaacagagcactctgaaaggccattttttaagcattttaaaatctattctctccccctttctccctggatgattcaggaagctgacattgtttcctcaaggcagaattttcctggttctgttttctcagccagttgctgtggaaggagaatgctttctttgtggcctcatctgtggtttcgtgtccctctgaaggaaactagtttccactgtgtaacaggcagacatgtaactatttaaagcacagttcagtcctaaaagggtctgggagaaccagatgatgtactaggtgaagcattgcattgtgggaatcacaaagcaaatagtactccagaaagacaaatatcagaagcttcctattctttttttttttttttttttttttgagacagggtctttctctgttgcccaggctagagtgcastggtgatcacggctcactctagccttgaattcctgggcccaagcaattctcccacctcagcctcctgagtagctgggactacaagtgtgcaccaccatgcctggctaattttttgaatttttgtagtgatgggatctcgctctgttgcccagggtggtctcgaactcctggcctcaagcgatcctcccacctcgacctcccaaagtgctgggattacaggtgtgagccacctcgcctgggcccccttctccatatgcctccaaaaacatgtccctggagagtagcctgctcccacactgtcactggatgtcatggggccaataaaatctcctgcaattgtgtatctcagacatttgtgtctttgatcctcaccctgtgaccctaagggaagaaagcctgagtgtcagtaactctgggcctcccctaaagagaaatggagatggtggctcatctaggaagtagaggagcagggggttcctggttctcaggccacgtgtgatctctgcccacccagggcctgccccagcctgcaggtattgctgtgtggtgggaacacccacttcccttgtgcacagcctttgagaggggatcgtggcctcagttccaggggttcctggccagggccaagtgctccttctgcagaggcctgcacgcatctcacccctttgacttgtatttccatggcttcccctccccacctgccccctagccctccctgactggccagcccctcagtagtcctcctcggccagggagaggagcacggccttgggtgtgttctcgaaaagggctgcccggttctgctgctgccccttcttcacccagtggccatagattcggaaagcgtaggcgtcgatgagccggcgcagaggccggagggcataggggtctcggatgacgatctcccgggtcacaggcttcacccggcggtactggtagtagatccgcactgaagccagcacggtcagagcgatcacctgcagggccaggcggagaagctgggctgcagcccccgccctgccaggccctgcccctccagcacagggacgctctgggctcgtttgccacgaagccttgggtggcttctgcggggccttcctagtgtcccccacttcccacttggccagcatcctcagggaccgagccagtgggctgacacctgccgtctttgaagccatcacagggcagctgggaggggagggatgggtactctggaaattcacggggtgtaaggactcctgggagaggagggggcttagaggtttgcacttagggagctggcgggcctggatcaggacgcttagtaccttgaacttcccccgggggctgaagtgccgcacttcctccaccaagtactgctggaagaaggggtgtgccaaggcctcttccgctgtgtagcggttctggggttgcaccaccaggaatcgggagacctgtgagaggaggagaggggaaccgagaatgtcaaggcaggtcccctccagcatgtcaggaaaggcagggcctccccgggcaggggcgcctggcatcgcagccctgagcccaggagccagttggcctggcctctcaccaggtccttcacggtgtccgagtaatcatcccactcgggcgagccaaactggtagttgccgctcatgatcatcctcagcatcagcatctgcttccggtgccagaagggcggggagccggccagcagcgtgtacatgatgacgccagtgctccacctggacatgcgagggcccagggccacttacccagcgccaggggcaccggcccagccctgcctacttcctcccttgcccagcctagctgggtgctcctcctttcccggcgcactcacatgtccacctctttcccgtagcccgggtggtcctcattcatggagcactcgataatctcaggggccaggtaactgggggtcccgcagacctctgcaggaacagtcatcatcagggcaggtcagcagggcactcagaagaggaagtccaggctggccgcagtggctcatttctataatcctagcactttgggaggccgaggcaggtggctcatctgaggccaggagttcgagaccagcctggccaacatggcgaaactccatctctactaaaaatacaaaaattagctgggcgtggtggcatgtgcctgtagtcccagctactcaggaggctgagacaggagaatcgcttgaacctgggaggtggagtttgcagtgagctgagatcgccccacttcactccagcctggtgacagagtgagactctgtttcaaaaaaaaaagagaggaagtccaaagagacaatggagatgatggaacagaaatggcgctcgggctgggactcccccaacatccaccaacttcagggcccagggcagggcgggatactgcccacagggccaccagctcatggcccattgcttccctggtcacttctagccatcctggcctggaacaagggtaatgggaacctgggagaggacttacctgaagaaatgcctagccctgctgggcatggtggctcacgcctgtaatcacagcactttgggaggccgaggcgggcggatcgtaaggtcaggagttcgagaccagcctgaccaacatggtgaaaccctgtctctactaaaaatacaaaaattagccgagcgttgtggcgcgtgcctgcaatcacagctactcaggaggttgaggcaggagaatcacttgaactcgggaggtggaagttgcagtgagccgagattgtgccactgcactccagcctgggcgacagagtgagactccatctcaaaaaaaaaaaaaaagaaagaaaaagaaaaaaaaatccctagcccttgaaatggtggaatttttattccagggaacaattaagttaggggagaaacccagaccatctctattctgcagatggttgattgagcacccgaggcctggacgtgggccaaggccatgttaccagacctcgcagcctctctcccggctccagctggcaggaaaagccaaagtctgtgagcttgatgttcatgttgtcatccaagagaatgttctcgggcttcaggtcccggtgcacgatgttgagtttgtgcaaggtgcagatcacctccagcagagctcgcatgatctttctagggtggggcacacacttgttactcttcctctgctcagggtcaggtaacaggcagggagacacagctcacatttcagccacactgcaagggagcagcacacacgcccagcccagacatgtgcacgccctgcctcccctgagaccccagtgcctgtggccctaagccacgtgggagggagcggagagaagggcaaagggaccctcacctggtttccttctcactcaaggtgaccttctcagtgaggtagtcaaagagctcccctctcttcatcctgtggaaacagagggttgatagctggatcggtcccaagaccaccactgcccttaccctgctcccagagagctgccttccaccctgatacctctagaagctaagtgggccactctccgtggagaaccacagtctggggagaggagccggggaagtgagaagtgttctggaagaactgggagaaaagcagaggaggctggagaggtggcccacatcaggggctcaggctctcatcaaccctccgaggaataggcctaggtttctcccctgactgaatttttcccctggaaaaatttttcccaccatttcatgaggtaggcatttcttcagctaagtcccctccccaggttcccattaccctagttccaggccaggatggctagaagtgaccagggaagcaatgggccccgagctggtggccctgtgagcagtaccttgccctgccctgggccctgaagttggtggacttgggagagtcccagcccaagcaccatttctgttccatctccattgtatcagtgtcttcccatctgtggaagtgacagtgtggactgggatgtatcggggcctaaatgatggctggaggctgaaagaggggactatgaaccactggcccaggaccccagacccagatcagaaggacgtgagtatcccgatttttttttttttttttttttgagatggagtttttgctcatcacccaggctggagtgcaatgatgcaatctcggctcactgcaacctctgcctcccaggttcaagcaattctcctacctcagcctcccgagtagctgggattacaggtgcccactaccacacccagctaatttttgtatttttagtagagacagcgtttcatcatgttgcccaggctggtcttcaactcctgacctcaggtgatcacccgtctcagcctcccaaagtgttgggattacaggcgtgagccaccacgcctggccgagtatcccgattttttcccaggaaacaaatgggaagaatcggctgtgcaagagttgcaggagcaaagtttgccaattacaggattaagaattgaggttcaatcttcttacctcctgggatgatctagaaaggactctgctagaacaatctagttataccctggagggctcctcagggcagcattaaaaatagcttcccccagcaacttcttcaaaggttaaagacatttgagctgtccccaagggctatacaggacagtgccacagagcagtcgagacagctgcagctggtgagtctggaggggtccgagaaagtcttcctctgttgcccaggctggagtgcagtggcacgatctcagctaactgcaacctctgcttcctgggttcatgccattcttgtgcctcatcctcctgagtgactgggattacagatatctgtcaccatcctgggctaacttttgtattttttgtagagatggggttttgccatgttgcccaggctggtctcgaactcccggcttcatctgatccgcctgcctcagcctcccaaagtactgggattacaggggtgaaccaccatgcctggccttaattttatatttttttgtagagatggggtctcactttgttgcccaggctggtctcaaactcctggcctcaagcaatcctcccaccacagcctcccaaagtgttgagattacaggtgtgaggcactgtgcctggcccatgataagtctggaatttgcatttcacagagcactttgtattgttcacatttgatgcttagaaataaggggctcatcttactaatcctattgatgccaaagcaggggcatgatgatggtgatgatggtggtgatggtgatgatgatattgatctttggaccacaccccagatgcaacctctaccacctgcctctctcctcaatactgctggcctccctttttccaatcccgcctcattacagtcgtccctagatagtcagtgagatcttttcaaaaggaagtcagcctgggcgcagtggctcacgcctgtaatcccagcactttgggaggccgaggcgagtggatcacttgaggtcaggagttcgagaccagactggccaacatggcaaaaccctgtctctactaaaacagtacacacataaaaaatttgctgggcatggtggtgggtgcctgtaatcccagctacttgggagactgaggcaggagaatcacttgaacccaggagacggaggttgcagtgagccgagatcgcaccactatactccagcctgggcgacaatagcaaaactctgtctcaaaaaaaaaaaaaaaagtaaatcagatcatgtcaccctcccagtcttgaccctccaaactccttactatggctaaaatgcctgcaggacctggtctttggtgctgaccgaccttacatcctgccaccctctgcttgggtcacttcctggacatgctttcctgaccactcggtctaaggaagcccctgtctcttgctaaccccttgttctactttatatatgtctacagtcatccctctttatctgcataggatatgttccaagacccccagtggatgcctgaaaccatggatagcactgaagcctatacttactatgtttttcctatatgtacatacctaagatgaagtttataagttaggcacagtcagagactaacaaccaataataaaatagaacaattatatcactatactgtgccaggcacggtggcttatgcctgtaatcccagcactttgggaggccgaggtgggagaatcacgtgaggccaagagttttggggttttttttgttttgttttgtttttgtttttgagatggagtttcgctctcgtagcccaggctggagttcaacggcgtgatctcggctcacttcaacctccgcctcctgggttcaagcgattctcctgcctcagcctcccgcgtagctggggcctcagcctcccaaactgctgggattacggttgtgagccactgcgcccgcctgtagctaataattattagtattcacactatgccagtcactgtgctattatcactcccataatactgatgagaaaaccaagatttaaagaaatgatccagcccacaagtggtgaacccaggtttccaaagccggcagcctgaccccaggggctgatctgtctaaacaccgtgattgtatttggcatcctcagcgcaggagctggctgtggtctccaggcagccctggggttggggaggggacagcagtcggaggttctctcaggtgtggcttgctccagtgctgggtacttacaggtcaaacaccaagaagaagaaagtgttggtctcataagt

SEQ ID NO: 96435 - DNA, 20669 bp, Homo sapiens
  misc_feature (1)...(20669): n = A,T,C or G
tccatctcaaagaaaagaaaattagccgggcatggtggcgtgcgcctgtaatcccagctactcgggaggctgaggcaggaggatcacttggaccctggcggcagaggttgcagtgagccgagatcgagccactgtactccagcctgggtgacaagagggagactctatctcaaataaaaagtaaataaatagaaatgcaaagcttaccgtggctgacaaagcccggcgtgccccgcccaggcacccttgccaccttgttctgggctgggtccacccagctgtggccacatggtggagcaggccagctggctcccctgccactgacctttgcacgtaccatttcctccatgcaagcacctccccaccctccgcccgctgactccctcaccaggctcccagggaggaaagcgtgagccccagaatatccatctgccgctggtcacctcagcagagtcccctgagacccccacgctagtgtccctctgcccgttactctttttccgtctcctttgtagctggcatcacactgtgggattttgattggccacctttgctgagcatctgtcttccccagtaggctgggggccccaagaggacagggaccccttgccaagccctgtctcagaggccttccaggtgggacagatgagccagaaagcctcaacgtggcacttccaaagcctgcctgcccagacaccacctcacctgccctccgctagccatcggcccctctttacagatgaggacattacgccagcacagaggaccatcacactgctgatgagtggcaggagtgggctggatcacgtgggcacagcatggtgctgaagccccaggtgaaggggaggtcatcatggcccagtcccacagctgaacccagggtgagagcagggtcagagtcctttcctccagagcctggcagaaaggtgggacaagccagctctgcgaagaggcctctaaaaacaacccttatggttacccgggtgtgcccaggctgctgtgagcccatctgggccaacagccaccctctgcagtggcctggcttccaaggcgccccctgcccagcctcacctcctcttttggggctggtccagccgcacgtcccagcagcagcagccgccctcgcagccggccagcaggcgggcgtccgggcaggaggcgacagggcagaggcgcagggggatagaggtggtgtccagtgtgagcagctggctgccagtgggcaagggggaacagagcatcagacccagaccgaggtgtccctgccccagcagctggccactccccagcctcacccgaagcatcacctggcctggaattcgtagtcctggttgggcaccccgatgtcccagaggatgatccgcttgtcataggaggccgctgaagagggggtggggtaggggagaagtggccctgagatgaccctgctccctcctgctggctgcatcccaggctgagcccacggtcccaaggccagcccctccgaggcggggagggcgggccgaggctaggagacaggaacactcctgggcccccaatccctgtttcctccatctaacctgatgcggtggctccagcggccacttcctgtggctcatccatcccccttgacaggggcgccacacccgggggcaggggcatccccccaggtcactgacaggggacagagtggcccaggctgttggaaaactccgaggccacagagcaggctgtggataaagccagggttgaagcgacatggcttcctgccaaagctagagtcggagcggtgcagactggggcccggcaggcacccgagctcacagccatcccagggaggggagcgtggaggctactggggcagcaggacaggggtgcttgggggtcccaggggtgaaggggaggggcttactgaagagatgggtctcgtgggcggggctgaagcacagggtggcgatggccttcttgtgggctcggatgaccccgcagcagaagccggcacgcacgtgcagcagccggaccaggccccgtaggcctgcagccgccagcacactccagcgcttcttgtggccagcctgtgtgaccaccatcagagcggtccaggccacagaaaagaactcctgggcgggggttagagtaaacagtcactggggcagagctattggtgtgaacacgcgggtagcccgggcctgggggagggagccccagcatgaaagaaaaaggccatggggcagggggccgagcctgcatccatccccatgctgctgttcaggagtcagtcgggcacccttgcccagcagggacagggccttgcactcacctcgccgggtgccttgtacttgtggagcacgatgcccgtctggcaatcaattacgcacacagcctccccgccgcacgtggccacggtctgggatgtggcccctgagtgcccggttttgagaggtcggatgagcagagacatttcccatctaggtcctccctgcagcctcctcctcccagccttgatggcgccttttaagctctgtctcctgatcccccacccatccaggcggccctatttccagcggcccttgccccgcctgcccgccaccatgtaccctcctcccaggccggctcgaaggcacaggcccacagctgggtctcgaggtcctgggggctgttgttcttgctgtggcactgcaggaagtgcaggggctccagcttcacagcaggctgtggggggagagaagggtcacagctgcccagccccgactcatctgccacctgctccttgccacctcagctcacctggctgccatcggagcctgccacagggctgccctccacctgggccgacggggaggcacacgcccgcttgctgggagagaggctgagtgggacgtcgtctggccgtttcaaggccgccagtctggcctgtggagggggccttgtgaccatgggcctgtctgcctggggcttccttcctccccatcacaggctggaccccacctcactgcggatgcaggaggcccaggctggcccggggtcacctagggagtgagccaggacctggggtgcttcctgggcacatgcccaggacgccttggtctcctgaagcttctccagggaggagggactgggctggcctcagagccctgggagctgcactcaccctgggcttgtgggcagctccagcttctgggggcttctctgggctgttagccttttgcacctgggtcctactggcggccaccagctcctcagagatcatccgcacctgggtggggccaggccatcaggaagctgggcagagtcccaggtgcccccagccctgccgatgcatagtcagggggagcttatgcttccagagttggggaagggcctctccagccaacagggctgcccaccctgactcaccccactcccacagcccctcagcccttcatggccagggacctccaggcagctagagatacgagagccagtgactccctgcacattgggacagggacatacccgccactgggtgaactcgctgagggactcgggcccgtagcggacatccctgacagccgacttcacaaagtccgcctgggccttctcagcctcctcttcaggacccagtgtggccatgaacttctcccagtgagctgtgacctggtgcaagagggaccagatccaggcccggcccaccccagctcctccggacccagccctccatctcagggaatctcaatcccgccacgtgctggaagcctcctggaatcacagcctcataaaacacacacacacacacacacacacacacacaccccagcaacacacacatacacacacaccccacacaccccagcaacaacccaggtgcctacacacacacacacacaccagcaacaacccaggtgcctatagtcccagccactgggaggctgaggaagaagcatcgcttgaggccaggagttggagcctggggaacagagcaagatcccatctctacaaaaaattttaaaatgatccagacgtggtggcatgcgcctaaagccccagctattcagaaggctaaggcgggaagatcgcttgagcccaggagttggaggctgcagtgagatacgatcacaccactgcacttcaacatgggcagcagagcgagaccctgtctctaaaaaaaaaaaaaaaaaaaaaaaaaaggtaaaaaagaaacaccccagaaaaagctacttagaagagtcaggccgggtgtggtgactcatacctgtaatcccgacactttgggaggccaaggcgggcagatcacctaaggccaggagtttgaggccagcctggccaacatggtgaaaccctgtctctactaaaaatacaaaaaaaattagctgggcatggtggcaggtgcttgtaatcctagttactcgggaggctgaggcaggaaaatcacttgaacctgggaggcagaggttgcaatgagccaagatcgcatcactgcactccagcctgggcgacggagtgagactccatctcaaaaaataaataaataaagtagcacatcaggctaggggctgttggggcaaagagcctctatcagtcaccctcctcaacatcctcctgatgtccaattctatcattctcccaatgcccccacagctcctaagcacacaataatcctctcatccccttaccctgctggtcagctcccgattcaggttctccacctgagagtaagttgaggacgcatccttgccattgaccttacggagcgtgggcaggagaaaggagactttcaggttgtcattgacctggggaagagagggtgaagagcagtggctcaggagatgctgagcctgagcccaacagagtcctggccccaggtatgaagctggtgggaggctcccacttaccgtcaggaaggggttgccctccaggctgagttcctcgagcttggggaactggcacaaggcagtaacatcccccagctggttgttggcgcagcggaggacacgcaggtgggacaggcccaggttgtccggcagcgtctccaggtggttgttagacaggtcaagctcctgcagctgcgtcaggcggcacaggagtttggggtccaggtgctcggaaagcagctccaatcctgacaggctggagttgggggcagaaggcttagggggcgggcaggctttgcaccctacaccaatctgccccgggtacctcagaaggctttttcacctgacatttctcgtacaagtgtagccgccccgcccatccccccgttactttatttttagagacggggtgtcactcagtcgcctaggcgcgatcatagctcacagctgcctccaactcctgggctgagggatcctcccgcctcagcctctcgagtagctgggactagaagcgcgcgccactactcccgactccccaccacttaacaaaaaaaaaaaaaaaaaaaaaaaactgcaactactttaggactggggggcatcctagccccctctaggatgctcttcctgatccttcgggggctcgtctgtgcttcccaggccctctaacgatagcggcaggctgtgcccctaactgtccgggctcccttcaggggatgaggcccctcggggctcccggcgagcgggtggggccacgatctcccaacaagaagacatttggaccactctgccgaacccagagggcgataacggggacaagcgggccgttggggagggtccccgctcttctccccgaccgcccggccccgaggacacagcctcacccgctgcccggctcttactccagactccggatcttccccagccggtcgctcttggggcgcccgcgctgcattagcagccgcgccgagagggggcccatggcgaggaggcgcagcccgcgctgacccagtcggccaccccggcgtgtggcgtcgccctgcgtctcctggagcccggcactggcgtccgcggtaactgagcccaggaggcggcgccgcgcgagcccgtgggcgttaacgaccggaaggaagcggaacccaggcctcgtgcccccgcccggcgcggactacaactcccagcggcccccacggccgcgcctgcgcactggccacgcggacggcgcgatggcggcggctgccgccgagacccccgaagtccttcgggaatgcggttgcaagggcatccggacctgtctgatctgcgagcggcagcgcggcagtgacccgccctgggagctgcccccagcggtaaggggtgggagaggggccgcgcccacaaacgtcgctctgcatctggggaaactgaggtccagcttggccatgataggggccgggatcgaagcctgtgagggacccttacggtaggggtgatgcagggtgaggagatgagggctttaaggagcgggcttgggagtggggaaggagctggaacgtgggtgggttcgattacaggtcacctcggggactctggggggatctgcctgtaaacctcgacgtagcctctcgggtctggcgctgggagcttcacgggcctgcagggagatgacacggaaagggtcgatcgagggtgctgaataccagtccaacggtgcctgaaggccgtggactgcaatgggcaaggagacagtgaattccagttaactaacgaaaaggaactcaaggatcgctgcaacccaggagctggaggctgcagtgagctatgatcgagccacctcacttcagcctgggcgacagagcgagactctgtctcacaaaaagaaaataaataaaaaaagaaaaagaactcagcgcctttgggctggcatggaaggactgtggttggttgcaagggcattccaacccagaaaactgcgtggggtaggaaggtggattggtgatgcctcaggtgagagagatgaggctggagaggttgtgggggggggaggtctgatcacagatgctccccggtgcatcagctgagcaggctggacttgtcccaaaggccctggagagctcttgaagggttttaaaggagtgatgaagtcaaatgtgaattttagaaagatcctgggaagggaacgggcagatatgaaggtgtggaggctggtaagccagtgaagactgccccaacgtccatggtaaaagtgcccaaggtcctatggaaacagcatggcatgcctcatgaattaaacatagaattacccatgatccgcaatcctgcttctgggtatatatccaaaggaactaaaagcagggtctggaagagatatttgcacacccatgttcatattcacgacattattcatgacagcccaaagatrgaagcaaaccaagcatctatcaagatacctgggccgggttcagtggctcacgcctgtaatcccagcactttgggaggctgaggtgggcagatcacctgaggtcaggagtttgagacctgcctggctaacatggcgaaaccctgcctctactaaaattacaaaaacttgccgggcttggtgaggcacatctgtaatcccagctactcgggaggctgaggcaggagaatcgcttgaacccaggaggcagaggttgcagtgagccaagatcgcaccactgcactccagctcaggtgacagagcaagactccttctcaaaaaaaaaaaaaaaaaaaaaaaaagagatgacttgatccacaaaatgtggtgcatacacatagtagaatactattcagccttaaaaaggaaggacaggccgggcacagtggctcacacctgtaattccagcactttgggagaccgaggcaggcagattgccagagcccaggagtttgagaccagcatgggcaacatggtgaaatcccacctctacaaaaaaattaaccatacatggtgacacgtacctgtagtcccagctacccaggaggctgaggtgggagggttgcttgagcctgggaggtcaaggctgcagtgagctgtgatcacgccactgcactccagcttgggcaacatagtgagaccctgtctcaaaaaaaaaaaaaaaaaaaaggacattttgacatatgttacagcatggacgaaccttggggacacgatgctaagttaaggaagcagtcacagaagacaaatactgcatgattcctgttgtgtgagctacatagggtagtcacagggacagaaagtagaagggttgttgccaagggctcaggaaggggagatggggacctgttgtttaatagggaaagagtttcagttttgcaagatgaaaaagttctgaatggtggtgacggctgtacaacaatatgaatgaacttaagagttttaatttgtggaaggggccaggtgcggtggctcatgcctataatcccagccctttgggaggctgaggcaggaggctcgcctgagtctaggagtttgagaccagcttggacaacatagcaagaccctgtctctacaaaaaatttaaaaattagctaggtgtggtggtgtgtgcttgtagtcccagttacttgggaggctgaggtgggaggattgcctgagcccaggaggtcaaggctgcagtgagctgtgagcgccactacactccagcctgagtgacagagcgagaccctgcctcaaacaaaaaaaaagaaaagaaaaaaattgcggaaagtctgacccgttccagtggccatgtggaggtgacatcttcccaacccgatggctatggaacaaggagagtgaggtatccaggatctcagggcactggggcagttcctcactggctttccagcctccacccttcatatctgcccctcccccctccagatctttctaaaattcacatttgacctcgtcactcctttaaaacccttcaagagcgctccatggcctttcggacaagtccagcctgctcagccgacacacgggggactcccagttttaatgtttcccgtgggagggccccaggagcaggaggagatagtgccaatctcaggaggggtctgagctggagtcggtggctggaagtaaagcattggaaggggctgaggtccctggagggaagaacagagaaagacagcggcccacagtgagtggcagcccagggtgtgaggagcctggagatgggagaggaagaggagacaggccacagagcccagggctgagttctggtggcctccgaagtcctcactgggtgactccggccagaacctccacacctcctgcccatgatagttatggtaccttcctcttggggctgtcctggggatgaaactagataatccatgtaaaatgttcagtgccacggatgcaaatactggctatttcattggcgaaactcttttttaaaaatttactattggctgggcatggtggttcacgcctgtaatcccagcactttgggaggccaaggcgggaggatcacaaggtcaggagttcaagaccatcctggtcaacatggtgaaacctcgtctctactaaaatacaagaaaaaaattagctgggcatggtggcgcgcacctgtagtcccagctactcgggaggttgaggcaggagaatcgcttgaacccaggaggtagaggttgcagtgagctgagatcgtgccactgcactccagttttggtgacagagcgagactccatctcaaacaaacaaacaaacagacaaaaagtattattattattttcatagatggggtctcactgtgtcacccaggctggtcnnnnnnnnnnnnnnnnnnnnnnctggtgtccactagcacgatcttggctcactgcaatctccacctcccgggttcaagggattctcctgcctcagccacctgagtagctgggattacaggcatgcaccacgacgcccggctagtttttgtatttttaatagagacggggttttgccatgttggccaggctggtcttgaactcctgaccccaggtgatcagtccaccttggcctcccaaagtgttgggattacaggtgtgagccaccgygcctggcctggtttctagactttctttagcatgggggaacccttagagtaccgccaggcctcggggttggtggcagagcagagagggacatggggtgggagttgagtgacagcccagggtatgaggattgaggggtgatgctgggtctggaaaggtgccctgaggacaagagtgaggagaagggaggttgggacactgaggagctcaactgaacgctcagctctgtagggaagttggctgmcctcctaggtgaccctcacgctggtgataggcacgggccaacccctgggacaccggggtggcatcagcaaagacctaaagagattagggtgcacagattcaaggtagtcaggcagtttggggcctcctggaagcagctgaggagatgggagtgcaggaggtgctgtccagcctcgggctggttccttaactttgctgagcctcctttgtaaaatggagaaggaaaaacatgttgtacaaacccttctcttttacaggggaggaaagtgagaaaggaaaccaatcaaattcgtgttagctcaagagggctgcgggccttccccggtcagcctggggcagaggctctgcctgcacctccccctagactccagctgccttccacagtgtcctgaggggaggaatgagccatcagagggtctcctgagggcacacaagtgccaggggctgccatggctccaggatgtgtctttcctttttttttttttctttttttttttttgagacagggtcttgctttgttgtccaggctggagtgcagtagcgcgaccatggctcactgtagcctcaacctcctgggctcaaatgatcctcccgcctcagcctcctgagtagctgaaatgacaagtgcgctctgccacacccggctaatttttatttaaacttttttttttttttttgagtctcactctgtcgcccaggctggagtgcagtggtgccatcttggctcactgcaacctctgccttctgggtttaagcaattctccagcttcagcctcctgagtagctgggattacaggcacctgccaccatgcctggctaatttttgtatttttagtagagatggggtttcaccatgttggccaggctggtcttgaactcctgacctcaggtgatccacccacctcggcctcccaaagtgctggaattacaggcgtgagccaccgcacctggcctgttttaacttttcgtagggaccgggtctcgctgtgttgcccagcctgtggacttgtgtttcttttgcagaaaacataccgtttcatttactgctccgacaccggctgggccgtgggcacagaggagtctgactttgagggctgggccttccccttcccaggagtgatgctgatcgaggactttgtgacccgggaggaagaagccgagttggtgcggctcatggaccgtgacccctggaagctctcccagtctggacggaggaagcaggtagaccggccctgagctcatgggggttgctgggctgcgctgaggagacagccctactgctgggggccatccccctccttgcagccacacccctcaaacctccagggttggtagtgggcgagttccccagaccttggggctgtgggcagccagactcgctgcaggacgtgtgtccgatgggcagaggtgcacctgggcaccccatctccctgtgatatgcgctcctgggctctctgcccctctgtagctggcttggtggtggtgaaggcaccccattctcccaagctgcaggcgcccccacctcccattgtcaccatccgtgtcctgtctcctcacacgcattcccaccttccccctccccgggcccgccgctccctccaactccttccccacctgtgtccaaacatccccgggtgccccctctcccttcattgtaggttttttttttttttttttttgagacagagtctcgctctgccacccaggctggagtacagtggcatgacctgaactcactgcaacctctgcttcccgggttcaagccattcttctggctcagcctcccaagtagctgggactacaggtgcccaccaccatgcccagctaattcttgtactgttagtggagacggggtttcaccatgttgaccaggctggtctcgaactcctgacaagtgatccgcccgcctcagcctcccaaagtgctgggattacaggcgtgagccaccgcgcccagccccattcttttgtgacatcctgttggatgttggtacatttcatttcctcattcatctgtcgatggacattggcgttgttgtcactttttggctgttgtgaacatttgtgtacaggtttttttttttttttttgagacagggtctcgctctgtcgcccagactggagtgcaatatgtgatattggctcaccgcagccttgaccccccaggctctagcgatcctcctacctcagcctcctgagtagctgaaactaaggcatgtgccaccaagcccagataattattattattattattttgagacagggtgtctcattctgtctcccaagctggagtacggtggctcagtctccactcaccgcagcctcaacctcctgagctccaacagtcctctcacctcagcctcctaagtagctggaactaaggcctgtgccaccacatctgtctaatttttgttttgttactagagacagagttttgctgtgttgcccaggctggtctggaactcctgggctcaaacgatccacctgcctgggcctcccaaagtgttaggatgataggcgtgagccaccatgcccagcctaatttttaaatttcttgtagagaggaggtctcactttgttgcccagactggtctcaaactcctggcctcaagagctccctccgcctcagccttccaaagcgctgggattacaggcatgcaccaccatgcccggccatttgctgtcacttctgtctccttgagtctgcctcctcctgcttcacctccatgaagccagggggcttttgcttgcctgggtcactatgactgaattcttcccacctagtctgtggtagacatcttcgtaaactcagacacctcatgtcctctttgtcttcatccttcaggactatggccccaaagtcaactttcggaaacagaagctaaagaccgagggcttctgcggcctccccagcttcagccgggaggtggtgcggaggatgggcctctacccggggctggagggcttccggcccgtcgagcagtgcaacctggactactgccccgagcggggctctgccattgacccccacctggacgacgcctggctgtggggggagcggctggtcagcctcaacctcctgtcccccaccgtgctgtccatgtgtcgggaggcgcccgggagcctgctcctctgctcggccccgtcggctgccccggaggccttggtggacagcgtgatagcacccagccggtcggtgctatgccaggaggtggaggtggccatccccttacccgcccgctccctgctggtcctcaccggggcggcacggcaccagtggaagcatgccatccaccgcagacacatcgaggcccgccgcgtctgcgtcactttccgggagctgtcggctgagtttggccctggagggaggcagcaagagctgggccaggaactgctgcggatcgccctctccttccagggaagacccgtgtgaaccgcctccttggctccagacttgactgatcccgggattgaaatgaggagcacagaacagggcctcctgcaactcacggggtttcaagagaagatggctgacccctgatgctgtgagcagtgtgagccctgcccaggagcaggttttgatgggaacgtacctccaggcagcccccttccacctggaccgtggccacacttttttggttatttagtttgtcacagtcttggggamatgggatcatttgagcttaaaaaatactgggggccgggcacagtggctcacrcctgtaatcctaacactttgggaggctgaggtgggcggatcacttgatgccaggagttcgagaccagcctggccaacacggtgaaaacccgtctctacaaaaactacaaaaattagccgggtgtggtgactcacagccgtaatcccagctactcgggaggctaaggtgggagaattgcttgaacctgggaggcggaggttgcagtgagccaagatcacgccactgcactccagcctcggtgacagagcaagactgttttgaaaaaaaaaaaaaatgggaacattttaaatgattttcacctttattatgcatctattttcatggggtttcccgatatctcactgtccagtcccttcatttggggaatgtgttggattagggaacagggttgaagatttgaagtttagactaaagagctgggaacagcttcagagtcaggctcagcctgactcatgcttgacacccccacgcccagggagggttgggggatgtgaggagggcagggaaatctgagagcctccttccagccccataacgctgttaacaagtaggaaaaattaaagctcccggccaggcgcggtgactcacacctgtaatccgagtactttgcggggctcaggtgggaggattgcttgaggccagcctgggcaacatagtgagacccccatctctacaaaaaatacaaacattagctgggcgtctgggcatggtggcacacacctgtagtcccagctactcgaaaggctgaggcgggaggatggctttaccaccatgtcaaggctgcagtgagctcatgatcataccactgcacttaacttggcaacagagcaagaccctgtccctaaaataaataaaaggaaaacaaaaaaagctcctcacctcccactacaccaggaggctattcctttgtgatggggctgtggtgggggcgcttacctggatgggggagctgctctgctgttcctgtggctgggtgcggggcaggctgtggaggctgagggggtggcctggacccatgtggccagccctctctcccaccactatgggacaaaatgttcagttcctcaccacctgctgggaactaaatccaggggaacaggaaaggttcggggccagcaccactctttacagtcacccccagaaccctctgggagctgtcagatggcagagccgtgcactgtctgtaaagcagcatcccagccactgagctcccaggagggctgaagagccccgcatagacccaggggaaaggctgatgggtttctagtggctgtgagagcccagccgctaggtgggaggacgtggctcccaggccaccttaacttcggctccctggtcaactcacttggagcaagagcacagagcccggcttcctcccagtatcacggccccaacgggcccctcactgcgcatccagatgtgagtcaggtcggagctccagctgatcctcactgcactggagcagataagccagcccaggggtccactctcgagggggccagtgcagggtctctgcccctgacaggctgggctggcccctgcaggatgctccaacatctggagaacgatgcacatagagacttggaggggagaggcctcgtgaggcttggggatgctgtggagcaaagaaatctccctccctggggtccttccatgctggcccttccagcactcctgcagagcacactttaggaaactccattacctgttaagtttgtgataccagagttgggtctgtccttgaagctgtgacacgaagacccacggcgacaccttacccaaccaggatggggctggagaaggccacgccaggatgcttctgccacagcctggcccccgtacacggccccatagcctcgtatgtttcctttttcttttcctttctttctcttcctttctctttcttttttctttctttcaggcggcggggcagggtcttgctctgttgcccaggctggagtgcagtggcgcaatcatggctcactgcagccttgaactcctgggctcaagtgatcctccccctcagcctccccagtagctggaactacaggcgtgtgccaccatacccagctaattgttttgttttgatttttagtggagatagagtcttgctatgttgcccaggctggtctcaaactcctgggctcaagcgatcctcccgcctcagcctcccaaagcgctgggaataacgggtgtgagcccctctgcccagcctgccccatgtgtttctgcagggctgggccccaggagccaccgcctgcagggtaacatctgcttaccggtgtttggggtggccatttccgcatccatcagacactttcctcagcagaccaggctgcccactctcatgctcttggagcttcaagcaaggggatggtgaggcatgggactgggacacgcccaaatagggaagtgcccgctccaagggcggcttctggagacatcccgctccagagcaggcccagcgggggctcagctgacatccctcagccgcttcagaaagatgttcaggaaacaccgttgcctgtttgctcagagtggcaggtggtgaggccgagtctggtcctccctcacaggcagggacaggagccaagctccatgcaaagcccattctctggggttattcctgcctcgatttgtgttaagccagcctgtcccccatcccacagtacccatgggtgggtgggccgcagacgggctgtgaaaggggttgagacgtggtctcactcattttacccaggctggagtgcagtggcacaatcttggctcactgcagtctcaacctccctgggctcagatgattctcccacctcagcctccccagtagctgggactataggcacgagccaccaagcccgggtaatttttgtatttttgtagagacagggtctcgtaatgttgcccaggctggtctcgaactccttggctcaagcgatccgcccacctcagcctcccaaagtgctgggattataggtgtgagctacaggttggcaggttctacatgggtttcggctcctgtctgggccttgccctcctgggccccaccagggctctgcagcatctgaggcaaaaagtcttgggccggacgaggtggctcacgcctataatcccagcactttgggaggctgaggcaggaggatcacttgaggtcaggagttcaagaccagcctggccaacatggcaaaaccccgtctctactaaaaatacaaaaattagccaggcgtgatggtgggcgcctgtaatcctagctactcaggaggctgaggcaggagaatcacttgagcccgggaggcggaggttacagtgagccaagatcacaccattgcagtccagcctggacgacagagtgagactctatctgggaaaaaaaaagtctgcgtcgatgatctgctgggtgtggagtgggtccttcaatgccagtgacttgtgtcctgcccttgacaggggtggggcagattttccctttaaggaaactgcagcctccaccggaagtgcagtctttctcgaggcttgtgggcttgctggcctggggctcggtactgaggccactgcccagcccaaggggcagcctggcttctcaggattggcagaaccaaggcactgccctagacgctttccatggagtggtgccagttgcttggcacacctgattcctagcagcctctagggtgaagtgccagagttaaaaatattaacaaggcctggcacggtggctcatgcctgtaatccagcactttaggaggctgaggccagcggatcacttgaggccaggagttcgaaaccagcctggccagtgtgatgaaactcagtctctattaaaaatgcaaaaagaaaggctgggtgtggtggctcacacctgtaaccccagcactttgggaggctgaggcaggcggatcatctgaggtcgggagttcgagaccagcttggctaacatggagaaaccccatctctactaaaaatacaaaaataagccaggtgtggtggcgcatgcctgtaatcccagctacttgggaggctgaggcaagataattgcttgaacctgggaggcggaggttgcggtgagctgagatcgtgccactgcactccagcctgggcaacaagagcgaaactctatctcaaaaaccaacgacaacaacaaaaattagcagggcatggtggtggtgcatgcctgtagtcccagcttggcagaagaattgcttgaacctgggaagtggaggttgcagcgagctgagatcacgccactgcactccagcctgggagacagagagagactgtttcaaaaaaacaaaacaaaacaaaacaaaacaaacagaaattctttcctagaagagggcctctacctcagtggccgacaaaaaacagaatgggccaggcatggtggctcgcacctgtaatcccagcactttgggaggccaaggcaggagggtcgcttgaggccagaagttcaagaccagactgggcaacatagcaagatcccatctctacaaaaaaaacattagctgggcatggtagtgtgcgcccgtagtctcccaagtgtagctacttgggagactgaggtgggaggattgcttgcgcccagaagctggagcctgcagagagctatgattgcaccactgcactccagctctggcctgggcaatagagcccaaccctgtctctaaaataaatctataaacataagctgggcaagctggctcacacctgtaatcccagcactttgggaggccgaggtgggcagatcacgaggtcatgagttggagaccagcctggccaacatggtgaaacccccgtctctactaaaaatacaaaaattagccaagcatggtggtgcgtgcctgtaatcccagctacttgggaggctgaggcacaagatcgcttgaacctgggaggaggaggttgcagtgagccaagatcatgccaccgcattccagcttgggtgacagagcgactctgtctcaaaaaaaaaaaaaaggctgtctggtgcttccttagcagtgccaccagcccgcaggagggacccacctgttcctgctgccccacagggacttggggctggagaatgtcctgaggtgaccagtgctctggtagctcctctcctcaagggactggggggaacgccaagctgaccctgtccaggtgggctctgttgtcgctcagccaccctctggggctgccccttcttttgtttctggaaagagagggccctgtctgggaggggaagcgccaggcagaggcaccctgcgctctcggggcggagccccatggcggcgtgtctggacatgagtaccctgcctccattctagagatgtccacgcccccttgccggggcagcctgggaggacactggccagtgaccagcgacaggaggccagagggcgctccaggagtttttcaggccacgatgtgggtcccccagtcagcagatgccacgggagggccaggggctgcaatttatcccctctgcccacagcatcccccaagaacagaaagactttgaatagcatcactggtttattccgtttcatccagggcagctgttttaaaaacccgcacacaggacagtggctgtctctgccgcacgtgatctacataacgccatgcatagatcatcagcacgaggcaggtaagggctgcagctgagtcaggatccactcaggcttacgtggtctggtcctcagcagacccttcctagaagacacgaaaacacattccgccttccaagtttctaaaccagaaacacctgcgttttgaaacaggtggtcaggtactaaacggagagggtgtaccacgtgggaggggccttggcatgtctaggcaccgggaagactgtgctccaaattaggatgggccctggctggctcccgggcaaactgaggcagaggcccctgttcttttttttttttttttttgagacagagtcttgctctgttacccaggctggagtgcagtggcgtgatctcggctcactgcaacctccgcctcccgggttcacgccattctcctgcctctgcctcccgagcagctgggattacaggcgtgtgtcactacgcccggctaatttttgtatttttagtagagacagggtttcaccatgtgggccaggctggtctcgaactcctgatctcaggcgatccgcccacctctgcctcccaaagtgctgggattacagatgtgagccaccacacctggtctggagccctctgttcttaaatactcttcaaaatcaggctaaacctccagaaaccgaatttctaggctgcaatggcattcctcatcgcccatgctgcccttcaaggcgtttctgcagctccaacaacagctcaccctccgtctccccacaggctctggggtgaccctgaggtttcctctcccggccaccatggccctaccaatggtcactgctattcccacagcaatggtttgcctcatgcctcgaaactagaaaggctggagctgggagaacgagaaccctaggagaaagagaacaagaaattccaagactgtcatcctcctaatcagagggctagacttggatgtggctccgtccccacccatgtgccaccatcactgggcacttaatacctgcctggatgctgccaggccaagagctctgcctggggaccaggtacagtaactggcccccagatggcactggagatgcgttccacagtctggggagtgtggtactgcgtgggcaggggcacagatggtccaggaaggtaggtggcaggagaaggcccagcagggcccctcccaaaagactcaggccagagtaagggcctgctgcctctcccagccgtggggagccgtttgtttaggagagccagcctgtcttcttgacccaaagccactccttg

SEQ ID NO: 96436 - DNA, 14867 bp, Homo sapiens
ggcctcccaaagtgctgggattacaggtgggagccaccgcgcccagcccgttcttgatttttaaaaaattctattatggatacttcgttaacatgataaaatgtatttagctcaaccgtaaagctcatactcaatggggaaatagtaaaggagtcctattaaaaccaggacaaaacaatgctatccattatcatcacttttattgaatattgttctagaaaaactactaaatggagttagacaatagaaaaaaaaattccagaggaataaactttgaaaaagaggaattaaattattagtagcaaatattaagattttgtacctagaaaatgcaagaaatcaactaagaactgttaggtacaataagaagttccagtaaagtcttctatgcaccaattttgaactcactttactggaatgtcttattgtttgtaagaagtttgaagaggacttctatgtaccaattggtaccacagcctgaaatcttcaggctgggcacagtggctcatgcctgtaatcccagcactttgggaggcctaggcgggtggatcacttgaggtcaggagttcaagaccatgaaaacctgtctctactaaaaataaaaaatagccaggtgtggtggtgtgtgccagtaatcccagctactcagaggctgaggcaggagaatcacttgaacctgggaggtggaggtggcagtgagcagagatcgtgccactacactccagcctgggcgacagagcgactctgtctcaaaaaaagaaaaagaaaaagaaatcaagtctttaatgacacaaataacacttaagcagtgtgatggtataaaaaaatcccatcttcaatacaaatgaaaagcaaactacccaggagttgatttaacaagttatttataagatgttttaacaagttatgtgtaagacataagacaaaccatgaggaaaggcaaactgtgttcttagatgagaaaatgccagtgcttcctaatctgtgaatttaacataattcaataaaaacattagagtatgacaaaaaaaaacagcataaacaaagtataaaacacaaattatacatgggagaaatatttgcaatgcatataacagagaaaaggctaatgtccctgatatataaagtgtctacatatcaataagaaaaaacaactcagtagaaaattgacacaaggtatgaacaaacagttctcaaaaacagaaatataagctgagcatgatggcacacacctatgttcccggcttctccagaggttgagacaggagaattacttgcacccaggagttcgagaccagtctgggcaacacggcaagacttcctctttacaaagcataaaaaattttggctgggcacggtggctcatgcctgtaatcccagcactttgaaggggcggagatgggcagatcatctgaggtcaggagttcgaggccagcctggccaacctggtgaaaccccatttctactaaaaatacaaaaattagccgggcgtggtggtgggcacctgtaatcccagctacttgggaggctaagacagcagaacctcttgaaccctggaggaggaaaatctcttgaacctgggaggtggaggttgcagtgagccgagatcctgccactgcactccagcctaggcaacacagtgagactctatctcaaaataataataataataattcagctgggtgtggtggtgcacatctgtggttccagttactcgggagactgaggcgggaggatcctttgagcccaagaggttgaggctgcaatgagctgagatggcaccactgcactccaggctgagcaacagagtgagaccttgtctcaaaaaataaataaataaaaataaaataaaaatgtgcagatgaggaacaaaaagagactgacattcttccatattccctttcctatcttttgaaagttgtgctatttgtattaattacaaacaaaaacaaaaacaaggccgggcgcggtggctcaagcctgtaatcccagcactttgggagggggagacgtgcggatcacgaggtcaggagatccagaccatcctggctaacatggtgaaaccccgtctctactaaaaatacaaaaaaattagccgggcgcggtggcgggtgcctgtagtcccagctactcgggaggctgaggcaggagaatggcgtgaacccggaaggcggagcttgcagtgagccgagattgtgccactgcactccagcctgggcgacagagcgagactccatctcaagaaaaaaaacaaaaaacaaaacaaaacaaaaccaaaaaaattcagtttcaacaccagaggacaaaaaagaaaaaggaaacaaaataaaaagaaaaaaagaaaagaaaaaagaaaaaaaagaaacaatgttaacacacaatttaaaaaatttaaacatttaaaaaattactaacagtataagagactcctactatttattggtcacctagtgtgtaccaagagggtgtgctaggcaccctgtagacatctcaattaatacaaacactgcaagaaaaatacattattcccattttataggtggaaacgtattgtattgaagaatgtggaaaacctgccagtggctgggtgtggtagctcacacctgtaatcctagcactttgggaagccaaggcaggagaatggcttgaagccaagagttcaagaccaacttggccaacatagtgagacccccgtctcagaaaaaaaaatttaaaaatatgacagggcgcggtggctcatgcttgcaatcccagaagtttgggaggccgaggtgggcagatcacctgaggtcaggagtttgggaccagactggccaacatggtgaaacccccgtctctactaaaaatacaaaaaaattagccaggcatggtggcgggtgcctgtaatcccagctactcgggaggctgaggcaggagaatctcttgaacccaggaggcggaggttgcagtaagccaagatcacaccattgcactccaggctgggcaacaagagcgaaactccatctcaaaaaataaataaataaataaataagaataatattaaaaaattaatttgaaaaagtaaaagaaaacctgccagaggccacacagctagtaaatgtgagtggcatagcaaggtttgaactcactcttgccaagaagggtgtcatgttggacccccaagcaggcaagctgggagggcaccaccttggagagaccaaagaaaagacccagagacagcaggcaagacatgagctttattcaagggacttacgcacagggggaagtccaggagcggcaggctggacaggagcaaccgctgccatttgtgaaaagtgtgcaggtcatgtagaaaccttcacattgcaacatttgtttgtttggttggctttttttgagacagggtctcactctgtcgcccaggctggagcgcagtggtgcaatctcggctcactgcaacctctgcctcacaggttcaagcgcatctcctgtctcagcctcctgactagctgggactacaggcgtctgccaccaagcccaggtaatttttgtatttttagtagagtcgaggttttgccatgttggccaggctaggctccaattcctgacctcaagtgatccgcccaccttggcctcccagagtgctgggattataggcgtgagccaccacgcccagcccaaaaccacattgcaacttccatctagcaacctctacttagcagcctccacctacctcaaaacaatggacctctgttccttgtacagcctgtgttccaagtaacaggccaggggcctgacattcttcatagttaaacataattaaacatccaggttggccgttcccacggtccatagcctggaacactgaacaaacatcaccaagggacaaagggtccttcccaggccatgcttgagttgttgctgtctggcaagatgtgcccaccacacaaaggtgctggatgaactgaaacgggtccctattcctggtttgtttcccaccctcctcagcccagacagagccccagggaaggacccctgatgatgccagagtctgagctactttgggagaacaggaagtgcccacacagggggtgcctggaaccaccaaggagccacatgggcccccaggcctggggtcagggaggttgatggtgtgggttggggcagcccaggacacctggactggccttggggcatttcctgagcactctcagaagtatctgcccctgcccaggaagggggcaaaagccaccctggagaccctagatgctgggctctgacttagaagccactccactcctggactcttagctttgctgacgtcagagcccaggcctgagtccagctcatccccatccatggaggccccaggatgacctctgacccccatgttttcccatggctctcacttggcaacctggcctctggttggggtcacatcctggcccaccaggggcaggagggtgttcgagggcaaagggccccactcctcatccaccctcctacctgggccccctccccctctccccagcatggccagaccactgccctccagtgcccttagctctgggccgagggccaggtccaaatgtgctctgagtcagggtagggatcactcattcccttgccccgctctcctcccttagatagaagatctggttctggggccactttaccatctcaagcccaatctgggcagacccaggtggggatggttggggaagccaggctccgtcttctgcatgacaaagggtggggctgccctccctcctggcaacacttcagaccattgtaaacagtctcccaatccacatttgttttatttttcgttgtcagatctagcaaataaaaatataggactctggtgaaatttgaatgtcaggtagacaatgaataatttttttggtataattatgtcccaaatagtgccttgtattttatctggtagccctacccctggctgatcacccaaatgttttatttccccagcaaaactcttcaaccagcttacaaatccacattcaggataggggtcctctgtcttgggggattgtccccctgccccagcctagacctgatcacctggattgagaccacctggctccctttagggcatagatcaaaactaggctgtaaataatttgagtgtgccaagaactttgtgaattgcaagacctgactttatatggacattgatcattaactttgtgagcttcgggaagttgacacctctgagcctcggttttttttcagctcaaaaattgggagaggttgccgtgagccgagactgcgccattgtactccagcctgggcaacaagaatgaaactctgtctcaaaagaaaaaaaaattgggggagaaggtagcctggatattcctttcaactctaaactctaattctgtgaacagcagggatgagggagaggatgaggctccttccttattggacaaaaccccgttggaactaaatgctcctaggctcccttgcctaggaaggtccccccagaacagtgggaaatctggtttcacaactggggaccaccagctcaggatctcatgaggccccgggaccctctgagcacgggcccggatgctcatccctgcagactggattggcccttagagccctggcgttgcctgagccattctggttcctgtcagttgtttggttgcagcaaggaacaagactctaggtccacttaccagcagctgggggaactgagcctcttgcagagaacgagagccccacctctactctaggaaatgagctttttaatttaactggtcaggcctcaacccacattaggggttcatgaccattgtatagacagctgtagccagctgttcacagcccagacagacttgccctatctagacagccccctcctcccagctcagggactcgtctggctgtgagcttccaggaggtctcaggggtgtgacctccctccctccttccctccccactccctacctcctccctccaccccaggctataaagctgcccaggcttggctctcagcacatccagctgcctgagaccctcctgcagccttctcaagggacagccccactctgcctcttgctcctccarggcagcaccatgcagcccctgtggctctgctgggcactctgggtgttgcccctggccagccccggggccgccctgaccggggagcagctcctgggcagcctgctgcrgcagctgcagctcaaagaggtgcccaccctggacagggccgacatggaggagctggtcatccccacccacrtgagggcccagtacrtggccctgctgcagcgcagccacggggaccgctcccgcggaaagaggttcagccagagcttccgaggtgaggccctccctccctgctgcccctggtcccatggggcaggtcagatgtgcccactccggtggtgtcaaagggctcctggccttgcagaggtctgtgggaggctgagtgagggccacggtctaaggggcagtgaggtggggccgggcctgtgaggatggcggggcctcagcatgcagcggtgcatgcagtcaggactccgggggtctgttttcgtactgccactctggtctgagttctacttggagcatattgctttaaaatcatctcacaaccatttgctcacatggaactggggtataactatgtcttgcccatcttccagcattgtgaacatcaaaatgagtcattgtaaatagaagcgtgtttgggtaactgaaaaatactgcacttgagtagacaacctgggttatacctggctgtcaggggtgcagcgggcctgaatcctcctgcagcsggcctgaatcctcctgcagcctctcgcctccctagctcctcagtgcccagagctagacccaatgccaggcacctgggtgaggattctgctcccagcatctcagctgaggcaaacttgctagccagggtcccacaggcgcccctgcctgctggatggaaattgttactaaacaaggcccagatccaaggaagatttgtaaactgggtttgccccagaaatagaacagggccggtgtctcctggcctggctgccagctcagtggccctgccatcctcagagctcccctggagtcgggggaggccctgctgaccctgctcttgtccccagaggtggccggcaggttcctggcgtyggaggccagcacacacctgctggtgttcggcatggagcagcggctgccgcccaacagcgagctggtgcaggccgtgctgcggctcttccaggagccggtccccaaggccgcgctgcacaggcacgggcggctgtccccgcgcagcgcccgggcccgggtgaccgtcgagtggctgcgcgtccgcgacgacggctccaaccgcacctccctcatcgactccaggtgggggtcgcgggggcgcgcagggtagggggagggcgctgctaggcccggcttgggggcggggacgcggggggcggtgcggggtcctcggggcccgtcccagtccccgccctcaagcggcgctgggtctctgtgtcatgtctcaggctggtgtccgtccacgagagcggctggaaggccttcgacgtgaccgaggccgtgaacttctggcagcagctgagccggccccggcagccgctgctgctacaggtgtcggtgcagagggagcatctgggcccgctggcgtccggcgcccacaagctggtccgctttgcctcgcagggggcgccagccgggcttggggagccccagctggagctgcacaccctggaccttggggactatgggtaggtgctgagggtcaaactggtaagccggaataaagagacaggcaattacatttattttgaaatggacaacttttcagagtgctgtgggaatgaatgagacaatgtatacarttcttcctctgactcttaggagatcctcagtaaatatcggttattaattttcaagttatttctagctgtccatcctatatcacaaacatccagctttttgaagttgagaggtggatcataaatctccatcccagacgccctctgacctcagccctcccagctgaccgctgaccctgctctctttgcccacacagagctcagggcgactgtgaccctgaagcaccaatgaccgagggcacccgctgctgccgccaggagatgtacattgacctgcaggggatgaagtgggccgagaactgggtgctggagcccccgggcttcctggcttatgagtgtgtgggcacctgccrgcagcccccggaggccctggccttcaagtggccgtttctggggcctygacagtgcatcgcctcggagactgmctcgctgcccatgatcgtcagcatcaaggagggaggcaggaccaggccccaggtggtcagcctgcccaacatgagggtgcagaagtgcagctgtgcctcggatggtgcgctcgtgccaaggaggctscagccataggcgcctagtgtagccatcgagggacttgacttgtgtgtgtttctgaagtgttckagggtaccaggagagctggcgatgactgaactgctratggacaaatgctctrtgctctctagtgagccctgaatttgcttcctctgacaagttacctcacctaatttttgcttctcaggaatgagaatctttggccactggagagcccttgctcagttttctctattcttattattcactgcactatattctaagcacttacatgtggagatactgtaacctgagggcagaaagcccaatgtgtcattgtttacttgtcctgtcactggatctgggctaaagtcctccaccaccactctggacctaagacctggggttaagtgtgggttgtgcatccccaatccagataataaagactttgtaaaacatgaataaaacacattttattctataattttgtaattttctattttattttaattaattaattatttttgagacagagtctcactctgtcacccaggcgggagtgcagtggcccaatctcggctcactgcagcctctgccttccaggttcaagcgattctcatgcctcagcatcttgagtaactgggattacaggcatgtaccaccacgccaagctaattttttgtatttttattattattattattgagacagctctgtcgcccaggctggagtacagatggcgctatgttggctcactgcaagctctgcctcccgggttcacaccattctcctgcctcagcctcccgagtagctgggactacaggtgcctgccaccatgcctggctaattttttgtattttttagtagagacagggtttcactgtgttaaccaggatggtctcaacctcctgacctcgtgatccgcctgcctcggcctcccaaagtgctgggattacaggcgtgagccactgcacctggcctaattttttgtatttttagtagagatggggttttgccatgttgcccaggctggtctggaactcctgacctcaagtcattcggcagcctcagtctcccaaagggctgggattacaggcacaagccactgtgcccggctgtaattttccattttaatcaaagctctgcaaattgaggaaggagcagaaagttctacagcgattaggtcaacctgattgtaaaactaaggaaggagcttgagttggccaagacttggtaaagatcttggttaggtaatacatgaaactaggattaaaatgctttcagggccagcacgatggctcacttctgtaatcccagcactttgggaggccgaggtgggcggatcacttgaggccaggagttcaagaccagcctggccaacatggtgagagtgcatttctactaaaaatacaaaaattagctgggcatggtggtgtgcgcctgtaattccagccactcgggaggctgaggcatgagaatcgcttaaacccaagaggcggaggttgcagtaagctgagatcacactactgcactccagcctgggcaatagagtgagattctgtctcaaaaataaaataaataaaaataaaatgcattctgattctagaatctatggtacctgccctcccagaattgatacagaaatttctttttttttttttttgagacggagtcgcccaggctggagtacagtggcaggagtgcagtggcgcgatctccgcttactgcaagctccgcctcatgggttcacgccattctcctgccttagcctcccgagtagctgggactacaggtgcccgccaccacgcccggctaatttttttgtatttttagtagagatggggtttcaccatgttagccaggatggtctctatctcctgaccttgtgatccgcccacctcggcctcccaaagtgctgggattacaggcatgagccaccgcgcccggccaatactgaaatttttttgttcttgacactttgactttcctgggcatagtgactgggctttattccaatcctacttgcatcaaaataaaatctgtgatcaaaattatcatctatacttagagaagaaaataaagcttcagaggatctggaatttatagctgtaagagctgtgcagctgggcgcggtggctcacgtctataatcctgaggatcacctgaggttgggagtttgagaccagcctgaccaacatagagaaaccccgtctctactaaaagtacaaaattagccgggtgtggtggcacatgcctataatcccagctacttgggaggctgaggcaggagaatcgcttgaagccaggaggtggaggttgcagtgagctgagatcacaccactgtactacagcctgggcgacagagtgagactgtgtctcaataagtaaataattaattaaaaattaaaaaataaaatagtgattttacaagcacttcacacaactgacataacaaaggctgtggctatctcaactcacatatcgatccatcaaggccttctcttgattttgaaataaccttaacctactcaagaacaaatttagaaatcctttctctctctgaaatctttgtcagtggctccagcattctaattaccaagaccggaaccttgcacttgcctggacccatggcacagaccagacaggtgggggcaccattcattgaggaaggaaggaggacaggcaggtgcgggagtggggagtggaagaaagattggacagggacagtctaaggagccaacggggagtccaggggccacacccaggactctgcagaccgtcagatgtggaggtaagagagcagggaggggggatggccaggcgcagctatggagggacaagggcagagatgatactggcggggggcatagaggaaaaaccctggaaaataactagtggctagagctttggggagagaaggggaaagacagatgggacagaaaagaactgagagaggcaggaagagaccctccccaccccactcctggacagccacagactggcgctagaatcagggacagggaggtaaggaggaatttttttttttttttttttttttttgagacagagtttcgctcttgttgcccaggctggagttcaatggtgaaatctcagctcaccgcaacctccgcctcccaggttcaagcgattctcctgcctcagactccctagtagctgggattacaggcatgtgccaccacacccggctaattttgtatttttagtagagacggggtttctccatgcgggtcaggctggtctcgaactccagacctaaggtgatccgcccacctcggcctcccaaagtgctggtattacaggcatgagccaccgcgcccggccataaggaggatatttttatgccgttacagaaaaagatgaaagctcagaaatggaagggaggtcggagaacctgcaaaggcatgcatgtggggtgaggactgctcagagctcagagaggggtgctggaagggacctgagaggaagctttggtccaaccactcatttcacagatagggaaacaggggcctgcggacgggttggtttgctccttgattcccagggcgcgcggtcctccccgaacccagcctcgcttcccgcgcagcgcccagcagtccctggcgcggcgggccggccctgccctcgcgagcttgcggtccggttgtggaggccaccggctccctggaaacatttggctcccggccgggaggcatgccgcgctctcggacctgggctggagtaggtgcccttggcggccctggctcgagcagtaatggactagccccagggggcgttggaaatgctgcgacccgcccccacatttttgcccgaacggagaccctccgggctttcacggtccggccttctacagcggcgggggagccgtggcctcttgcagggcgctccgcgcggttcccgactacccggagccgaggtgcgggctgaatcctgctgagctccccatgctaccacccccgcaaccccactctcccggggcgggtctaagagctcttcggggaaattcaaagcactacagggaccaacgtttgcagatgctctccctgcgccgcgaccaccctgtgcttggcccagttctcccggaggcgtccagagactgggctcgtgccgggggacggaagagggtgcgccccggcggatcccttcttggagcctggacgtgagctggccggtccggggcttgcagacctccgggaggagctgcggggctgagcggcgaccaggaggccaggccggggcagaggaccgccgagggccaccgcgggaggcgcagtcagctgcgtacaggcttgcgccgccgcgggccaagactccaaattgggaaaggggtggccgcagctctgcgcatgtgcaggaggcgccggagtttcactttgtaacttttaagtggtcggaacacgccccgcgctgctgggtcccgccagacacgccgccgccgcaggtacaggggacagggggcgtgaggaggggcaatgcaccctccgcctttcccgggacgtgcgcgccaggtgtccggttccggaacggctcccagcctacgcagaccccagagcccccgaccccaagcagggggtgacgacgcgggattgggtgggaggagagggtccgggcagcgcctccattccagccctgcgctccttgggaattcctggcggcttttcaggactttcctctccggcttttcgctttcagggctggtatctccttcttccccacccctctctttgggatttgtcggcggagtccgacctcccacctaactaggagtgcagctatgggctcctcggaccctatacgaggccgggctgggaaagggccaagcgtccgactctcctgacgccaggaaggcagaggccacccctcgggctgttcctgggtgaccacttcctgcagccttggcggagtcctgaggagggaggctggggactcggggactggggggaagggcgggggcggaaagggtgaggcgagctctgctaagaaaccaaatccgcaaaggttccagcacctgataagactagctacctgaggccctggaggggccttggtcattcagccccaggcaggtggtgtcctcttcaagggcaggggtggacagcgtggcggacccactgaccctcccttgacacctctcaggtcatcctcaagtctgctgtgccttcaagggggatatgaacggaagccgaggctccttttcccttcacacgcccctctcctttgtttagtgtgggggcaaaggtctctcctagctgttcgttgggctctaacagagaagacgtcaggtgggatcctgcccttgtgtttcccattagctggaggggcgacttaaaataaaggcagacagcttctaattgcttgctagggccgggtcctgggctaagtgctttacaggtgttgtttgggatctgtgcctcccaacagctccgtgagagaaagtcatcactcgcatttcctggcgaaggaagccaaggcacagagtggttaggctgcttgtctgaactgcgtggtgctgagaccttaactccagagcctgctcacataatccctgagccacactgcctctggtttcagccaggggctgtgtcatttcctttgtgctccagggtagaggtaaacagttgtccaggttactgggtcctgtttggtgttgccataaggagaagtttgtactttactttgcaaccttattctgcatctgaaagaccagagttagctcctgaggcagaaggcctggagctgcttgtagtttcgctattgtcatcacaggattgaaagatttggtgatgataaaattaccctgaatttgtacgggccttcttgcaagaacgaacaatatccatatacttcctgcaacattctgctggtatttctagagcttgtcaagttgaccaccaggccagtccttgctgccaatggagactggcagtggattagcataggtagtttactttggcaaatttagaccagctgttggatttagccctctcccactggccacaatcagacgcttgcctgcacatgggttgaactttgggttgggagcgtgaagtcacctgctgcccactctggctcttgggcctcagcagtaattcttggctttcctaccctcggcatattgagtaggaataaggggatgaatggagaatttctggaaggcacaggtaagtgctaggcattcacatacatctaggatgactgaatattgccaggggttctcagccaggcagtgccacttcaaccacagtgcctagctgctggtttggcctcctctatacagctgccagctgggtgctcccctccccctgccttctcctcagcctggcagcactgtcccatggtgtctgtgttcccagctgcctgctcagagcgtgcctgtttgtgaaaatgcagaggagctgtcccatggagagccagagggacggagctgtttcagggggatctggactttatgtgtctaatgggcag

SEQ ID NO: 96437 - DNA, 15159 bp, Homo sapiens
cttctgacctcagggaaccaaatggcaacatttctgtcatctctgtgatcacatcctgcggtttgtctgcccgccccatcaacatgccccttctcatcttttatttgatggaatatttcctgtgagattctgccaaagacctgcttgcttccgttactttgattttgttttaaggaaagcaaaacttatggaaatcaaactggttttgacacaggaggcataacaaataaaaatttccattcccgagtgagtataaataatcggttctgacacccagcctttgacgtgaaccacagcagctgtcacgcgggaggacacaggtggcaggtctcaaacacgagtctgcaatttttacccaaagagtggaatcagtgcagaaactgggacctctggaaatttttttttgagaaatttcatttcctctaagcttagtcagtattactcgattttagtgttcccatgagctaggcgctcactgcaaaacttgaagcatcagcctgaaattttccagttaacccataatccttgccagggggcatcagtatggcagcaccttggccagaacttcgcacgacggcttcctttgttctgtggctaaaggagtgtcttgtggtgccacttttcaaaagacagccacggctccaggtgccgctcaggaggccttgtggagtgaattctgtgaggtcattgctgctgtggcctgtgtcgtgaaacttgtggtctgacctaagagcaaagaggatgccctttaagcagaaacattttttaagttttcctctccacacctgcttcaccgtgcatcctctccccactgccccatcatctctagtccccaaatcatggagatgcgggctcctggcagtagacgctgccacaggggggcatctcatttcagttgttggcattctcgctgagggacactgtgcaggcaagcagccttgggaaatctgaaaatataccaaatgtcatgttcccaaaactacttcacatacctactttcctccaaaattgctctggctttttagagaccgtaaccctagtcttattgcaaaatgaggcctcagattaagggaggtttttctttgatgagttgtatcgaacacatgtccattgacagcctgctaaggcactaaagtctatggaagatggaaagttctggcctggaaaatggatgagaggcatttgtttagaggtttttttgtcgtgtttttgtttttgttttttagatggagtcttgctctgtcgcccaggctggagtgcagtagtgtagtcttggctcactgcaacctctgcctcctgggctcaagcaattctcctgcctcagcctcccaagtaactgggattacaggtgtgtgccatcatgcccagctaatttttgtattttagtagagatggagtttcaccatgttggccaggttggtcttgaactcctgatctcaagtgatccaccctcctcagcctcccaaagtgcttggattacaggcgtgagccaccgcgcctggctcgagctcatggtctagttgtagagacaaagaagtaggcaattgcagtggggttttagaagcgctgtgacaggctggcgtatgcacagatcagggcagacaggggagaggaggcccagctggtaatagagtcaggcccggccccaaagcccacattctgtcagtgctgagacagagacagagatggacagacacagacaggcacagggtcgctcttcagtgttgttcaccccctgttggtgatcctctggcatctggtgcttgcacccactcctctctgtctctcagaggcaaaacggagagcctggttcgtggaagacacaatggctactcttatatctccacagtagatatcctgcaaacagttgattgtgcggacagcttttctcaaggcaccctcttatcctgctcccccaacctgattttcatcctgaattctctgtctctaggcccacctctacccacccagtgcaccaaatcagagaaggcaggatcatcccagctcctcctcccctccctccccactcccacatccagtgatgcagctcgaacttcagactcccatcctttgcttggttcccattgtcactgtgtcactgcctcaaattggacctcttcattgtcatcggggcaatgacaactgagtcctaagtggcccccaacctcccctctctcccagtgcaacctaagcaccatactgccaccagcattgtgccctgaaagcaaattagatcacaccagtgtctttctttttctttctctttctttcgtttgttcgttctttccttctttctttttctttctttctctcattttctttctctttctctctctttctttctccttcctttctctctccttccttttttcatttattttttcctcccttccttccttccttccttccttttctttttctttcttcctttctctcacattcttcctctttctctctctctctctctctttccactctctccttccttccttttttcctcccttcctccctcccttttttcttttcttttcttttctttctctttcttcctttcttccttcctttctctcactttctttcctctttctttctttctctttttctttctccttcccttctctctccttccttcctttcgtttgtcttcctttcattttttcttccttccttcctttcacccttccttcctctcttttttcttttcttttcttccttcctttctctctctctctccccctccctccctctctccttccctcccttccttccttcctctctctcttcttctttcccttctttcttttctttcttttttccttccttcctttctttctttctctgtctctctttctctctttccctccctccctcccttccttcttgttggtgggaggacagggtctcgctctgtcacccaggcttgagtgcagggataggatcatgcagccttgacctcctaggctcaagcaatcctcttgcctcagcctcctgaatagctaggactgcagacacgtgccaccacaccagggtaatttttgtatttttcgtagagatgggttcttgttatgttgcccaggctgctcttgaactcctggcttcaagtgatcctcccatctcaccttcccaagtaacagagactacaggcaagtgctggcatgcccaggttttttattttttgtggagacagggtcttgctatgttgttcaggctgctccctggcctcaagtggtcctcttgctttatcctcctcacgaagtgctgggtacaagcatgagccactgcacccagcggatcatggcattctcagtctgatatatctccaatgactttacattgtgcagagaatagaatctgattttcttagcatggcatatcagggtctgcatcttgcttcatctcatccttccatcatctgccgcagccacacaatctctcactagcacctgagtgcacctcctccctcttgcacacacctcaccctctgagcccaggtgaggatatctccgacttcccaacttaggaagcccctatgcaaccaacaaaattcagctcaaatattacctcatctgtaaacacattcctttatttctctagaaagtctaaatcatgccttcgtctgtatttatatcttcataagtcctccacccttatatttatacctttattttagtgcttgtcataatacattgaaatcatccatatgtacatgtcttctatctggatctctctctctctctgtgtcacccaggctctgtcatccatacatacaagttttctgtctgaatctttctctctctctctctctctctctctctctctctctctctctctctctctatatatatatatatatatatatatatatatatatataggcttaatctcctgggcttaaatgattctcccacctcagcttcctgagttgctgaaactacaggtgaacaccactatgactggctaattttttttttttttgagatggagtctcactctgttgccgaggctggagtgcagtggcaccgtgttggctcactgcaacctcggtctcctaggttcaaacaattctcctgcctcagcctcccgagtagctgggattacaggtgaccaccaccacgcccgactagtttttatatttttagtagagacagggtttcaccatattggccaggctggtctcgaactcctgacctcaggtgatccatccacctcagcctcccaaagtggtgagattacaggcgtcagccaccgcacgcggcctacttttttttttttttttttttttgtggagacaggatctcaatatgttgcccaggctcgtcttgaactcctgagctcaggagatcttcccaccttggcctcccaaagtgctgggattacaggtgtgagccactgtgcccggccattggagtttcaaattttattcctaacatgtaatccgaggctctgttccatgccaagtgctctaagtgctcagtggctgtttgtgccgtgttacaggagttcccgtcagttctttcgcctgtgtatattgccaggggcctttggtaacctgaaattcccttacagtgaggcagcaggaagcagagaaacccggcagagacagaaccctgggggctctttcctttatccttggtcataattgtacaacttgaaaataaattctgtaacacccctagtcaccagggttatcatgctatcaaagggtgttgtttgatgtcagtttaagggattaaaacaagtaacttccatacgagaggtagacaagcaataccaacccaaggacaagggccaagtagtaggaaggctcgaatcacctgcatcaccctcggaatggcactgcattactcaaaattgagaatgttcccatgcacagaatgctgagattcatgtcaatgaattgatgttaggttgttctgcaggaaaatgtagtaaataataagattatcatttatggcatagaaaaaatgcattttagatgactctatgctaagagcaatgaaacaatgaagagaaaaaatgattttttgatccagatctagattgttctacccttaaagtatttaagacagtgataagcacatgtctaaattacctgactaatagtccaaatggaaaaaaatcagacaggaaagggatgaagcagaagttttaaaaaattcgtattaggaaaattggaaatacatgaaatttcatctgaaatcagccagagacttggatccttgttctgcttaagtgagttttacataatgcaacacaaattaaatatgttgctgataaaatggacccaaagcttcgtactgaattgtgtaaaatgcgctatcattgttcccaccattgaaaaatgggattttcataaattacattattttcctaataaccctaacttcaaacagttcaattttcatttaaaggaaagtaatttcccaaatggcatttagtcagaacaggtgctgttacgttcacaacttttaagcggttgggattttgacatctggatgccagagctaatcagggggcgttttctctttttctatctgtcctcactatctgaagcccagtttacagcttctcagtgtattttgtacctcattagtttttggcatcctctatagcatattggccagtatgattcatcctttctttgagcacaattagctgtgaaaacagatcttagggcagactccctccctacccccaaaggattactgaaggtaggaaatgcaggtgattatcagagtttgcctttgatacagacatcctgctctgccgtggccctttgaactaactttgatatgcaataattaagagggattgaacccctggaggagaagccgcatggccctgcctcttctctccttctattgagtccttgttttgaactattgatcaaacagatttgaagggatttgttgaagcctgtgtggggcaggaggaaggaacggagcggggaggaggcacatctggttataaatagtttcaggaggaacctgctggtcagactttgctcagccgatttcacgcaccttactcagactaaggtttacttctttcagaaaaagcagtgacaaacagacgacgtgctgagctgccarcttagtggaagctctgctctgggtggagagcagcctcgctttggtgacgcacagtgctgggaccctccaggagccccgggattgaaggatggtggcggccgtcctgctggggctgagctggctctgctctcccctgggagctctggtcctggacttcaacaacatcaggagctctgctgacctgcatggggcccggaaggtaaggctgctagggaggggggcgaggtacgggactgctgacagctggggtgttttgtttaggctttagtaagtcattctgattcatgtatgaaatgtcttacctagcaggtaaattgaattggtttcggatttgggagggcatcctggtaggatcagtggccttagtgtgaatgtatgaaataaacacagtggcttttcacatcattcggccatacgtttgtctataaatcacgaaataaacgaacactttggaagctctactatgtgccagctcttttacatgtaatacgtcatgtactcttcctcacaatttgagataggtgaaacattccctaattccagatgaggaaataagactcagagatgttgaagagcttacccaagctcacacagccagcaagcaaacatgggaatgagaatttaaacagagggccatgatgcattgccttgtcaccatctaacttcacagagagagttgttttaggaatcgctttatgtatgtgtatatgttattatatatcgtatagattattacatatatcatatatgctacacctacgttgtatgtctatgtagaagcatcaactgtgtatgagaacaattgatcttcggtatctctttctctatgtcaatgaggcatcattgaaaatcaaaggacagttcacttagggaagggtctctaagctaaatgtgattcactagagtaaaaaatcaaataggaatgccacaaacatcaatagtatgtttaatgaaactgtagccagcttctagagttaagatatattgaaaatctcatactcacctgttaagacacacataggaaaacattttttcccattttcacaaagagcacaggaaaactaaattctgagttaagtcaatttttcaaactcaaatagcctttgcagcgcctaggtctccccgggtgacatgagcttccctttgtgggagaaaaccatttccactggagagtaagatgctgcccagggtttgtcacagcgccactgtcctttggctccctccgcctcctgccttcaataataagtcatcttccatcgtgttgggggtttcctagccttgtgataacagattccctccacagggctcacagtgcctgtctgacacggactgcaataccagaaagttctgcctccagccccgcgatgagaagccgttctgtgctacatgtcgtgggttgcggaggaggtgccagcgagatgccatgtgctgccctgggacactctgtgtgaacggtgagcgacataacgccaacagtggtttttaaaccgaaggtagtgtctaagccccatagactagaatattccagggtaggcactctctaatggtgcttcctagattcatgcttgaagtaaatgtatgcagctgccttttcttttccttttttttttttttctgaggcggagtttcgcccttgttgtccacagctcactgcagcctcggcctccgggttcaggtggttctcctgcctcagcctctggagtaactaggactacaggcatgtaccaccatgcccggctaatttttgttatttttagtagagatagggtttcaccatgttggtcaggctagtctcgaacttctgacctcaggtgatccacctacctcggcctcccaaagtgctgggattacaagcgtaagccaccggacccggcttgccttttcttaatgaaacaaaataatttatttcctggcaacagctcttgccaatgacttggagataatgattttaaaggaaagactcaagttgtaatcattcaaatacttccatttccacttggataccattaactacctttaatggaatgcaatttccacttagctactttctctgccacatgcgagcatgtaaatatttagcacatgttccagaaatctagaaagttatatataaactgaaggcagaggtgctgccaaactatgcaacagtaggataattagtgygtctgtggttctcccccttgaagttaataattctagttacacctggttgtccctcagatgtttgtactacgatggaagatgcaaccccaatattagaaaggcagcttgatgagcaagatggcacacatgcagaaggaacaactgggcacccagtccaggaaaaccaacccaaaaggaagccaagtattaagaaatcacaaggcaggaagggtaagaacagcattcgcagcatattttatttcagaaatgcattttctcctcccagcctcttaaggatagggtgagactgattttattcttctccatcccagaaacacttaggaagcatrtgctgtttgttatctctttctgtaagaagctgtgggggtcacgtagagagtagcctaaggtagtctgcagccagtaacaacgatcaattctgatgggtaggggtggagtcgccatggcattactgcttttagcgtaacacctagctctgtgagacctgcgtgctgtgtctgtttttactttgtggctgtcagtcataggtcccattcccttatcccagtagcaaacccccagcaggccactttccttatktatcactaaagcccacattaaccttgttacaggacaagagggagaaagttgtctgagaacttttkactgtggccctggactttgctgtgctcgtcatttttggacgaaaatttgtaagccagtycttttggagggacaggtctgctccagaagagggcataaagacactgctcaagctccagaaatcttccagcgttgcgactgtggccctggactactgtgtcgaagccaattgaccagcaatcggcagcatgctcgattaagagtatgccaaaaaatagaaaagctataaatatttcaaaataaagaagaatccacattgcatttgagctcaatcttggacattaactttaaaatgcttccatacagatctctcttaaaatcaaatcttgtagcaagtgaaatagcctgaaactagagaactaagagatggcgaccttgtgatgaatgaaactagctttagccttttgtccgtttttccagaaaactgatgggactctgtaaccaaaaaaattatttctaatctagggactcaattaattcaaatctttaagaattgaagccaggcatggtggctcacgcctgtaatcccagcactttgggaggcagaggtgggtggatcacgaggtcaagagtttgagaccagactggccaacactgtaaaaccctgtctctactaaaaaatacaaaaaattagctgggcatggtggcagatgtctgtaatcccagctactcgggaggctgaggcagaagaattgcttgaacccgggaggcggaggttgcaatgagccaagatcgcaccattgcactccagcccgggtgacagtacgagactcggtctcaaaacaacaacaacaacaacaacaacaacaacaacaaagaattgaaattgtatatatttaaagtgtactgtgtgagttttgaaatacatatactataaccgagccacatctctctctccaaataaatctttaaacaatttctggtgaagggttggtgcctgacagtatcctagggggtaaaaaatgatagcatctgaagttaaaagtaaattaattcttacatcttaccaggaaaattatcacagcaaatactatatttttccttaataactctattgtttatttccattcatttcttagaagggaaatggcatttcactacaaaataatttggttaataaagaagtttcaagatatcttatgtttgtatagtcctttgcaagttataaagcattttcacgttttcagtagctttacttaccatttgataactttgtatattttatatttatataattttaatatttgaaaggcagggctttcaaggagtgtttttacttacacattttgaccacttgtgcttaaaagcccagaggagaactcgggcaaaaaagtgaaatttttgtttgtttgaagtttaaaagggctgtattttgtgcatagaagtggttgtgcttaggggagctctttctagtggatttcaagcaagtgctacagatttaagagataaatcatacacctgtttttctattcaggttataagtttatattacaagattcaatgatatggtttggacgtttatcccctccgtatctcatgcttgaaatgtgacctccagtattggaggtggggcctggtgggaggtgactggaccatgggggcggattcctcctgaatggctcagcaccatccccttggtgatgagtgagttctgttagttgacacaagatctggttgtttaaaagtgtggcacctcctctctctctctcgctcctgctttcaccatgtgaagtgcctgctcccacttcatctcccagcatgagtaaaaccttcctgaggcctcccaagaagcttagcagatgccagtgccatgcttcctatacagtcagcagaaccatgagccaattaaacctttttccttcataaactacccagtctccagtattcttttagagcaatgcaagaatggactgacacaatcaaatatgggcccaacaaaaaactaaatttatgaaggtccctagtttatttttttgagatggagtctcactctgtcgcccagactagagtacactggtgtgatcttgcctcactgcaacctccgcctcccgggttcaagcaattttcccacctcagcctcctaagtagctgggattacaggcatatgccaccaccctcagctaatttttgtatttttggtagagacagggtttcaccatgttggccaggctggtctccaaccgctgacctcaggcgacccacctgccccagcctcccaaagtactgggattacagacatgaaccaccgtgccccgcccccccccagtttctagaaaatattgaacagtcttccagaggctagtctctgggtgtaccttaattaacaatttttgatcagtaagtaggggtaatgtggtttatagcatagagcagaatatgagaaaataaaaattcccattaaagatctgctatcatctcatatttctctctacaaaacccatagtaaagtatgatcatgaacacaatatgaaaatttaaactaaacatacttgctaagaaaataagatcatcatcatccaataatagtacatgaggttttattgactacattgcaagcaaaagcatgaagaagaaacaatcatttaaaaacaccaaagacccttacatagcaaaggttaagaaataaattaagactcctattgggttgtgtctgccagggaggatacaggcctcattcgctccggtccttgggttcccggtatttccactggatgtaatcaaagatgtctttttcactatccactggcaggggttctcctgcaactcctgcaagtacagagagaaaaacttattgtaagaaccagttttatagtttagttatagagggttcaagattaagagctgtgtgggacttgctttcagaagaaaaaagaaaatggtaaccaagtcactaaaaaaaaaaagaccggcggatgtggtagctcacgcctgtaatcccagcaatttgggaggccgaggcaggtagatcacctgaggtcaggagtttgagaccagcctgaccaacatggagaaaccccatctctactaaaaatacaaaattagccaggcgtggtagctcatgcctgtaatcccagctactcgggaggttgaggcaggagaatcgcttgaacctgggaggcagaggttgcagtgagccgagaatgtgccattgcactccagcctgggcaacaagagcgaaactccatttcaaaaaaaaagacactgactacctctatcctctcccaggaggctgtgctggagcttcatctcgtgagtcatcagtgccacaaagggaacctggggatcccagctagggccactcaagtcatcctcactcatgattgtcctttctgctggagccactatgtattatatactctagtgagttcctttgcaactcggttcttggactagcagcactggcattatctagaacaagcttatccaaccatggcccgccagctgcatgcggcccagctccactttgaatgtggcccaacacaaattcgtaaactgtcttaaaacacgatgagatgtttttatgatttttttctttaaagctcatcagctatcgtgagtgttagtgtattttatgtgtagcccaagacaattattcttcttccaatgtgacccagggaagctaaaagattggtaacctctgatctagaagcttactagaaatgcagaatcctgagccccactgcaagccaaaggaattagaatctgaatttagtgaggcccccatgttgctggtatgcacactgaattgtgagaagcactgccctagtctaccagggatgaggtattttatactttgaggacaaagtattttatactttgaggacaaaatgacaaaaattcattctcctagtagagaacagtaaaccacatagtatactgtgaaatgttaacagaacccattaagcatagattcagcaatccttattctttaaactttaaaagcatggggccaaagataccatggcactaaaagcaaagtatgtggcactgaaaacaatgatacttgagtttttcaggggtcctagaggtacattaaacaacagcaaaaaaaaaaaaaaaaaaaaaaaaacccttttagatgaataagatattttactgagcatgcaaggatttaatccattttaacaaagctggaactaacgcttgccttgatggccttcaactgagggcctaggagcatgttatgcattaaatcctctctcgttgcctgaaggactaaaaatacaaagaaactacactaactggcatagttattagaaggtttgctaaaccaaagtatctttgaaaataaccttctctccagatgagagatgatctctaatacacacatggacactcaccagtgactcccaagggacggatggtgtactcattgattgtgaaacccttttctagggcatgagccctcatattcttattgaaaatatcactcccagtgaaatagagaacaccacagtaatactgatctttgggtatcaacctaaaaaaaatggacagtagatacatttttttaccatgcatttcaagtttagcaaatataggactcctaaaatcaataaggaacaaaataccaaagataagcctaagtggtctaataatttgaagagaagactatcatgaggtagactgctcaaatcaccccaaccttgtaatttgtttaggtttctgtgaactttgttctgaaagagatgtggagaaatgaaattgcattatcacctattacaactaacttagcccaggcaggaaatgacttttgagctgtggaaggcatcatggtgaggtgcaaatctagagaaaataaattggagtctgtagacagtcattattctttacatactttggagctaaacattgcatttggcaagaacatatggctcttgggagtaaaaaaaggctctagatatgaatgtgaactccaagatacaaacagggagggagaaaacgagacaagtttggaaaagttaacaggtcagcaacaaagtctgaacaatacctgatatcaattcttctgtgtggatattctttttcatcatttttactgggaagctggcaaacaccctaaaatgaacattttaaaccaagtttaaagatgttctaaacttaaggcttaattttaatcaagtaaaacacaaggccatttttgtttttaatgttagcagctctagaattctgagcacttttaacttagcagcttctgtgagcaatacactatccctacctttctattacacttcacgataattagagaactacacaaaactgcaaataaggattctcattatgaggatttggtctttgtgtgattctaagcaagaaactaatcaaagaaaaccctgaacacgaaacacagacatcaaaataaacagaagagagcaacgtggaagaaacgatgattatgcaggaagaagaaaacaaacaaaaaagctaccagtatagtctcaaacaaaaaagcttccagtaataacagaagatactctatccatgaagtaagaacagaatactatagaaaaccctcagggaaaggtttaaatcaaaatttaaaatgataggtagcagaagtaaaagagtttgaaattgaagaaatctctcagacactagaagggagaaagacacggaaaataagaaaaatatgagatcagaaaatgaggggatcactttcttccttcacaggtaatttttcattatacttctacaatttccaaacaaaagttatccaagtctgttttatcttttccctttcctgaaaaatggacaaaaaatctggactggtcagcaacccatacatatgtaaaacaagatataagcaccaccaaatttccaattaaaagtatcaaatgctacattctaagaaaaatacacaagtgacaagcttctggtcctcaagagtggtcaagttaacacatgccactaaaagccatactttttcactcagcaaaatagaaaaattaaaatctaaactaattctttagctgttcctatggaagaaagattaatgaaatatgtttaccttcaaaatatgaaacctaccttcttaggcactaacaagttccaactcaacttccaccttcaagtggatcagaagtcatttccacctggaattaccaggaggtattaccttgcggatgcggatgtctagataccacagggaatgatgttcctgtttgtcacatcagtaataggattttatctcatggctttgttcctttcctcaaggctaattttatttcctgcactttttctgaagtgctaatattaaagaatt

SEQ ID NO: 96438 - DNA, 12671 bp, Homo sapiens
tcctggttatttctgagccaaacaagggctcagaaacatggcatgacttggcatcactgtggatggtgccccagggcccccctagtatcagcagcttgaccctcctctccttgccctgccgctcaccccaacacactcaaggtacacaccagccctcagaaagtaggacttccagctgttcacctcctcctgtgtctcatgagccagctccagctgccaataatccttgtagaggccaggtgcggtggctcacgcctgtaatcccagcactttgggaggccaaggcaggcggatcatgaggtcaggagattgagaccatcctggctaacacggtgaaactccgtctctactaaaaatacaaaaaattagccgggcgtggtggccggcgcctgtagtcccagctacttgggaggctgaggcaggagaatggtatgaacctgggaggcggaggttgcagtgagccgagattgtgccactgcactccagcctgggtgacagagcgagactccatctcaaaaagaaaaaaaaatccttgtagacattcctgcaagacagggcaggcagtgagggcagatgggcaaagccacaccctccctgggggttaagggcatgcctggactttggggtcatcacatctgagtcaagtcctggcttgctcatttcccagctgtgtgattctgggcaaatcccttcctttcagcctcagtttcctgattgggaaaatgggttaataataattcctgccttgttatggtttggctgtgtccctatccaaatctcaacttgaattgtgtctctcagaattccacttattgtgggagggacccagggagaggtaattgaatcatgggggctggtctttcctgtgctattctcatgatagtgaataagtcttatgagatctgatgggttgcttttgcttctctcattttctcctgctgctgccaatgtaagaagtacctttcgcctcccaccatgattctgaggcctccccagccatgtggaactgtaagtccaattaaacctctttttcttcccagtcttgggtatgttttcattggaagtgtgaaaatggactaatacaataaattggtaccagtagagtggggcattgctgaaaagatacctgaaaatgtggaagtagctttggaactaggtaacaggcaaaggttggaacaatttggagggctcagaagaaggcagaaaaacgtgggaaagtttggaacttcctagagacttgttgaatgactttaccccgaatgctgatagtgatacggacaataagatccaggctaaggtggtctcagatggtgacaaggaacttgttgggaagtggagcaaagatgattcttgttatgttttagcaaagagactggtggcattttgcccctgccctagagatttgtggaattttgaacttgagagagaagatttagggtaatctggctgaagaaatttctaagtagcaaagcatttaagaggtgacttgggtactgttggcattcagttttataagggaagcagggcataagtttggaaaatttgcagcccgactatgcgatagaaaagaaaaacccattttctggggagaaattcaagccagctgcagaaatttgcataagtagcaaggagcctaatgttaatccccaagaccatggggaaaatgtctccaggctatgtctccagaccttcacagcagacccttccatcacaggcccagaggcccaggaggaaaaagtggttttgtgggccggggccagggaccctgtgctgtgtgcagcctagggttttggtgccgtatgtcccagccacttagccgtggctgaaaggggccaacgtacagctcaggctgtggcttcagagggtggaagccccaagccttggcagcttccatgtggtgttgagtctgtgagtgcatagaagttaagaattgaggtttgggaacctccacctagatttcaggagatgtatggaaatgcctggatgcccaggcaaaagtttgctgccagggccttcatggagaacctctgctagggcagtgcagaagggaaatgtggggtcagagccccccccacagagtccctcctggggcactgcctagtggagctgtgagaagaggaccactatcctccagaccccagaatgatagatccactgacagcttgcaccatgtgcctggaaaagccacagcactcaatgccagcctttgaaaacagctgggagggaggctgtaccctgcaaagccccaggggtggagctgcccaagaccatgggaacccaattcttgcatcaatgtgacctggatgtgagacaaaggagataattttggtgctttaaaatttgactgtcccactggattttggacttgcatgggccttgtaatccctttgttttggtcagtttctcccatttggaacaactgtatttacccaatatctgtaccctcattgtatctaggaagtaactagtttgtttttgatttttacaagctcataggcgaaagagacttcccttgtctcagatgagactttggactgtggactttttgggttaatgctgaaatgagttaagattttgggggactgttgggaaggcatgattggttttgaaatatgaggacatgagatttggaggggccaggggtggaatgatatggtttggctgtgtccccacccaaatctcaacttgaattgtatctcctagaattcccacatgttgtgggaaggacccaggaggtggtaactgaatcatgggagctggtctttcccgtgctattctcatgatagtgaacaagtctcatgagatctgatgagtttattgaggtttctgcttttgcttctatctcattttctcctgccaccaccatgttaagaagtgccttccgcctcccgccatgattctgaggcctccccagccatatggagctataagtccaattaaacctctttttctccccagtctcaggtatgtttttatgagcagtgtgaaaacggactaatacatgcctcctcaggtcactgtgaggatttagtgaaacattatcctaaaaaaaataagttaaaagtcttgcttaaatatgacaagcttataaaaattaacagaagcattatattagaatttctaaagtcatttccattgaaatcaagaataagaaaaacatgctgctttccccaatgttagtcaacattatttaaaatgtttagctaatcaaactgaaaaaaataaaacaattggtatgtatattatataaaaaaggtaaaattgcatatttttgtatataatagagaagagaaaatctaatattttaataaaatacaataaataatttaataaaatatctcaaatcaagatatatggtacataaaaatcattagcctttctcaatatgaagaataactagtcatggatataaatttattttttaaataacacataaaagcattatatattgcttaggaatatatataaaaccattatctattatttagaaatgcaaaaatacatttaagaaatgtttaaatgtctgggaattatacacactggcttctagacactagtcatatatctagaaagggggaagatgaaagaatgtcatcatattctataaatatgtcaaaatgttaaaatctagtaagtatgagaagagggtacatgttgcctgtaatattttttttatatttctctgtatatttgaaatatttaataatacaattttaaatttgaaatatcttctctaaagtcatgataaggatgggcggggtggctcacgcctgcaatcccagcactttgggaggccgaggtgggtggatcaccttaggtcagaagttcgagaccagcttgaccaatatggtaaaacctgtctctactgaaactacaaaaattagccaggtgtggtggcatgcacctatagtcccaactacttgggaggctgaggcaggagaattgcttgaactcgagaggcagaggttgcagtgagtcgagattgtaccactgcactgcagcctgggagacagagcaagactccatctcaaaaaaaaaaaaaattggctgggcgcggtggctcacgcctgtaatcccagcactttgggaggcctaggcaggtggatcacaaggtcaggagatcgagaccatcctggctaacatggtgaaactccgtatctaataaaaatacaaaaaaattagccaggcatggtggcgggcgcctgtagtcctagctactcgggaggctgaggcaggagaatggccatgaacccgggaggtgcagcttgcagtgagctgagatcatgccactacactccagcctgggtgacagagcgagactccatctcaagaaaaataaataaataaataaaaataaaaatcatgattaaaaacaataggctgggcgcgatagctcacacctgaaatcctagcactttgggaggccaaggcgggcagattgcctgagctcaggagtttgaaaccagcctgggcaacatggtgaaaccccatctgtactaaaatacaaacaaacagacaaacaaaaaatgaaaacaacaacaataataatggctaagaatgtttgtatatgaagtcatttttaaagacagaaaacaagatctaagcaagtggagagacatgccagtactccagaaaggatagtgttaatgttaattcttagaaaaattaatgtataactatgatgcaattcccattagaatcacagtgaattatgtcttggtccattgtggctgctgtaacaaaatactatagactggatagctactaaacaacataaactgacttttcctaattttgaaggctgggaagtccaagatcaaggcacaggcaggtcagtgtccagtgagagcccatttcattgtttatttacggtgccttcttgttatgccctcaatgggggaagggactaggaagctcccttgggcctcttttataagaggactaatcctgtttatgggagctctgccctcacgacctagttacctcccaaaagctctaccttttaatactgtcaaccttgggggttagggtttcaacacaggaatttggggagggcacgaacattcaaaccatagcaaatcattttacaaaaactacatgaaatgaatgtaaagttcaaatgaaaaaataaatgagtgtccaagaataggcaagaaaactatgaaaataaaaaatagaaacagggagaattgccctaccaaatattaacctacattataaagtcactataatcaaaacaacattaaaagatgaataaaaatgtatctgtggatcagaaattgatcccaaaatcaatgtaagtatatataagaacataaaatatggacagggtactatttcaatgcagtgggaaaaggttaattttttaaatataaactggccatcaatctagaagaaaacaaaactaaatccactatctcatgccattcacaaaaataaggttctgacagtttagaaatttaaatataaggaacaaagaatatgaacatgcaatgcacaggagagaaacatgtgttttataatattatgaaaatacactcagtgtcattaaaactcaggaataagcaagctgaatagtttgtggttttaccaataacttggaatatgatgtagctttaaaaaatattgatccagagtctcacttactgagacagagagatgaaaaaaatcacactgcttaagtgtgattttttttatcaatcataaaacacactatacatgaatatagcaatttttataggtctgtacaagcataaggatgtggaccaaggtacatcaagctattaccattatttatttatggtgtgaggatggaagggactggaagaaagttattaatgaatacttattatatatatgtatatatttcactttttaaaataagcagacttgctgatataatttaaaaataataattttaaatatttaggcatattgagaaaagaaaaccaagggaggctttgcagacactgccaccatcgggagccctgtactatcagccatggttaaccccactgtgttttttgacatcgccgtcgatggcgagcccttgggccacgtctccttcgagctgcttgcagacaagtttccaaagacagcagaaaactttcatgctctgagcactggagagaaaggatttggtaataagggttcytgctttcacagaattatcagagtttatgtgtcagggtggtgacttcacatgccataatggcactggtggcaagtccatctatggggagaaatttgatgatgagaacttcatcctaaagcatacaggtcctggcatcttgtccatggcaaatgctggatccaatataaatggttcccagtttttcatctgcactgccaagactgagtggtggatggcaagcatgtggtctttggcaaggtgaaagaaggcatgaatattgtggaggccacggagcgctttgagtccaggaatggcaagaccaggaagaagatcaccattgctgactgtggacaactctaataaggttgacttgtgttttatcttaaccaccagaccgttccttctgtagctcaggacagcaccctccaccccacttactcgcagtatcctagaatctttgtgctctcgctgcagttcccttccatgcctagctggactgcagagttgagtttatgattatgaaataaaaactaaataaccaaaaaaaaaaaaaaagaaaaacaagggaaaaaatgaattggacttatgaggtataatggctattatcctagagtggtggtagaagaaaggagaggatggagagagattaaataaattagttgtttactgaaacttttttttttgagatggagtctcactctgtcacccaggttggagtgcagtggtgtgatcttggctcactgcaaactccgcctcctgggttcaagccattctcctgcctcagtctcctgagtagctgggactataggcacctgccaccatgccaaactacttttatgtatttgtatttttttttttttttttttgagacagagtctcgctctgttacccaggctggagtacagtggcgcgatctcagctcactgcaagctccgcctcccgggttcacaccattctcctgcctcagcctcccaagtagctgggactacaggcgccctccaccacgcctggctaattttttttgtatttttagtagagacggggtttcaccatgttagccaggatggtctcgatctcctgacctcgtgatctgcccgcctcggcctcccaaagtgctgggattacaggtgtgagccaccgcacccagccacttttttgtatttttagtagagacagggtttcaccatgttggccaggctggtcttgaactcctgacctcaggtgatccgcccacctccgcctcccaaagtgctgggattacaggcatgagccactgcgcccagcctgaaacttgtcaagcacaggcagagttcctggggcccagagggatacacgaaatataaggcacagaccttactctctattggcattaagtctgatcgtggatgaaattaaaacacttgaaaccatttatatataatgacgcaagcccctccaaaactgtcaggtcatagaatggatgtatcagtttgctttaccattcacctattggggagtatttggttgtttccagtttggggctattacaaataaatctgccatgaacaatcatgtatgagtttttgtgcagacatcagttttattttctggtacaaatgcccagaagcaattgctaggtcatatattgaggtgtatgtttaattaaagaagctgccaaactattttctagagtgtctgtatcattttatattcccaccagcgatgtatgagttagttttgtctgcatcctcgccattatttgatactatcactatgcttgatttgagctgttctaatagatctgtagtgatatcttactgtggttttaatttgcatttccccagtggttagtgttgaagatctattcctgtgctttaagtcaattcatttttaaaacctaaataaatgtatttaaaaaggaaacttttgctttaggaggccaaggcaggtgaattgctcaagccgaggagttcacgaccagcctgagcaacatggtgaagctccatctctacaaaaaatacaaaaacatccaggcaaggtagcgtgcacctatggtttcagctacttgggaagtgaggcaggaggattgcttgagcctgggaggtcgaggctgccatgagccatgattgcaggattgcaccattatactacagcctgggtgtcacggcaaaaccctgcctgaaataaatgaataaaaggaaacttgtggttagtggttctcagagtgtggtccctgagccagcagcatcagcatcaccatcagctgagaacttgttagaaatgcagattctcaggcgccgtcccagacctcctgaatcagaacctctgaggcgtgggttcagcgacctgtggtttaacacgccctcccggtgagaatcggtctcattcactacagatagaaggaaatggtaaaaatcaattcatccgcatatcgcctaaaatcctcctgtgggccccaggttgccacagcacacttttgggcaggagccccactcacagaggccgtgacaagaatgctcctgcccctggggttgtgcagtgacagctcacacagctccacgtggcggttctgagtttgggaagcgctgatgtagtcctactgcagcccttcctgcccttcaccggactgaggaaatccaggctctgaggagggcgagacttgcccaaggtcacccagcaacatggtcagtctcctttcccagggccctcacaatgcgtggcctgtttaaarcctgcctctattcactgctgagtgaaaaatccagctccaaaacagaatatggggaaggatactatcttgtgcagcttatgtttatagctgcagatacatgggaaaacaagtcagaaaatactgttgaagcagttatttggggagagaaggggtttgctggttttttgtgtttttaacttttctatatctcataatttttatcacaataatgtttagttacataatcaaaatgtattaaatataatattaaaaatcgacatgaagcctgatctagccacggtctattgttggcagagtcaggaagccttccagatagagcaggccctgcacctgccccaggtcacacccttaccccatggtggcctccacatccatacccatgagcatctcctgtgggtgcggccctcccctgcatccagccctgggcacccccagcccagagggcacctcatggtctgagagtccacctgtctgtctctaaagagaggaaagctccttgggacatgtgttctgcttgacgcatcacccctggcctggtacagaaaggtggacagtgggtatttggtgaataaatgaatgaatgattagaacaagtccccaaaatggtgatttcctgaggcccttctccagcttgcctaggtggaaccagttccacttttcacaggaaagccaggtgtcaggagtggggcaggtatgtgtgaatggccaggttctcgaaggctggatggatacagggcttatggcaggtctggggttggcagtgctgctgtgggagcctgtaggagggctcgtctttggaatcccccagggtatcctggtgccctcagctgctgcatggtgtgagaaggcctggcttgtggggatgcacagggtcttgtttggattggccacctggtccagcccagggagctatgcttcctgcccctcagggaaaactcacttttgatgtgtaacaacagctgcaggcaaggggaggtagaggtgtgctgggcctcggccttagaagccagaagccagttcatgcccctacgtgggaaaaggatgatatacgtgggaaagggatggggccttggctagctctagggtcctgggttatggtcagaaccatatggacttatatgagtcacttatggactcagtgacttgggctgacccagcccctccctgaacctcatcagtgaaaccaggacggggccagggctctcgacgcctcccagctccaacctctggctttctcccaggagggcaggagatcagacagaggtaacctgggctcccctgtttacgtcaacctccttgtgaagcctccctctttctgcctgtgaggtgggtggggccagaaggagaggcattcacctgtgggtctctgacttctctgcccaggtgtgcctggagagcctggtctatacccggtgctttgctacaccccacagcctggccaaagcctccctgcctccagagcagccctggccctgggaagaagctggtctctgcattgaatgacaggtagaaaattaaagtggggatgatagctctggaaaggagtcaaggaggaggtgccttcccaaggacacagagggtttttccagaatggaacttgactggtgtgggcaaacatcaggaggtgggaagggtggctccctctgcgggagctggggcaacttgcctgggccaaatggtggtaggttgtgggtagggcaggcagagctggggtgctcagagcctgggttctctgtccttgcagaggactggaattcaaaacaagtgtcccctgccctgtggctgggggacatcctctacttccaagcccagacatacaccagctgccacaagcccctgaggctctttagaggaccaatggacagccacacccacaatgggccagcctgctgggccacctgcaccctggtcagagcccatgactgaggggactctctggggacaatgggggcagtcccatgctgccctcttacaggtggatcagtccctgggatctggtgttgggctagggtgggctgaggctgttctctgccagggtgcctggtggacagcaggtagagcaacttgtccttggctttcctggaccccaggacacagctgaacactgcactttaccctggatgtcttcagattctcaggggaccctgggaaggaagagggggatgccccagcaggaggccagggccctgggctatgcttgctccccccagtccctccagcaggcacctcctctccacatcaacatcacctgattcctgaaggcctgggctactgacaagagccccaaaaccctcaccaaggcctgttcttgtatcagagcaactagtatgagttcagagctgaaggggccggagagaaaactcagggctctgtaagagttctcagctccctactgtggtgggccccgtagaagtccccccagaaatctgcagctgctgtaagtcactgggaggaagctacagcagacatgtgtttcccagcctggtagatgcagaggggtgtccgggccccgagtgggaggcccaaacacagccttggatatggcagtgcaggattctagacagctctggggccctgggcaagtcatttagcctctcagaaccccattcctggtcatcatggggctcttgtgtggatgtaaagaacccccctggccacttatgtcccatcagtggaagcctagcatgggtggagacccccgagactgaactcagtggtgggatccagcctgcccagctctcctacatagagcccagagccaggaggatgggcttcctggagaagcaggcactcctgtgggctggagagcatgagcaggggtccccttggggaggtggaagaggctgcggtcaktgaaggccataatgaggcagagcttgggcaaaaaaggcatgatgatcaggggatctgaaacccaacagagactggactgaggacactgtggccacctcctccaggtgtcgctcaggaggtggaagctgagctagggctgggcccttgtcctgagtaacgcctcaccagtcttggaagctatacccaaggtggcttcatgtaagggtgcatctgcgcactctttttgagatggggtcttcctctgtcattcaggctgcaattcagtggcacaatcatagctcactgcagcctcaaactcctgggctcaagtgatcctcccacctcagcctcacaaagtattataattataggcctgagctatggagcctggtttaaaatcttaataaatatctcctcctggtctgcttccctggctgacacacatgctggcatcttgcgcctagacagacatgtctctggacttggttccatttgttctgtcgggctcctctctctcaatgaccgcacattacagtatgtggctattcttacacatttctgtatagaactgagggttagtatattaacgtcaaagttctactggtttttcgaggctgggtggaaagtttgggttaatttaggagtgggcatcttgacaatataggcttttcttccaggaacggtgattctgggacgcaggttttgcacattctggtttattgcttgactcgctgccacagagggatgtcactgctccacacgccatgcccaagagatgtcccaccttatctttctaaatcaagctgaatgttttcagctgacaggatatcacgagtgctgcggggactcactcccctcaacccgagatgaagtgaggcggagactatggagcagatccgtgctgagtgcatttgcccttcctgacctgcactgctgctggctggggctgtgtctgagctgtcagagggcattgatttggggatggggtggggggca

SEQ ID NO: 96439 - DNA, 73022 bp, Homo sapiens
gcttcttcggttgctgtttctcagaataatctgtatgccaaagaggcctattttgggtggcatattctggtctcctactgtgatctggcctcccagatagtcaccagcagactcctgcagaaaggaaaagttgggacaggcaggtaggagggccaggcaccactgacaaggggaagtgcagagagaggcctgagcccaggaaggactagagtccggcagctgagctgcaacacagcccatgggtcaaaagtaggagctcagaaccaaggtaagccgaaaagcatacctgttggtttcttagacgtctacaccggcccatagcctttgtctccgccaccatggcctgaggtggcagctgccctttcatgacttcttcctctttagtttgaatttactggaataaaaacgtgtgtgtaaaagtaaagggagcttaaaaagtgatttcctcctctaagctcttgttcctccagagagggtgactcagagccccaaatccttgcctttgcttgtttctgcctaagtttgaggcacaacagccggctggccctgctcctctcagtttcttgattggcccaggtccagtcacagagacagcagctggccaatttcctttccttcctcttctgcagccagctctgcatggagcccaaagggtctgcggcaaggttcattctcaccctcgtctccaccagcccaccctcatctcccaccaaggtccccagaacaaaggcagacttcttcacatcctccgactttctaaactagtttctccaacttttctggcagaggagtttttgtctgttgaagaagcaagtcctgacctgcagagtcctttctctgcagggctgggataaaacaaaatcagatgggtcatgaaagagttgctgaaatcgctgaaccagagctgactatgggggctggggtgctggggaaatcctccccatcctctgtggtctgccttacggcctcttatctttcaagctgtcttctccttctatgattcagctccaggttgtacagaaaacaattctttctttacttggaggagctcagtgctgctttgcttcactgccatcaggtgagagagcagaatttaatcagtggatgacataaaagactgagtaagaagacagttatctttgacttactctgtgaacaagatttcattttaaatttaacagtgctcagaaaccttatccttatcactagtactgccagaagcatttgaaccagagcaactccatcttgaataggagctgggtaaaatgaggctgagacctactgggctgcattcccagatggttaaggcattctaagtcacagaacgagacaggaggtctgcacaagatataggtcataaagaccctgcagataaaacaggtttcggtaaagaagccggctctaacccaccaaaaccaagatggccacgagagtgacatctggtcgtcctcactgttatactcccaccagcaccatgacagtttacaaatgccatggcaacatcaggaagttaccctatttggtctaaaaaagggaggcatgaataacccaccccttgtttagcataaataaataaacataaaaatgggcaaccagtagccctcgggggctgctctgtctaaggagtagccgttctgttattcctttaccttctttttttgtttgttttttttttgttttttttttttttgaggtggagtctcgctctgtcgcccaggttggagtacactggcgcgatcttggctcactgcaagatccatccacctcctgggttcacaccattctcctgcctcagcctcctgagtagctgggactacaggcgcccgccaccatgcctggctaattttttgtatttttagtagagacggggtttcaccgtgttagccaggatggtctccatctcctgacctcgtgatccacctgcctcccaaagtgctgggattacaggagtgagccaccatgcctggcccctactttcttaataaacttgctttcactttactgactcgccctgaattctttcttgcgcgagatccaagaaccctctcttggggtctggatcgggacccctttcctataacggtactgtactgtggtactaattactgcagaacaaatccgtgtgtgattttatattgcctggcctttgtctgtccttacttcatggctccctgtgggtcttaaaaacccagtaagattctaagtgcctctgatgagatctcattccattgcttggatcccctgggtcagtaatgccctgggctgagctaggcactctggctggtcagtatttcttgatttccctatagcacagctaaaaagcacactcagcctcaaagcaggaagaaaaggggacatttttctgctgaatctgaaaatatcttttgtaaacagtctgctcatatctccagagcaggacagaaaccagatgcaggcagagatagctaaacatgtcttatctggatagaaaattgagcttaagataataaatatcttggaatatgataaaacccagaggccccttcctggtccatgattaattgaagaaaaaaaaagcctagtaatacgtgaccttatcagagagatttatgttcagttgaaagccaagttattttgagctgagcaaaatgaggattcaaattacaggagcgcagagtaaacttttggcatattagcggacatcttggtaagtttctcaggacagtgtttttcagagatgacaggattaaagagaaaccttttatgacattgtactggaaatggactctccacagtgcccagcacatataggtgctcaataatttttttttttttttttttttttagatggagttttgctcttgtcgcccaggctggagtgcaatggcacgatctcggctcactgcaacctctgcctcctgggttcaagcgattctcctgcctcagcctcccgagtagcttggattacaggcacgtgccaccacgcccagctaatttttttgtatttttagtagagatggcgtttcaccatattggccaggatggtcttgatctcctgacctcgtgatctgcccgccttggcctcccaaagtgctggcattacaggtgtaagccactgtgcctggcctaatttttgtatttttagtagagacggggtttcactatgttggccaggctagtcttgaactcctgacctcaagtgatctgcctgcctcggccttccaaagtgctgagattacaggggtgagccaccacacccggccaaatttttttttttgagatggagtctcgctctgtcgcccacgttgtagtgcactggtgcgatctccactcactgcaacctccagctcctgggttcaagtgattctcctgcctcagcctcccaagtagctgggattataggcacctgccaccacgcccagctaatttttgtatttttcgtagagacgtggtttcaccatgttggccaggctggtctcaaattcctgacctcaagtgatctgcctaccttggcctcccaaagtgctgggattacaggcatgagccacctcacctggccaataaatattttatttaaaaaatttacttattaagcaaacacttatattgcacttagacaatgcagtcactattctacgtgtgttacaactatttactcatgttcctgttgcttctggccttgaggctgagcttgccatttagctgggagtaatcaagaaataccaggccagaagcggtggctcacacctgtaatcccagcacttagggaggccaaggcgggaggattgctttgaggccaggagttcaagccaagtctgagcaacatagtgagacccccatgtcaacaaaataaaatttaaaaattagctggtcatggtggcacgtgcctgtaatctcagctagtggggaggctgaggcgggaggaccccttgaacccaggaggtcaagactgcagtgagccgtgatcctgccactatactccaaagtgggcgatagagaaaggccctgtcaagaaagaaaaaagaaagaaaaggaaagaaaaggaaaggaaaggaagaaaggaaaggaaaggaagaaagaaaggaaagaaaaaaaagaaagctagcagctgggaagggaaggggaggggaagcgaggggaggggaggggaggggaggggaaggggggaggggaggggaggaaaaggaaaggaaagaaggaaagaaggaaggaaggaggagagataggaaggaaggaaaagaaggaaaagaaagaaaccaagtagccgggaagggaagggaaggggaggggagtggaggggaggggaggagaggggagggggaaggaaggaaggaaaagagagagagagagaaagaaaaagagaaaggagagggaagaggggagaggggagaaaccgagcagccagcgtgcctagcacagccctggacaccattgacccctatgtttgggttgagatctgtccctgagttaacttcaaccccagggctgtcaggcactgctgctatcaatacctcatttgtccctcacaacaactctggggtggcctcctttctatgactttctatgagcccgcctgtccccctgctattacaatgaagcagatgaaactgctgatctttgttactgatgttttggctgttttcaatttccaaaaaatgacaattaaatgcaattcaacctaatattgcctaaattttaaaagaggaaataggttctcacagtgtttaagtaaccagcccccgtgcctcagaggtagtcaacagcagtatctggattcaaaatccagtttgcctccttctgaacttcttaacatgctacttttagccacggattaagaacccgggaaccagttgctagggtttgagtatcagctcatctacgtagcagccatgtaccttggaaataataataatgcagaccaggtgcagtggctcacagcctgtaatctcaacactttgggaagcccaggcgggtggatcccttgagcccaggagttggagaccagcctgggcaacacagtgagtgagaccccgccaccaggtatggcggccgcgcacctgtagtcaggagaatcacttgagcccaggagttggaggttgcactgagctgtgatcacaccactgcactccagcctgggtgacagagcgagataataataataatgatgatgatgatgcagtattttccaatttacagggttgccctgaggattgaataaggaaatctaagtacagagatttagaacagagccctgcactgtgtaagcactctatagatgtgagctattattatcatcttcaggttcctttggtagtttttttctgcttgaataaaatatagcaacacacacacacacctcctttgtccactaatgtaatcccataaaacggagaaactcagcagtgaggacattctgattccaagcaggaaggagatgaacgatgaacctcaggctgagcgcctcacggtttcctcatgtcaccggggctgggggtgcagtttggcttcacactgctaggtcttttcttgtttttaagggggcaggggctgtcacctctgaggagtcagctgtgattgatccttctccacacccagccaagcaccccccagacaggggagcgcccgcagtagggcggtaggcaagggcagttctagccaacagtccctaaatcatcccagcgggggcgcgggaaattccaccgaggtgaaagcctagggggccgggtgaagaaatccccatacccgggcccagaaaccgctccaggtggaagtaacttgtctaaagagaacagggtgtaacgggggtcatttcagggctgttcttttaaatcggtgagcacggtctgtctactttccctcagttgtctagagaccacacgccacccccgccccgggggagtcgcccggtcgagggtcccgggacaggcgcagcactcgcagcatccggacctggtctgcctcgcgccgggagcggcctctttaagagcggccgcggccaacgtgctccgtgacgtcagagcaggaagtgtttgaggaagtsgcgccgcgctgcccgcgttaagattcccgcattttaatgttttcaggggggtgtcatagccccgggtttggccgccccagccccgccttycccgccccggggagcccgccccctgccccgcgtccctgccgacaggtgagtccccctcgtgggtgcggcccgggtgccacctgcaggccccgccgccccgctgcctgcaaggcccggaagacccctctgtgccgctgggaagtcgcagcttgcggactggggagcgtttcacttgtgcgggttggagttcgggaagccgggagaaacagctctccctggggtggcttcttgggggtgggtggctttgaggggaacctgcgatttatgggaacattgtaaagaaacacgtgacctcggcgatgctcagaagtaggttctgcccctgccacctcgggcagaaggcgggcaggcccgggcgcccctggtggagtcwgctggggatcccctcgctagggcaagggcgtgggcatcgcctccctcggtgactttcttccttgcctgatgccacagcaaccggatgggggagggtgagagggacaaaagtttgccacaaartttggaccaaccaaacacattggtttctttacaaaataaaaaaccagttgtatttttcttctctcccwttcaagagcagtggtatctcttgycttctccatccctttgagctccatttttttcttaatcytaaccttttttccccatcccaaattgcttatagagttarcacgacatcaktatgagctggtcaccttccctgacaacgcagacatgtggggcctgggaaatgaaagagcgccttgggacagggggatttggaaatgtcatccgatggcacaatcaggtaggccctctgtgcagcttggggaggggcggggagccaggccccctcctcactgcctccactttctctgatcctgctgggccaagggctcacctttggctttggtcatcttgggacagtgaatagggggactgggaagagggcttcaggacttctgagctgactccaggttagtggtctccatgctttattgactatgtcacctaaataaatagtaaaataaagttaagctcttagtctctattatatatatatggtaacagtagaatatcatgtactaatatatactgatattatatgttataaaacatatagaaataggaaaatttaaaggatgagactaaataaataatttaaaatattttaattccttgaggccagtagttcaagagcagcctgggcaacatagcaagacctcgtctctacaaaaaaggtttaaaaattaggcagccagctgggcgtggtggcttatacctgtaatctcagcactttgggaggctgaggcaggcggatcacgcagtcaggagatggagaccatcctggctaacactgtgaaaccccatctctactaaaaatacaaagaattagccaggcttggtggcacgtgcctgtagtccccagctacttgggaggctgaggcaggagaatcgcttgaacccatgaggcggaggttgcagtgagccaagattgcgctactgcactccagcctgggtaacagagtgagactccgtctcaaaaaaaaaaaaaaaaaaaaaaccttaggcagccttggtgcgtacctgtagtcccactacattggaggctgatgtgggaggattgcttgtccaggagtttgaggctgtagtgagctatgattgtgccactgcactctagcctaggtgacagagtgagaccttgtttcaaaaccattttttaaaaattattttaaatgtcgggtgcagtggcttacacctgtaatcccagcactttgggaggccgaggcaggaggatcacttgaggtcaggagtttgagaccagcctggccaacatggtgaaacctcatctctactaaaaatacaaaattagctggtgtggtggtgcatgcctgtaacttcagctactcaggaggctgaggcaggagaatcgcttgaacccaggaggcagaggttgcagtgagccgagatagtgtcactgcattccagcctgggtgacagaatgagaccctgtctcaaaaaatatatatatatatatatatttaaaatatttgctaattatgatgtcttcccagtattgcttgcgatactgcacggcaaaaaataagcagatccacatgaaagtgagaattcatttagaatgatgatgaaaatccatatttcaaataattaacatttttttaaattttgtagagatggggtcttgctatgttgcccaggcttgtctcaaactctcatcctcaagcagtcttcccgtctttgcctcccaaaatgtttggattacaggcctgagccatgggacctggcctcagctgaggttttttttttattttttgtagtgatggtggtctcacaatgttgtccaggctcgtctagaactcttggcctcaagtgatcttcctgccttggcctctcaaagtgctgggattacagccatgagtcattgaacctggcctgtttttatttttaattgacacataataattgtacatatttatggggtacagtgtgatattttgatacataatgtgtaatgatcaaatcggggtaattggcgtgttcatcacttgaaacacgtatcctttttgttggaaacagtcaaaattctttcttctggctattttgaaatatacaatatttttttttttccggagacagagtctcgcactgttgcccaggctggagtgcagtggtgtgatcttggctcactgcaacctccgcctcttgagttcaagtgattctcctgcctcagcctcctgagtacctggaattacaggtgtgcaccaccatgccagctaatttttgtatttttagtagaaatggggtttcaccatgtaggccatgccggtctcaaactcctgacctcaggtgatctgcccacctcagccacccaaagtgcttggattacaagcgtgagccactacgtccggcctgaaatatacaataaagttttattcactgtagtcaccctgttgttctttagaatactgtaacttattccacctaaccgtaattttgtacccattaaccagtctctccctatttccctccacaactccccccacccccaccaccctttcctgcctctggtgaccactattctactttctacttctgcgagattagtttgttgttgttgttgttgttgttttgagacggagttttgctcttgtcgcccaggctggagtgcagtggcgcgatcttggctcactgcaacctctgcctcccaggttcaagtgattctcctgccccagcctcccgagttgctgagattacaggtgcctgccaccacacctggctaatttttgtatttttaatagagacggggtttcaccatgttggccaggctggtctcgaactcctgaacttaggtgatccccgccggcgcgcccccccccccccccgccatcccagcctcccaaagtgctgggattacaggtgggaactaccgagcctggacgagatcagtttttttttgtttgtttgttttgttttttgagatggattcttgctctgttgcccaagctggagtgcagtggcacaatcttggctcgctgcaactggtgtctcccaggttcaagcgattctccagcctcagcctcccaagtagctgggattatagccgtgcaccaccacgcctggctaatttttgtatttttagtagagacagggttttaccatgttggccagtctggtctcaaactcctgacttcaggcgatctgcctgcctcggcctcccaaagtactgggattacaggcatgagccactgtgcctggcatttttttttttttaatttttaatttctttggagatagggtctcaatctgtcatccaggctgagtgcagtggtgccatcatggctcactgtagccttgacctcctgggctcaaatgatccttctgcctcrgcctcctgagtagctgggactacaggtgtgcgttgccatgcccggctaatttttgattttttgtagataggaggtctgtctgttgcccaggctggtctcgaattcctggacacaagtgatcctcccacctcagcctctcaaagtgctgggattacaggtgtcagccaacagactttacccaactgagatcagttttttattagctcccacggatgagtgagaacatgtggtatttatctccctgggcctggcttaattcccttaatgtaatgccctccaagctcatccatgttgccacagatggcaggatttcattcttttttatggctgaataagagtacattgtgtctgtgtaccacattttctttgttcatttgttcattgatggacatttaggttgattacatattttggctattgtgaatagtgctgcagtaaacgtgagggtgcccatatctctttgataaactgatttcctttcctttggatagatacccagtagtgggattgctggatcatatggtagttctatttatagtttttcttttttttttgagacggagtcttgctctgtcaaccaggctggagtgcagtggcatgatctcagctcactgcaacctccgcctcccgggatcaagcagttctcctgcttcagcctccaagtagctgggattacaggtacatgccaccatacccggctaatttttatgttttcagcagagacggggttttaccatgttggtcaggatggtctcgaattcctgacctcaggtgatccgcctgcctcagcctcccaacctgctgaaattacaggtgtgagccactgcgctagccttgtttgtagtttctcaaggaacctccatactattttccataatggctgtgctaatttacattcccaccaatagtgtatagagttccgctttctccacatccttgccttcatttgttactttttgtctttctgataatagccattttaactgtggtgagatgatatctcattgtggttttgatttgcatttgtctgatgattagtgatattgaacattttatcatatacttgttggccatctgtatgtctgagaaattcctgttcaaatcatttgcccatttgaaaaattggattatttatttttttgctgttgaattgtttgagttccttgcatattcttgatattaatcccttgttggatggatagtttgcaaataatttctcccattccataagttgtctccataggttccataggtttattctgttttttcttttgctgtgcagaagctttttagtttgatgtaatctcatttgtctacttttgcctctgttaactgtacttttgaggtcttatccataaaatcttttcccagaccaatgccctgaagcacttcccgtatgttttcttgtttttttttttttgagacagtctcactctcagctgagacaggtgcgatctcgggtcactgcagcctctatctcctgggttcaagcgattctcctgcctcagcctcctgagtagctgggattacaggcagcgccatcacacccggctaattttttttttttttttttttttttgagacggggtctcgctctgtcgcccaggctggagtgcagtggtgtgatctcgggtcactgcaagctccgcctcccgggttcatgccattctcctgcctcagcctcccaagtagctgggactgctggcgcctgccaccacccccgactaattttttttttgtatttttagtagagatggggtttcactgtgttagccaggacggtctcaatctcctgaccttgtgatccgcctgctcggcctcccaaagtgctgggattacaggcgtgagccaccgcacccggccacgtgtggctaattttttttttttttttttttgcaacggagtcacgctctgttgcccaggctggagtgcagtggcttgatctcggctcactgcaacctctgcctcctgtgttcaagcgattctcctgtctcagcttcccaagtagctgggattacaggcacctgccaccatgcctggctagtttttatatttttagtagacacggggtttcaccatgctggccaggctgttctcaagctcttgacctcaagtgatctgcccaccttggcctcccaaagtgttgggattacaggcatgagtcactaacaggcgcctggcctgttatttatttttaaaaagccaaaagccagcttcctcctcctgccggctgaaccccacacagtctgtctgcacctgcctctccatcattcctccccttggctgcctctgttttgagcgctgagccctcttgccggacaggcctccccctcctccacattcctccaggaccamctctaggccatctcctcctcatatgcgtctgggatggctttgttctgtggcaactggttctcccggtgagttcctctgggctggttcctgtgccgcccttcctgtctgcgtgtggagtaagtcttgtcaggaccctgcattcctggtcagccagggctgggtctggcctttggagttccttcagttctcctgtagcaagtgcctgacgttgtatatgtgctaggtgccccaaatcatccactctgccagtccacaaatatttatcgaatgtctattatgtgtacattggtaattaaagcagacctttggagaagggaaggagccattagtcaactaattataaatgtaagctcctaagtatggtaaagtgtgagttgggagaaggacccagtgcactgagaccttccgttggggtgggatcagtcagtgtcagaggaggttccccaaggaagtgacacttgaactgaggccctagtagaagtcagcttgacagagaaggtgggaggagagttccaggccaagggagaggctcctgaggggcctctgtggagggcaggtgtggcaagtgggcaagactgaaggccagcgtggccggaagggaggatggggcacaagtgcctgggtggctgagggtggacggtgcaagtcagatcctgtggtgttttttgggcagtttcagccgaggaggttttgttttgatggaggagcagtggaacgatgttagagggaggcgctgtgcccatggggacagattgggagggcccaagcagtgggcagcgtgctgggaaaaaatcagctctcggaagaaatgccttgatccatagtgtgcagcagttctcatggagtagctactcccaccagggctgacttcaagccaccagtagtttaatagcccgctccggcctgattcctgagtagttaacaaccagctctcagtgactgctactacagtgtcactggctccgtcccagtgatgcaggcagaccaggtctgaatgttttggagtcgtctaggtgagagatggggagaggtgggcagacttaagagatatttaggcctggtgcagtggctcatgcctgtaatcccagcactttgggagcagaggcaggtggatcacctgaggttgggagttcgagaccagcctgaccaacgtggagaaaccccgtctctactaaaaatacaaaattagccaggcatggtggcgcatgcctgtaataccaactactcaggaggctgaggcaggagaattacttgaacccaggaggtggaggttgcagtgagtcgagatcgtgctactgcactccagcctgggcaacaagagcgaaactctgtctgagaaaaaaaaaaagagagagagagatttaaggggtggaattaacagcgcttagtggtggagtagaggtggaggggagcaggaggagtggagtgcctgcaggtcctcaatgatgcctacccgtgagcccggcccaggccaggaagctctctaccttccttccccgtgggttctccccaagtttgggaaatctctagggctgctttgggtgctgaggagaagtctttgatcattgtccaagttcagaagatgagcgtgtatgttctctgttgggaacccctctgttcacagcctcttaaaagaagcagctgggctatggtggtgttggttccttgactctgatggttttactccacgtaacaacagtgtgcactttcctgacactccatgcactgcatcttgtctgcagaagaaggaatgttgtagttatcacaatagaagttacatgaaaaagcccctaagcatgggtatcctcagtcagagaagtggcctgataatcagaggcatcatttactgagaacctgctatgcgccagcatcaaactaggtatttacgtgctttctctccagccctcacaactctgaaaggaagtactgttgtctttgttcccattttatagttgaggagactgaagcacagtctctgtgactcacccacagacctgagctcgcaagcaaagaggctaggattggaacctgcgtctgttcggaacccaacctcatgctttttccattgtgcctgtggcttctctgtggtgaggactcagggggaggccttggtgttccttaggctctcattgttcaccacagtctaaacctttttgaagcaggaaggggaaaacacttctttattgattttttgttgtttgttttttgagacagggtctccctctgtcacccagactggagtgcagtggctcgatcagggctcactgtagccttgaactcccaggctcaaggagtcctcccacttcagcctcctgagtagctgggactacaggcgtgagacaccacgcctggctaatttttttatttttgtagagatgaggtctttctatgttgcccaggctggtctggaactcctgggctcaagcagtcctcctgccttggcctcccaaagtgctgggatttcaggcatragccactgtgcttggttgaaaaacacttctttggaggacaaaacacttataagtcttccttgttagacagagaaccccacattgagtgtttcccagggagggagggcagtgaacaagcgagccccaccacaacctgcttcccctgttcttgtggttctcctgccacgcgggcctcaccattccacattgtgtcgggactccctaagacctccagcccaggggtcagcacaaaccacttcccagtaccgtttagataggctgatattttcaatgagacctttgttaaatacaaaggaagaggaggaggagataaccgagtgctcccacctggcagcatgttttgggagtgggggcgggaaacacgatactcagtcacacagacctgggttcagatcctggctctgtcagcgtcttggctgtgggtccccactttttgcatggattatggggattctccaatactgatctcctcagtgctgggtccccaacatggctgggcaggatgtgggtcagctrccttctggaagccacccagggtaccttgtgatatcatcatgttctgtgtacacttggctgtgaggagggccaggaagcgctgcctggggccctgcgggatgctcgttggggtggaggaggcagtgtgtgtactggctgttagaaggcagagtattaacgatcccttctatgaagcagcacggacctgtacttgtccctttatgggacaaggcaaagctttccacagcttatctgtgtgcttggaagccttaaagcctctgctccgttcagtcacttctctagggatttatagagcctgggcccgagctctgtcagggataccaggaaaaaagggtccctgcccttcgtgtgcttactctctgatcacagtgatccagggagcattcagaaatgcattaagtgagtctaaatccaagcaccgaactgcatggataacagtggctgccatttttccagggcatcatgtggcatctgagctgggttccctgtccgcatgatctctcccgaacgctggggaagggaggcttcttggggtgaatggagctttagcaggatctggaaaggaggtacactttcgagggcctggcaagaagacagaagccgactcaggtgggcagagcagcatctccacagggccagaaaaggaagtgaggctgcggtcgtttattcccggctccctgtggtcggatgctgtgtttcattttagctgacatccctggagtggatggagccatccccatcttatggatgaggacccagatgcttgtaccatgggcttctatcgcacctttaccaggcggtgggggagggagttacacctggacctgcttgtctcctgagcccgagtgcctggcttctgtgggtgaggcggcaggccactgtgccccttgggggtctgcactgtagggagtagggtgaagaagtcatggccctcttagcgtagaccaggcgatgctggggcccagggtctgtccagttacctgctgagccaggggtgaaactgcagctggatcccggacctttttggctcccagccctgggtcctcctgcccagtctctctggtcccagccctgcacctcctttctgaagcattcatttcagggggtggggtctgagaaggaggaggaggtttttactaattgcccccatgtccacagtggcctggttggatgcttgccatgataacgggacactgggctttctgcgctaagggtctaaacatggctcttggcctctgtgagtttcccctgagtcrctggaagaggcaaacttgaggaagctgggccccttttgtttctcctgtgactgggtcttcagctcgcatctgccagrcaccttttggtctgaggatgtgctccccctctgccttttttacaccttatgacacacatgcttatatataagttttatgtttacatgcatcaaaggcaaggaattgcaaactctgaggaccttcataatcactacattcaatctggacatacaggggaccctttctccgttttctcaaaatacagaccagttttttgttgttttgtgtgtgtttattttttgagacagggtctcactccagtagtccacgctggagtgcagcagcatgatcacagctcaacgcaggtctcgctctattgcccagccttgacttccgagggtcaggagattctcccacctcagcctcccaagtagctgggactacaggcatctactactatgcctggctagtttttaaaaatatttttagtagagacagagtcttgccatattgcccaggctggtctcaaacccccgggctctagcgatctacctgccttggtctcccaaagtgctgggattataggtgtgagccaccatgcccagccacaaagcagttttaagttttgtccttcacgaggagttcatataccagaagttgggtactgagatggcgcaggcctagtctgggtttccacagaactaagctaagactcagtagattccaggaaaaataaagtaagccatccttcttaccttacatgtgtttgagttccactgctagtgaagaacaaactccctggggtttcagaaccggtgatcgtagcctgcttctgttttaattgaattttgctttctagagcaggtatgtttttagtaacaaagtcattctgtttgcatttctgtttcaaatgaaacattactcatggaaaaactgggaatatttcggaatacttcctagaggcagatgaaggccactgtgttaggaaaagtttaagtatgtctgtatctacgcagaccttcctaggcccagggagttaggatttcgcctcaactctagggcgaagctgagctgtctgtgagtagaaagttagttttggtatctatgcccagttatttcaagacttgttcagtgttcacattgctgagttcagtctttttagtttgcatttggatatttaagaccaatatcaagtcttcagtatcagaatctcctcctgattctgggttgggccaagtgacagctgtgtatcaggtccagtgtttgtgttgggcaaaagactgcaattatccaatttgtagctagacagattacctaaaatcacttaataaactaagtcatctaatctattttttggatctgatgatctgtcctgtttcatttatgrtaggtagaataatcccccccaaccccaccaagaaatctggatcctaatccctgaacctatgactgggtggggcagcatggcaaagggaaattaaggttgcagatgaaattaagttttctaatcagctgaccttagagattggcctggcttccctgggggtcccagtgtaatcccaagggttcttaaacgtgggagaaggaggcagcagagccagggtcagccgatgcatgtgaggaagatggcgggacatggctgacacacggatgggctaaggggctacgagctgaagaaagtggcgcttctagaagatgcagaaggaaaagtagggaaacagactctcccctagagcctctggatggagcatagccccaccaacatcttagctcagggagacccacatcaggcttcagcagatagaactgcaaggaaataaagtgtgttattttaagccaccaagtttgtggtaatttattacggcagcaatagaaaacaagtgccctcttctgtgtattgaagttacgttgctgcagatttttcagtatcttggtttagtctcagtcattctaaggtaacgaaccataagttacagtctctttggctaaaccattgcttggaatagtgtccatggaaatgttgcagggtggatggaggtggatagatgctcttggcaatggcacctcacgctgcagcggggccatcggtctctgtttgtggaaccctgcgttccccacgtctgagctcctctgcaaactccgcctaactggaggcaagtgtctgtagcagtgtctcagtcggctcagtgctgctatcacagagtagctgagaatgggtaatttataatgattttatttctcatagtcctagaggctatgaagtccaaggtcaaggcatcatcatagggtgaaggcgaaagggcaagagacaaaagggaccaaacttgtccttttataaccatcagtcccacctgggatgcagagccattgtggccgaattgccccttaatactgaggtgatgtcctggcgcagtggctcacacctgtaatcccagcactttgggaggccgagacgggtggatcacgaggtcaggagatggagaccatcgtggctaacatggtgaaaccccatctctactaaaaatacaaaaaattagccgggcgtggtgatgggtgcctgtagtcccagctactagggaggctgaggcaggagaatggcgtgaacccgggaggcggagcttgcagtgagccgaggtcgtgccactgcactccagcctgggcaacaaagcgagactccgtctcaaaaaaaaaaaaaaaataccgaggtgatactgctacaacaggaattggctttcattgaattatggaaaactgtggaacttaagccatagcagatatcgtcaggcagagctgctgtggatgaagctaccacagaactgggcaaaaatgtgtctgagcactgtggggaagtgaaacctgaaagcaaattcacgtcagcctgagaacagaccaggaatcgggaggtacagggaggtgtaacatggtctgcacatcaattaaagaaacgttattcttttttttttttttttttttttgagacagagtctcactctgtcacccaggctggagtgcagtggcacgatctcggttcactgcaacctctgacaccagggttcaagcgattctcctgcctcagtctcccgagtagctaggattacaggcacccaccattgcacccagctaattttttatttttagtagagatggggtttcaccatgttggccaggctggtctcgaactcctgacctcaggtgatccacctgcctgggcctcccaaagtgctgggattacaggcatgagccaccgtggctggccagaaatgttattcttttgacacattccctaattcttgaaaagcttgagatggacttgtgtccaccatggtttgtaccactgtactaatcagtttaatagcaacaaggtggccgggtgcaggggcttaggcctgtaatcccagtgcttagagaggctgaggtaggaggaccacttgaggccaggagtttgagaccagcctgggcaacatagtgagactccgtctctacaaaaataaaataaaaataaaaaaaattagctggacacaatgacacatgcttgtaatcccagctacttgaagctgaggtgggaggatcgcttgagcccaggagttttaggcagcagtgagctatgatcactccactgcactgcagcctgggcaacagagtgagaccctgtctctaaaaagaaaaaatagcaacaggttttacaattgttgagagaggtcagctcttgttcagagagcgcctcagaatctaggccaaagatcagggttctactagacaaagagaatgagaaggatacttagggcagaacctggatgcccatgcctactgccgcagactggactgagggggtctcccatagtcacagacgtaagcctgtggctgcaccatgggtgagccttggaaacagtgctcagggaaagaagcctgtcacaaaaggccacatgatatatgattccatttatatgaaatgtccaggacaggctaatccgtagagacagaaagaggtgggtggttgcctaggactagaggggctcggggagtagggagtggctgctgatgggtgtggagttttgttgtgggatggcagacatgttctaaagtgtgccgtggttttggtctcacaactcttgagtatgccagaaactattgaactgtgtaatttaattggatgaattgtatggtgcatgaattattctcaatagagctgttaaaaaaaagtaggcatgcaaggtcaccatctgatggaaagcttagccaaagtggtattgggctttgatgaaagcagcttctgagagtattttagaagtgttgacagtacctcctttctggcatggagtctactgttccatttccacctttttttctgaagcttttggttcttggtgtcggtgttaaggattggtttattggtcagtgactcagtggtcttattagacagcttctggtgtatgtggaggtttccatttttccttttcttgctgtgaaggtccttgttcctgcagggatcctggccagtttggtaactgtgagactgaggtggcttgagtgccatgggaacagccacactgggaggccttgccacagtcctctgtgtgtctttttttgtttttgtttttgtttttgttttgaaacagggtcttactctgttgcccagatctcctgcaacctctgcctcttgggcttaagcaatcctcccacctcagcctcctgagtggctaagactacaggtgcatggcaccacacctggctaatttatgcatttttttgtagagatggggttttgccacgttgcccaggctgatctgtgtgtctttttaagtcccattcagtaccatgtctgttgctcacttacaagatttatgattcttttcagtttgcatcttcataaactgagaaaacagaaattggcctaacagggcctctaggacatccttcaagtgagccacagtagagtctggtacaatgctgaaatcttctcctactgctgggtgccctgtgccaccctgcaggtgtggctcttgcccaggtgtgtgtgcgggtagggagtttcgtgctgtaggtacacaggaggtgcaggatgttggtgcaggtcagcttgtttagcagtggcaggatcggctctcaggctggggctccgggagctgctgccttgggcagctgctgccccgcagttgtcttggagacccccccatagccaaaagaggtgacagtggtgcagtggtgactcccttgtggcagctggagtgcccgaggccagagccgctttccctgctgcccgtgccacagcctcagggcctgcccgtctccagtgtccccactcatgcaccagggagaagaggggaggccgccaggagccagtggctcagctcatgattcaccaggtggaggagccaccgctgaggatgctgctggttacctcgatagaggttaaagcccatgaagatggacaagtctataatttaacaaagagaagagaaaacagcctgttactctgcagaaagtaactctttggcatgtgcactgaaggaattacctgttacaggagtatagcagagggtgagaccctcttgagctcggcagaccgtggtgcccatgcacctgtgctggcaagtgtagcagagcagggccaagcgccagggtgggtggggccgtctggctgtagtgtcgtgggaagagtggctggaaatgcagataggagccaatctctgtaggatgttaaacaggagtactcggatgacctgggttccctgctctgcagggttactaatacctgctagaggcttgttttcaagccctgaaagatgggtgtcagtattcccattttacagaagaaactgagtcagaccaagtggtttacccaaggtcacacagctagtaaatggcacagttggaatttgaaccagccagtgtttcatctgctatattatgccatattatgcttgcgttctctctgaaaggacaaaactctcacatgaaacaatgaagacactcaatgtggtgttcactattaggttgaaccacatgcaggtgccatttttgtaggtcaatgtggtcaattatcagcagtgtcccatgggtcagcctaatacagcagcagccggggttcggacagggaaacctctctgcgcaggaatggtcagtagaggtttcatggcggagctgggaatggagcagggccttgaaggctctgtagactctggatggatagaaatgaggtgggagaggctgggtgcggtggctcacgtctgtaatcccagcacattgagagtgcgaggcgggcagatcacttgaggtcaggaattcaagactagcctcaccaacatggtgaaaccccgtctctactaaaaatacaaaaatttgccaggtgtggttgcgcatgcctgtaatcccagctactcaggaggctgaggcacaagaatcacttgaacacgggaggtggagtttgcagtgagctgagattgtgccagtgcacttcagcttgggcgacagagcaagactccatctcaaacaaaaaaaaaaaagagagagaaagaaatgaggctggagaggttgggtgagaggtggagtggtaaggagacagcccaaagggcaggtgctacgtggctgtcgatcagggtgtacatgtgaccttggagcaccaggaggtgattgcaggtaacgcttggggcctggagacccctcccatgcagcagacagggtgggatttggcctgcagctcgctctgctggtccccactgtgctgtttctgtaggaaacaggtgagcagattgccatcaagcagtgccggcaggagctcagcccccggaaccgagagcggtggtgcctggagatccagatcatgagaaggtgagggcctcgcgcatagggacccaagggaaagctggagcagcagcccccggtgtgtctagaaaggagagtcttgctgggtgcgtggctcacgcctgtaatcctagcactttggaaggccaaggcgggcagatcacgaggtcaggagactgagaccatcctggctaacatggtgaaaccccgtctctactaaaratacaaaaaattagccgggcatgggtgggcgcctgtagtcccagctacagagaacaccagggaagggggaagggcatgctgcacactctgctgggattactccaatgacaaggaaaccccgtctctactaaaaatacaaaaaattagccgggcatggtggcgggcgctgtagtctcagccgctcgggtggctgaggcaggagaatggcgtgaacccaggaggcggagcttgcagtgagccgagatcaagccactgcactccagcctgggcaacagagcgagactccgtctaaaaaaaagagaagagagtcttaaatatctgcccctccatcagggcgccagcctggcagtctccacggtgactctgctgcttctaaagacaccagaggaagagcagctaaagtccacactgggccttgtcaagggctgttcatcaatttcattgtattaaataagttaacacagttatcacagtgacttttcttttgtcagcaaaaaaagccttctttcctcctatatttccagttccaaggtggtatgtgaccgttctctgctgtcatgctgtcgctgacatttattcctctagtgtggagacggggctgtccatctgcctggtggctgctgaccccctagctagtgaggcgtgaggtgggctccgaaagagccagtgaggaggacaccaagcaggggctcctctgccagcctcttaaaaagaggaggtgctatttggttatgtcatggttccatttggttacatgagttccttctcagacccttctctgtgtgtccaccttggggtgatgtgtgtgcgtgaaccaacctgccgaaaattaaacagacaaaagaaaaaaaatatgaaaacaaaaagagcaggcaccaccttgtttgcctgcttgcgtgtgtgacacatcctccccatgtggagggcatgagattgaaaggtccttgtaggagcagtttggcagcacgatgaggacttgggatgtggcacgcacaaaaaactgaagttacacgcagttgtgccctcagggtctgagttctggtgctgtgagtggggctgggtgagcgccactgacccaggcattgcggttggccacccgtcctgggctctgtcttcctctgtttcaaagccctgggttatcctgggcctttgttgctgagacctggtgggggtggtggggatgggtctgggcaggagcctgggtctgctctcatcggttttcctcctcctaggctgacccaccccaatgtggtggctgcccgagatgtccctgaggggatgcagaacttggcgcccaatgacctgcccctgctggccatggagtactgccaaggaggagatctccggaaggtgaggctcccacggctgccaggtgcacagcctgtctgggcaggtgggacaccaggaagagggatggggagacctttcacttctgtcatcatcaggaagcttrgggagccccagtgactccagcagggctgctttgcctctcagatcctctgttccctgcccacctggggctggtgtgtgtgtgagtcagaggcgcttccgagaacaccagggaaggggtaagggcgtgctgcacactctgctgggattactccaatracaaggaaaactcatcacaggtctgggcgtggggaaggactgggcaagttccaaaacaaatgcttcctccctgggcatgttagggccacgttaggcctttggtgccagtgccactgctctccttattaggagggattttattctagagatgggacagcaccacacacgggggcagggagcatagcagagagggagcaggattcatgatcagagagccgggccagggctgcagacccgccccaatccatccgatccacctgacccacctggactcatctgtggggctctattctccaccttctcaccacaccacctcctcttccctagaatgttcacttctggtgggtggatggcagcccctcctggtctcaggggcagttgggtgccctcctccccattgttccctatgacagtaccacacagcctgctagtacatgttacctcattcgatttccaaaagctcacacatgggtgcacaggtatggttcccacatgatgggtggatgtcatggcccagagaggttgggcctcacacagctgtagcagcagagcctgggtcccagcccacacagacccagctgcaggccacctctccatctctgaggctgaataaggccatataacattatgaaaactggaagctctgaacaaaataatttttttttttgagacaagagtctcgctgtattgcccaggctggagtgcagtggcgtgatctcggctcactgtaacctccatctcctgggtccacgtgattctcctgcctcaccctcccgagtagctgggattataggcgcccgcccccacgcctggctaatttttgtatttttagtagaggcagggtttcgccacatcagccaggctggtctccaactcctgacttcaaatgatcacccacctcaggctcccaaagtgctgggattacaggtgtgagccactgcgcccagccaacaacaatttttattttaattgaaaaagaggtcggttgctctgcgagtgcacctcttcactccagaagggtcacaatagtgggggcgggagcccaggcgtttattcctgttcagtggccattcccagacacacttcaggtgctgttctcactgttcctccaggcccttgtgcctcttaaaaaaaaatttttttttccactttggaaagctgagacaggagaatagcttgaggccaggagtttgagaccagcctgggcaacatacmaaggccctgtctcctcaaaaaataaaaaatgaaaaattagccagatgtggtggtgtgcgcttgtggtccctactactttggaggctggggtgggaggatggcttaagcctgggaggttgaggctacggtgagctatgattgtgccactgcatgccagcctgggtgacagagcaagactcagtctcaagaaaaaagataatcctgtctcagaacaaagagacagataaataaaataaaagaaactttccatggggcttggcgtgctggagtggctctccctggagataggcatgtcctgggagtggcactcacagcaggatatgaacacagcccttggcatcacccacaatgagagatgggggaactcaacagcacttcgattttctccttatttttctaacctttgacagtcacccattactaactgcagctgtgtagagataaagccatgttgtagtcaagtggagacttctcagagggcagtctggaagtaggtgggatgtggccagattacagagggctctgaagtgaggcagaggcttttagacttggtcttttaggtggcaaagagccaacgagccagggaagaagagatcgaaagtttaacatgactggcctggcgtgggttgcaggatgattgagggggaggcaggaagggctcgcatcctaagggacccctgtccttgctgtcacccagcggggttgggggaggacactgttgcccagtgtcttgttatgtgttgtttcctttgttccctctaaaaagttcaaatctataatacacccgtgggcatggagaggcaggcttggccagcacatggggacatgtaagagtcgatgttaaaagtctacatgctgggtacgtaaacagatgagtgtttatgaatatgacgtgaattccaatggtgaggctcagatgggaagctcctctctccgccctcctcggaggccagctcccagcagcacacagagcctcttgacagtcgagggggccaggaaggcaggggattaagggcttgggcttgagtttcagattgacctggcgccgcattccagcactgccctctcacagctgtgtgagctgacaggtatccgacygtgtaacctcagtttcctcctccaacacggggattccacccgtacttactcagtggtggtggttagtattaaatgaggtcacgcagggaaggctttgctgagctaatctgtgcagagctcttccggcccctggcacgtagtaagtgctcagtaactgttctctactgttaccatcacccacatggctaggagatggcagggcggtggtcggagggtggtatccagtcatgccctcccagcctggcccgtctctaggactctcatgcacagagaattcctatttcctgtgcttagacttcagcctgccttgctcagaactgcagcagctggtgagaatcaaactttactcacctcagaggccccttgctgtgaggatgtgagagccctggggtggtcaggactgcttcctctttctcctcctcctcctcctcyggccaatccctgctagttctgcagccctggcttcctcaaaagcaggtcccctaaagaccagggcccagggtcagcactctggtcacatgggctggtaagagacatgtgtggatttccrgtggtttgtgaccaccagctctgatgctgcttttcactttcttgacagtacctgaaccagtttgagaactgctgtggtctgcgggaaggtgccatcctcaccttgctgagtgacattggtaaatcccagtcccggaattcaggccgtgtccttcagggagagtgtggtgcccctgtgagtccctgcggagccctgcaggcagacacttcaatcctttggtctctgtggaaggggaatgggagcccagggacgggggaccctggtggagtagggaggtcaacaaggagtcagccagacagatgctgaactcaaataggtttcccttccttcctgattaactcatcaggtgaattatgatgtatagggaataacagatttcctttcccattataaagctcccctccctcctttcctggaatggccggcgctggaataagttgtcattcgaatgagttttgtcccttggcagtgaatttttccgctcccacgtaggcagttctttgccaatgagaggcgtaggaaaaactgtcctttttaatcccttgggtactgttggcttccccaaatgagggcatctgcggcaccctctgagaaggccaagctggccattcatggagaagagtgacctcagcctgcagaggtcagtggagcctcctagaccctggcgctcactcaggaggggtctgagggctgggcgctaaaggtcagcacctggccccagcctggggagacagggagagggacttgctcagagctttttgttttttttaaaaaataatctccagggttgttggtgcaagttgatagttggggtctaaggtttagagttatcagaatttatctttgactctttgcctccagatttggagaatgatgccattttcatccctccactacctcaacctttcaaagctgtatacattttttctttttgtttgctcaagtttttttggaaaattgtcaaatatatagaaaagttaaaagagtagtacagcaaaactcacataccgttcccctcggttcaccagatgttaacattctccctcatttgtaaagctgtcttctctaagccagggcctggaagggttgatggtccaacactgtcttgctagtgtgggtctggtctcttcctgactgctgcttttgacagaggagaagcaagaaggaaaggaaggggaaaagtcaagcaatgacatatttaaggttaagatccaaatagtctgacacagaaaattcccatcttgctctgtgctgtgtcttcgtccctttgggtggagttcacatggaggatacgttgacattacatcagttttatttgactcgaatgagcacccagtgctggcccaagggatcccctgcacatggcccgcatgagtctcttctctgtctacctagagcataatccatcagttagaaattccacttgttttcttgacaccctgacccaaggctcacccatccatgttttgcttggaggcttacttgattgtattttttacctcagtggccagattcttcatttgttctctgttgaattgggttgaaggcaggttagcaggttggggagtattctcttgcttttcttgggtgatttttattttgtttctctttggttaaagctttgtcaagttattattttttttttggatgtttttctctcagatatttttctttcactccttaggctgttgatgactttagcaagtagttattacgaaagtcttttttttttttttttttttgagatgatggcttactctgttgcccaggctggtgtgcagtaggcgacctcagctcactgcaacctctgcctcctgggtccaagcgattctcctccatgagcctcctgagtagctgggattacaggagcacaccaccacacctggctaattgttgtatttttagtagagacagggtttcatcatgttggccaggatggtctcgaactcttgacctcaagtgatctgcccatctcagcttcccaaagtgccgagattacaggcatgagccacagcacctggccaaaagtctttaaattattggcacaagtgccgggcgcagtggctcacgcctgcaatcccagcactttggggggctgatgcgggtggatcacaaggtcaggagttcaagaccagcctgaccgagatgctgaaaccccatctctaccaaaaacacaaaaattagctgggcatggtgacgggcgcctgtaatcccagctactcgggaggctgaggcagaaaactgcttgaacccaggaggcggagaggttgcagtaagccgagattgcaccattgcactcccgcctggtgacagagtgagactccatcttgaaaaaaaaaaaaattattggcacaagtgcacataactctcagcttcctcatatggttgtttattctgcaggtgttttgctgctgatattcacagaacctctctggttacgtattcttttggtctgggtccactttgaattcagttactattgacttgtgtggtagcttttatattattttattcaaattgtgtgcatgtatgtatttaagttacacataaattagaataatgaaaacaggtgcttcttcttaagtgcttgtgtgctataggtctcctatagatagataggtaggtgaatattaaattctgtaggttgctgattctctgtctgtcttctctgtgaccctgagttggaaataatttgactttgaagtactaactagtacactacagttaaacttcttgagggcacaaacttcagtcactgcttatcttcagcatctagaatagcagtatataatcttctctataaatatttgtcaaatgagagctggatgcggtggctcacgcctgtaatcccagcactttgggaggcggaagcggacggatcacctgaggtcaggagtttgagactagcctgactaacatggagaaaccccatctgtactaaaaatactaaattaggccagacgcggtggctcacgcctataatcccagcactttgggaggccgaggtgggcagatcacgaggtccggagttcgaggccagcctggccaacatggtgaaaccccgtctctactaaacgtacaaaaaacccaaaaaactaaaaactaaattagccaggtgtggggcatgcctgtaatcccagctactcggggggctgaggcaggagaatcacttgaacccaggaggcagaggttgcagtgagccaagatcgcaccattgcactccagcctgggcaacaagagtgaaactccatctcaaaaaaaaaaaaaaattgtcaaatgaatcaaataaatcctaaaggaaattaaaataagtaaggacctagtttttttttaaaatcaaatgtccacacatcatgaacagctccaggtccaatactggctcctttgcttattagcagtgtgaccgtgggcacgttacttacacccttttattagcggtaaaatgggagcgttactcaccttgttagaattatggaataaaatgaggtgatataaataaagctcctagcacaatgctctgttcctgcagaatgtgcagtcagcaagtgttagttccttgctcatttccttcccgctctggattttgatttttggcctctccttttggaaaccttcagtgccttctttagggcatgacctgaggctggatccagggaaccacacgggtgggtgccttctgagactcccatcctggaagaggccagccttcctcagacctgttcacatctccgccaccttttgggtgcagtgcagccccggttttgtttttgaggctgctgatgagctcgtattttacttttatccctgtttctgatttgtattctaaatccattaaatttctttttgcaaggatctggtgactgagccggagttcatctaacatagctcttttgtattttggaacatttcctgagcatattttgttccagtttgttccaagtgctggcctcacatttcctttgttggagttgccactgctgttctctgccaggttgacttcagataagtggcagagccacacccttgaccgctgggtccggattcattgccttttcttctggattaaactgttggcccctactctcttctgtgccgctaacctcccagagacacccgctcagaacagtgtcaagataacagacatggataggatttttccactgaatttcaaattgcccaagaagaggctgcagagtgcctgtgagaaatgagcagatggccaggcgcggtggctcatgcctagaatctcagcactgtgggaggctgaggcagatggatcacctgaggtcaaaagtttgagaccagcctggccaacatggtgaaaccccatctctactaaaaatacaaaaattatctgggcgtggtggcgtgtgcctgtagtcccagctactcaggagactgaggcaggagaatcacttgaacccgggaggcagaggttgcagtgagccgagatcgcgccattgcactccagcctggcaacaagagcgagactctgtctcaaaaaaaaaagaaaaaagaatgagcagctgcctggcgggcacagaggtgagccccctgcatcctggccaggactcttctgccagaccatcactccatgctgataggagacctgggacccatgtggagcagctggaaatgatatggactgccacgtaatgtgaccctaaaatagctcaaggaagttatatgtgagtggactctatttaaacagtcttgctcattatcctttggaaaacattggcatgtgttttcttttgtcaagggaggctcaaaattctgggcactcaagattgcagggcaggctgtggtgctctctcctgcctgatggggtgtggctctgctgggcgggcctgggtcttatcagatcttagattggaatcagcctttcctggattctgcaggtggccagtctgctgtggtgacaccatcctgtgctccaggcctttcgggaacccacccctctgttgctgtccctgcttccttctcgagctgctcctagcaggcatccaggacttcagcgttaaagaacagagggtttcagagaaaacatttggctttggggaagagagctccattccaggaactgcacatcaggtgcactgtctagcattgtggatcttctgactggttccattgcatgcatccatctgactgaagtgtggattatagcaaaagatcatttgcacataaagctttttggaaagcataagtaaccaggttaataaatacagtaacaatgagagagaagacagcaggccctcagtcatggctccmccattttatagctctagagccttgggcgaggcatggaatgtcatggccgcagcgtccccttctttaggatgaggggtttggacctccgagtgctctctagggccccgtctccctctaacaactccatttcactgtccagaaatctggttttcaggatggtggccccgggacatctctgacatccgccagctggtggcctaactgcttcccacaggctctgtgtctcatctccactgcctgcccctgcattcgcctgtccgtccttccctccctgcccctgcgctggctgcccgctgctcctcgacgttctgtttccctggccgttcttgtggcctgtttctcaccatattgttcccagaatctggaattcaaccctgaactcatcctaaagtcatatccatgtctgccaggtctttcttccaaagtcaattccagtagaagctctggttgtcttcttcagccaggtccctcctgccatcccctttcttgtgtcatggtgccactttctgcccgctgcccaggaccaagtgtccgtgtcgaacctggtctcacagagtcagcccccgctcctgctcatagccttgcattacggaggctgcagaccgctgcttctgctgattcaatgtcagagcaaatccctgcagcgacctcctccctggcctccttaaccctgtgtgctaacctacccttctgtcttggaagggcacttccatcacagtccactcttagataaaggcccagccccttcgccgtacctttctcccactcagccctgggcatgacccacaggacccacccgccaacctctgtgtgtgacccttggaacccacccgccagcctccaggcgtgaccctcagaacccacccgccaatctctgtgtatgacccacagaacccacctgccagcctctgtgtgtgacccgcagaacccacctgccagcttctgggcatgatcctcggaacccacctgccaacctctgcacgtgacccacagaacctacccgccagcctccgtgcgtgattccaaacccacctgtcccttgctggccttgcacgcgttgccccttgtggaagctgttcttgcacctcccagagaccctgagcctgcccgtcctttgggcacagctgcagacctgcccctctgtggggattgcctggcctggggtcacggggattttcctgtgggtctttctgctgatgtcacctcatttgctcctttgacgcttggcattgccattactgctctgtgatttctgtctgtgccttggcagtgagggctgacttccgggtttggggccagttgaccagactgtgcaggaagttaggaaaaggctttgattcagtggcatgtttcccattgtgtgcagatagtggacactcaatagagcctcgctgagtgaattagtgaagttgtcgcactttcgccttggcacccaacgttactgccttgctgcctcactgattaattgaaggctattttagccaagtaacctttagccagactcagtctctctccccatgtccacagctggccttcaagtctgttttttttgggaagcccagtgacattgaagtggctggcacagtaggacccaggcagtaggttttactgagggaacggacatcctgttgcctttctcactcagtgatgacttggattaccagccagttgacaaccaaccatctttgtacccttctaacctctatctcagcctyttggaccatttctctttccacctgttctctatggaatgtagctcaaacaaaaatgttctgaagggaacttagtcatccctctaaacttgtgatagatagagattcatggacccacccttataaaactgctttcttctcggaagtcttgctgctcttatctgttccccagtttgtggtttgtcatctgaaaaaaatacatagggctgtggggctgtgattcggagctgtgattcatcaataagacccacaggattgtcagcgttcttcagttatgtgtttgtgccttcctcatgagccagggaaaggctggggttaccaccrgggcacggcttctgaggagggtgagagaaggaggctgttatcttcctatggcaagtctgccatgtggacccattctgtggaaatgtactgtgtcatttatcttagtttttgtgtttttcctgcatacactgcactgtgtcgtttattttagtttttgcatttttctagaggcagggtcttgctctgttgtccgggctagagtgcagtggcacgatcatgtttcaccgcagccttgaattcctgggctcaagtgatcctctcacctcagtctcccacgtagctgggatgaaggcatgcgccaccatgcctggctaattaaaatttttttttttgtagagacagggtcttgctatattgcccaggctggtctcaaactcttggcctcaagggatcctcctacctcggcctccgaaagtgctgggattacaggtgtgagccaccatgcctggcctcactgtgtagttgtgaatagcttaatagtttgcaatgtggtgcttctcacagctcttctctgtaatgggaacatgaaaaattacctggtacagttttatgctttgtggtgtggcttttaatttttataaacatgtcttactgctattgccagggatttagatttttaataaacttccagathcaacagtrtttttcttcatctcaatgtctcatttttcatcaaatttaaacaaagttagattctctgggcttgaaacaattttgattcatttcactttagctctgaagtactgttttgtaaaatgtagcacagtgatactgaaccaagctttttgaaagcttattctctgcagggtacatttaagaggacttgcctatcagaatttttacatttcagtcccagaaactatgtgtaacaatacctgttggattctttaaatctggactttattaagttgacagaggtattgaagaatagatgaccaccccraaatgaggaataaagtttgttttgtacagttgtttaagcataaaaatagacagatattaatagtagtcagagtattcagttaccaacctcttgtccctcctcactgaagatctggtgacaactctaatccacgtggcgtagagagcggtgcctttggtctaatccgaatgctcctcctcttcactggggggttctggggacatctcacctggttgtgccctgggttttgccctgagatgttagcctccagctctgggggccttgtctcagtctgggcatgtgtacttgctcaaattacagtatctcaacttccatatattctgctttggaaaaaactaacctacacttttatgtattacatcctgatactctccagcagtctgtcatataccaaaacaggtcttttgtgaacctatcagttaacagacactttgagttattgcatggccttgctctctgccagccagtagttcatattcaacagcagtgccatccctgtctgcaaggctgtgttagtgcagctattttttatacttcatttaatttattatgctttttcatttgctttgatttttaataaaagtaaaacaaaaataaaagtgctgatgagaagcattggtcttgaaacattaacacaattgagaacaagatgaaatataattttttaggcacatggaaagcagcgagtctttcacctcatctggacattaattggacctaagctgatctactctgtcacttaggaaggaaatgaaaagtaaggaacagtatgatatgttggaaccacatggtcgaaggctggacttaaaagagcagatgcaaggagagatctggcaccacagatagagcatccctaatcccaaagtccaaaatctaaagggctgtaaaatctgaaggtttttgtacactgacatgatgccagaagtggaaaattccacacttaagtacttaacacattgttccatgcacaaaattattaagactattgtataaaattaccatcagactataaaatcatttataaaaattcagttgtttcatataaggtatatatgaaacaaatgaattttgtgtttaagcttgggttcattaggaatatgccagtattccaaaatccaaaaaaaaaaaaactgatcccaagcattttggataagagatactcatcatgtatagcttaatgttctgagctggaactcctttaataaggtggaagtcagttgttcagctctcagtttgactcttaaatatgttttcagcaaatgttcagcttagagtctttgcagagaatgtttgcttactcagtttctgtggaaggcttttccgttaccctgcacagagggccgtacccatgacagcagataggatcgctgcctgggcctcaggggtcttcccctccccggcttgccgagagggagagagagagagagagagagagagagagaatgagagagagagagagagagagagagaatgagagagagagagagaggagagagaatgagagagagaatgagagagaaacagagagaatgagaatggtggtggcggcgacggcatacagagggttcattgttaaacctctgaatgttactgcttttgactttttaagttttaaacaagaaacaggtcataccattaactatccctctgagtcagaaaatatagacccaagagttgcctgttctaatgtggcactaccataatttgttctaacatttcctaatgactgtctgtttctaattatttcattcaagatatgcagtaagtatccttgggctaccagtgaagtgataccatttgtatctcttcttctgtgctttctcaccacttgacattctttgcccatttttctttttctttttctttttttttttaggtagagtcttactctgtcacccaggttggagtgcagtggccatgatctcggctcactgcaacctctgcctcctgggttcaagcaattctcctgcctcagcctcccgagtagctgggattacaggggcatgccaccacacccagctaatttttttgtatttttagtagatacagggtctcaccatgttggccaagctggtcttgaactcctgacctcaggtgattcgcccacgttggcctcccaaagtgttgggattacaggcgtgagccaccgcgcccagccccatttttcttctgcattgctttcttattgatttataagagctttttatctattaggtatctttactctttggtgtatgtgttgtagatattgtttccccacctctcttatcttttggctttgtttatagtatcttttgccataaactttgaaaaccttttaatgttatttgcactgttctatttataccatgtgactttcctgcatacactgctctttttgctacatgtatcccatggtgttttggagtttttgttgctaatgtgaatgggattttttttcctttccactgcaactggatatagctaacatagagaaaagctattgacttgtgtattcttgttcgtttccagacaactggctaaattttatccagtgtttagtctgttgagctctctaggctacatctccaaatctatctccatctctagtcatagcatctccaaataaaaataattttatctcatttcagtactatttatttcatttctttcttttatagtgcagtgaactagatgtctgtcaaagttattcaccctctcttgagggtaaaatcatgtccttcttgccatctgagctgcaggcgggtgcctcctcatgtgacatcatcacgttgcctcctcacagcagaagctcttggtatcaaatgcttccgtagccagtgttgtgcagtctgctttcttccaactagattctgagctctttaaagttggggatcatgccccttattttatgtccctcacagaacctcccagagaactgggcatgtagtaagtctgtgtagggctgtctgtatgtgtgggaggtgtccctgttctcctcttctgcctccccgctgcttcctggaagccagttctgacctcttgggactgtcgatcatatgaccataggactctgtccccaagggcccttcctccttgcccaccctatagaatttagatttttgagcctctagaccaaagaaacttcccttctcaaaactttattggcgtcagcatcacctggagagtttgttaacacagatcgtggggtcatccccagagacttgaatccagaggtctcaggtggagcccgagaatttcacattttgaacaagcttgtttgctgctggtccaggtagtatagtttgagaagcactgctctaggctgcagttggtgacctcatggatgcaaggcaaagagtgctttgcgcaagtaagccagattcctgtggaagtttaagcctcacgtagcagggcccctgccctccaccctgaggtattgcgctacaagtcagagtatgtttcaggggcatgcggcatttatcttttgcaggataggagattctgtcatgaaaagcattttttaggcytaagaaaaactcacccccctcttcctcagcctctgcgcttagataccttcatgaaaacagaatcatccatcgggatctaaagccagaaaacatcgtcctgcagcaaggagaacagagggtaagtgacctcctgggactgggaaagcctcaggtgggcgtgccgggaagtggcctgggaggaaaggagcacactctgcatatttgtgtgtatttgcatttccttgcctgtgctttgattctctgggaatgctgtttgatttgaaacaaaattgagcaaaaaagttgttgcagattgaggcaagtttaaatggattacattgttagttgctcaagttgcaggaatctgataaggaaaatratgtttgccttcctacctccacccctagcctctgggactagcgcttcttggaagtcgactttttgttttccatttgctttaagagcctcgcctctcgactctaaatggaaaccagtggtcagttggttgtggatgtggctgggaagaggcactgggagctggcctctgctgccaagcctggtccagcctatagtttccccagagctctttgtggcctcctcagtggccacccggctcagacgtggtgttgactgccccacaagcttgacattgtggtctttacccacccactctatgtgttcagctggggtggtgagcacaggctcagctgagtggaatacagtgaatgagttcttagatcacctaatcccttcccatacagctgcccttagcacctaggcctggcctgtgactaccacagggctcgcccttgttccagttcaccctcactcctgtcagtggtgctcagatttgagaactgagggcatttactgagaagaggctggcccggtccttcctgtttcaagtctgggtttagctgtcttgarggctgstgcctgttctgttcattcagcttccctctgatgatgcgtggcagastgtgggaggacacgtgcctagcatttttacaatatrccttttcttttagccctgaatctaccgtgtcgagggcattcttttgtgtatctggtggctcttaggagtttgggatctaatagtacctgggaattcagaaatacctctgctctaacaccaggcagtcagaatcctcgtagaaggacattgtgttcttataaccctcagctttctccttccttttgttttagttratacacaaaattattgacctaggatatgccaaggagctggatcagggcagtctttgcacatcattcgtggggaccctgcagtacctggtaagaagtgggccttgcctgtttgcctgtcagctcctccctgctgctgcatttgtggggctcctgtcctgccttgctcccagcacctsagtcccaccggctctctgaatgttttggagatgcatgaggtcacacccataacctggtcgagtcagcattttttgccaccagatgccctgtggagggatgtggtcgtcttctctgatgtccggagggctctgctcatgcgccttgcaccatcccctagcctctctgtgcttcagtgtcttctctgaaaggaaagggttttaaacagatccatgctggtctygagcggtcctcccacctcagcctcctgagcagctaggactacaggcaggagccactgagcctggccgaggccacactttccatgaggtatttcaggggccactgagtaggggtcagagctctgagctccccaccctttgtttacgttatttggtctgaatattaggtttctgtttgagtcactcattcattcaagcatattgatggagtgtagtctgtgtcaggcactgtgctcagggctggtgatgcagtggggaaaaaagacaagcccttttcggccttcagagcttagggtttagcaggaaagcaagcattactgtgatgcttacacagataactaagaaattacagttgtggtgagtgttacaaagcaagagtgcagggtgttgcaagaatatatattgggtggcctcagcctggtctgggacttgaagggtaaggaggtgaaaagggctggaggtgggggacggcagggggaattccgtgcaaagggatcacacacaggaagacctgcaggtgtggctggaaccgagcacaaaagggaaagagagtcttgagttgaagctgagaacaaggtagagcacagattatgaagggccttcagggctgggctaaagttctagactttatcttaaaacctctgcagagattgatgggttttaagtgggagaaggagcaactctttggaaagcccactcctgacactgtgtggagaaggaatcacactgaacaggagggaagagtgggtgaggtaggggcagtgaagatgtagagggcaattagattccaggagggcttagcacaaatgcccagcaagacttgtcataggttgcttgatgatggcagtagccaccacaattgggagtgactcaaggagtctgcggctttcagagtgggtctcacagagggctgtgattcaggcgcctgtgtccatatggcatgtgatttggtagatccttctggagtcctcctcagctcagcagcagtcgagcaagggggaccccatgctctaaccaggagctgagtcaagtcatgtactcacatgagctaaaacgtctgcccataaccagacatagaggttgacctacccatcccggaatgtcttctcttggtttggtctcccgggcccttccttaagcttcacatttccaaccagaccatgcaccaccctgtctctgtgcttttgcttgccccagtcatttctgtctccacccacctgctaagcccagtctgcacccccagcaccccgtgctgccgccccttcttcggtcaccccagcgctctctgcctcagcagcagccatgcatcacactttccctgcctgtttctaaatatcctggccctttctgcaaccacatggtacctggttcaggggttcaaccagcacttaatgcgtgtatttggtgtggacagcctggcatcattttcctttaacatttgtagcctctcttcccatttctacacagtgcccacgactgtgtcctgccttaagctagttttcaataagcgcctgaaatgctgcaacccttttttttttttccttttttctttctttctttcttttttttttttagacagagtctcactctgttgcccaggctggagtgcagtggcatgatcttggctcactgcaacctccacttcccaggttcaagcgattcttgtgcctcagcctcctgaatagctgggactaaaggtgcacaccaccatgcccagctaatttttgtatttttagtagagacggggtttcaccatgttggccaggctggtctcaaactcctgacctcaagtaatgcgcctacctcggcctcccaaagtgctgggattacacgtgtgagccactgcgtccagcctgcaaccctcagttttaaaggagagaagttaaagcctagcgatgggtgtgtgatgtactctggccctgaatctttagcccctccatcagtacctactggagtgagtgggacatagaaaggtcttagaaatggtagcatgatatacccgctaaacatgcctggggtgccctcctcgccctgcatgcatgtgccagtgccctctaggatgaagccaggggtgaaagcagatgggctggccgccccctcctgccgtggtccccccagagaggagcagctcaggtgtaccccctcctgttgctgcaggccccagagctactggagcagcagaagtacacagtgaccgtcgactactggagcttcggcaccctggcctttgagtgcatcacgggcttccggcccttcctccccaactggcagcccgtgcagtggtgagtgggcccggggcacctggatggaggagggagcctgtctgttcctttctcttcacgtaccctgtttccctggcgccccatcaccgggcctgggagatctgtgttgtttctcttccgagaggaaggcctgtcaggacctagcacgagtaggggagtggtctgtgctccaaggacctgttaatagatagagtagctgttaagtcttcatgtggattctgagccttcacatctttaaatacaatgctgtgtcagtgtcatctgctctgtgttcagaagtaagactattgtatgaatatacgcacttacactgagaatgctgtgtgttagtaaacaaataaaacacgtgtacacatgacaagtcaggaggaaatatgtgaaaatttgttgttgacaaatgttactacaacctgaatataaatttttgtttttaaagcgtaagaatgtggccgggtacagtggctcactcctgtaatcccagcactttgggaggccgaggcaggtggatcagttgaggccagcagttccagaccagcctggccaacatggcaaaaccctgtctctactaaaaaccctagccaggtgtggtggcgggcgcctgtaatcccagctactcggaaggctgaggtgggagaattgcttaaacccaggaggcagaggtcgcatcactgcaatccagcctgggcgacagagtgagactctgtctcaaaacaaaaaaagtttaaaaaaaaaaaaaacaacagctgagcataaagcataagaatgtagctgaaattgtgaacctaataaattacacaaaaatttttccagtaaaaattaaaggatatgatgaagatttgtagaattaccctgtattctttagcttttgttttactgattaaagaaataatgcattgtgcaggatatgtttatataaaagttaattatcaccaccaaaaatggtatgtgaggtaatgtatatggtaattagctcaatgtagccatcccacaatgtgtacatcatgttgtacaggataaatatagaccatttttatttgtcagtttaaatcaagaactgggggcagaaaagaaataaaagttaattattactgaaagccataatttaaaaatgaatattcccccaaatcagttagatttcatttaggattgttccttgagaggccacacactagtttaaatgatgctactctgctcaaaatttacttacttcaagttttattttttttggaaccgtaataagttcatgtggctcaaatttccagaagaataagggagtatgcagtgaagtcataccagcctcccaggccctcatttacctccccacaggcacctgctgtcttccaagaatgttttcatatcttccaaggtgttcgtatcttccaggggtgtttgctacgtgttccagtaaattggcatatatttgtttatttgtacattgatgtttcccctcttttttatcccaatggtagcattatctgaacacggtcctgcacatgctttcaagcttttcacaccatgagaatttctttttgagccaatttatctgcaacacaaaaaattattattttgaacttaaatagtactgcatagtttaattaccccctcatttttgccagattaactttgtttcatttttgtgttttggaaaatatggaaacagtaaaaaagcaggaatcaactgtcatcccataattggaaaacaatcactatgaacagttgtgtgtctccaggctcttcagcgttatatttttgtactttttaaacaaaaataggttactataatcttcatacaacgtgcctttcaaactagatatcaaaaatgctgtatgtttttccttattatttgtaatgtctgttatttcactgaatggctgtgctgtggttcatttaacttatcccccgtggttggaaggacgttgataatttttacttcttaaaataacaccaagaataacatccttgtagggaaattcttgcacacagttgtttccctaggataatacctagaaagggaaataacagattaaagagtttgcacgttgtaaaggtttttgatgcatattagttagcaaactgctcaccaggaaggtcatataaatacacgtctccacctggagtgtggacactgcccctttcaccacatccttgccaacactggctattgtcaccttctggaagtaatgaaaacaaaacatgaatgttttcagaggacaagtgtctacatcttgagagtatttgtttataagaataaagtgggccaggcgtggtggctcatgcctgtaatcccagcagtttgggaggccaagatgggcggatcacctgaggtcgagtttgaggccagcctggccaacatgatgaaaccccatctctgctaaaaatacaaaaattagctgggcatggtggcacacgcctgtaatcccagctacttgggaggctgaaacaggagaatcgctggaacccaggaggcagaggttgtggtgagccaagattgcgctgttgcacttcagtctgggcaacagagcaagactccatcttaccaaaaaaaaaaaaaaagaaaaaagaaaagaaaaaaagaataaagtgtatcctttgaaatcaattccagaaaagtggtcttaggtgatggcagtctgttcaattccacgtttacctcccagtgagggaggtgtctgccctgagttttgagaagtggcaaagtatgccccactatggtgacttattttaaaacaggcattgctcctttagctacataggttctggaatattgaggaatttgttcattaatttatagtcacactttatagtatacgcattataaaaatagctttaaattgcatgtacatctatagtgggtttttttgtttttgtttttgttttttgagacagaatctcgcttttttgcccaggctggagtgtagtggcgcgatcgcggctcactgcaagctccgcctcccgggttcatgccattctcctgcctcagcctcccgagtagctgggactacaggcgcccgccaccacgcctggctaattttttgtatttttagtagagatggggtttcaccgtgttagccaggatggtctcgatctcctgacctcgtgaactgcccgcctcggcctcccaaagtgctgggattacaggcgtgagccaccgcgcccggctgtagtggttttaactaaaggaattattgcatttcttcaggtcacttgttgagcatgtctcttatttatgacaagatgagttaaaatccattagaactagaagaacaggtgctttttgaaaatacattcctaatggcccagcgtcttcataggaaatctgttgtctgcagagccatcttcctagagcttccctcatcagtgctggaggaccaggtggccagtttcaagtagatttctctgaaacccaataaggagctgttttgtggactatctagtttttaatgctttgggaaacttttaaaaaatttcactatcttatctcagatggcaggtaaatagtaatttccagacaaatgcaatttgggctttacaattctattataaagccactttgaaatatattttaggacaagcccaagcaataagcatcttattttgggtccttttctaatttcccatcaacagcctaagttttctagcagaggcttattccacacttacataattagaaagtcttggagcccccgacttagagctgtcagagtttcagcccaagctataaagcaccagcctctgccacgcaccggctcttctagctttccagtgccagtgtgctcccgataggccggttcaccacttgccaatgagaattgtttggagcaaagcattttttatttgaatttcctagatgttttgaggaaaaaccgtagttggacattcagacagaatagaaagaacaccagacattgggtttgagcccctgattctgctactctgttgtgtgaccttggacaaatcatttgatcatcatttcctttagtccaaattgggggactaaaaataatgtctgccacatgggcctgtcacggcaataagtgaataaatgatctgtgtcagagtacttggttatctatgaagtattattcaaatttactcttcttattaccaagatttgaagccatttgtatgtagattatttttactggccgggcactgtggcttacccctataatcctagcactctgtgaggccaaagtgagcgaattgcttgagtccaggagtttcagactagcctaggcaacatggtaaaaccccgtctctacaaaaaatacaaaaatttgctgggtgtggtggcgcacaccagtagtcccagctactcaggaggctgaggagggaggattgcttgagcctacaaggtcgaggctgcagtaagttatgattgtgccactgcattccagcctgggcgacagaaaaaaaaaatttttttaccttcagatactacttcacataccccaagaagttccctaagttgggaaatgtataagttcatttatccttagtatttagctgtgtacatttagagggaagtatctatgtgtgtgcgtaggttttgcatattttatgtaaatgtcgtatgcatgctgtaatctaggtttggaagtcctaattttaacctctgtcaaaacacaagagtgtgtaatagatgaaatagaaggtagagcaagggagaaggaaaagccaaggatgagataaggaggcagtggtactatctgcagaactctgggcacaagatggtcagtgactctgctaaaggttgctcttcaaaaactcatccaggcagtcctgaccagtcttaaactctcaaagaatctgcctgactcgatgtgaatgaactgactgctattccaaaagactggggctataagtctcctgtatagttgtaaacttatattacaaatgtaaaatggctcttgagtgctaagtgtcgtagggatatgtatgactgtatatttcattgacatcccagtcaacaattgactgcatagatgacagtggtctcatgagattataatactgtatttttactgtaccttttctgggtttagatatgtttagrtacaccaatacttaccattgtgttaccctggcctacagtattcagtaccggagcatgctgtacaggtttgtagcctaggagcaatagggtgtacgatacagcctaggtctgtagtaggctaaaccatctaggtttgtgttatgttcacacaaggactaaaatcacctaatgacgaatttcttagaatgtgtccccgtcatagcaacgtgtgactgcacctaacaagattcatatttgcaggcattcaaaagtgcggcagaagagtgaggtggacattgttgttagcgaagacttgaatggaacggtgaagttttcaagctctttaccctaccccaataatcttaacaggtaaggcacagcggcattacacgaatacatatctttcttgctttttttagaaatacaagtcttggctgggcgtggtggctcacacctgtaatcctaacagtttgggaggctgaggcaggtggatcacctgaggtcaggagttcaagaccagcctggccaacatggtgaaaccccgtctctactaaaaatgcaaaaattagccaggagtggtagcacgcacctgtaatcccagctactcaggaggctaaggcaggagaatcacttgaacccgggaggcaaaggttgcagtgagctgagatcgtgccactgtactgcagcctgggagacagagtgagactccatctcaaaaaaaaaaaaaaagaaraaagaaattcaagtctgaagtgacatctgataacttttaaacaggctatcaggatatcgtcctgtgactaagaaattaacatagtccttcttaatcttaaatctggaatgggttttcctcccttatctccctagaaatcatctcttttctaagttcacataacaatttatctatacctcttattacccttaatagcctctaccttgtatcacattcggttttgcatagggtttatctctgattcaacagcagtccttttaagggtagggaattataccttatttctctttccacccctcatgtggcccaattctgtgtcacagtcaacaaataaatctttgtcatttgaatggcattacaatccagtctcagagccagaatctaaacaattaataatattgtataattgtacagaattgggtaacagtgcaaaagaaagctacaaggcagtcacacataattgagtgacatggataatgattaccatatttagagggtggaagagatgattggatggattagtgctatatggaatgacgtgggataagctagaactttttggaagggtctagacagatgtacaggacatggatagatgaagagaaaggaggaaggaaattctaaggggaaagattgaggtgagcaaggcacgtttgggaggtggtgagtagctgtgttggcctcagggaagggtttgagtgctcacaggaggcaggctctgcagggccaggggaaggagtttggagtttgtcatgtgaaccgctatatctggcagcatgggatctagattctgtaggggtcacctaagctaggatgtgcctataaagtgtatttttaaaacctcatgggttattctttttccccttctttcttcctttctttttaagacagagtctccctcttgtcacccaggctagagtgcagtgtggcacagtcttggctcactgcaatctctgcctcccaagttcaagggattctcccgtctcagcctcccgagtagctgggattacaggtgtgcatcaccacgcctggctaatttttgtgtttttagtagagatggggtttcaccatgttggccaggctggtctcaaactcctgacctcaagtgatccacctgctttggcctcccaaagtgctgggattacaggcatgagccactgtgcccggctctcatgggtcattcttatgcagccatttggaggtcagcaatctctgatttgggggtattttagaattcaggagagaggtgtgaacacctgaataattgattggaaatgtttatactgtttctgataaacccattttcattttcaatcaccgtctactggctgccgtctgtgtgtatactgggagacgcacactgtakcccaacattggctggaagtgtctcctcacacactatgctcctctccacagtgtcctggctgagcgactggagaagtggctgcaactgatgctgatgtggcacccccgacagaggggcacggatcccacgtatgggcccaatggctgcttcaaggccctggatgacatcttaaacttaaaggtgagtgtggagccaagttagccctgaggcaaaagctggggtccccagtggaacatgcagttcttaggacagagcaggggatggggccagctgacctagtgaggaaatttaggctcctgcatcagtctttctgcataagtaaagaaaggacagttgtgctaattgacattggctatgaggtcatagccacagacaggattatgaaagatgcaaatatgcraaacatggcacatgacctccctccctcaagctaggcccttgctttgtgtggttgggaaatgttgggagtagcagagagaggacctaggcaaatagatgggcatttccttgaagaaatcggttttccagtaacatctgggttgtgttgcagctggttcatatcttgaacatggtcacgggcaccatccacacctaccctgtgacagaggatgagagtctgcagagcttgaaggccagaatccaacaggacacgggcatcccagaggaggaccaggagctgctgcaggaagcgggcctggcgttgatccccgataagcctgccactcagtgtatttcagacggcaaggtgagccctggcttcgtacacaccatcctgtttaccttggctgtgcctcctgggaaactcaacacactttcagatttcaattctgctttgtcatgtagtctgttaatcacacagtgcggatacctggctggtttttaagttggagtatggtgtcctctgtgtggcctgataggaaacacaaatctccttgctggacttgttacttccaaaccctccaagaccggtctcttgcctttattgcaaaaaatgatgctataacactcgaatctctcaagttgcctgcttggccctcttccaagtgtactaaaaaaaaaaaaaaaaaaggatgctgcactttcttgagtcaactgaaagtatttatgatggcctctgtgtacagaactgggttaggcacctgtgttaactatagctgtgtaagacatgacctctgctcaaaaagaccttctcagctgacttgtggagctaaagttatcatatgagaaataatcattgcatagggaagtatatagtgaatttctgaacttcccagggaagacagagagtaaaatagaatgtaatacgtttgtaaataaagagtgtgttcagacagtaagtgtggctggaaacgttaaacacttcatggatgcttcctrcttgctggctgaagatgatgctcttgctgaacagtggggaaagctgtggaacttcttcattatcagttagaaaagagagggttggatccacaagattcattttgtccttgtccctttgcagttaaatgagggccacacattggacatggatcttgtttttctctttgacaacagtaaaatcacctatgagactcagatctccccacggccccaacctgaaagtgtcagctgtatccgtaagaatttgttwtgttttgtttttctaaataatccgttataatatgtgggacaaggcagggaagggagactggactaaggaagggggagccacgtaaaggaaattaatatcgccagtcctcagggcagccttccttatttaggacatgcaaggagtagccaggcaagagagagtacaggaaaccattagttaatttcaacctcctaggacgggcgtggtggctcacacctgtaatcccagcactttgggaggctgaggcaggaggatcacttgagcccaggagttcaagaccagcctgggtaatatagtaagctcgcaagtctactaaaaatttagaaattagccagatgtggtggtgcatgcctgtagtccagctattcaggaggctgaggcagaaggatcacttgagcctgagagttcaaggctgcagtgagtcatgatcacccccactgcatgccagcctgggtgacaagagcgagaccttgtctcaaaaaaaaaaaaaaaattctattgaaaatatatggccctatatacatatgtgtccaatggttcgtaaagtgttccttcaaatcaacagctacttattgaccactggtacatgctgttggtacaaatacatgtatgtgacagtaaccaggcataacaccctccaaagttacatgatcctatagtaggtacaaaacgtgaaagtgccagtagtgtcgaaggcaggatatggttaattgtaggagagttattgtggttattctttgacaattgcttgtgtctctgtctccagttcaagagcccaagaggaatctcgccttcttccagctgaggaaggtgtggggccaggtctggcacagcatccagaccctgaaggaagattgcaaccggctgcagcagggacagcgagccgccatgtagcgtgccaggctttttttttaaacttaatttatttaaaattccttggtggctttgsccacagggaggtggttgaggcagggacccagaagcaaccgttatgagcaacaaaaggaagacactggtttggatggacgggaagcggttgggtgggctggactgacggaggcccctttagacctggcgaggtgagtgtggttggcacagggtgaggagtgtggaactgaagctgggctggccaagctgtggctggtttgggaacccagaggagctcactaccatgtggattagcaaaactcccctgaccgtgctgctggggacttacggactctttcctcattgtgactcgtttgccaacattattggccttttgtgtcttcctttgcctgatgtcaagtttagtgcagaacctcaggcattgctgagggctaggaaattgtccttgggttataagtggctgctataataatagtgatgatgataataattatagcagggacctcccttgacatttgagggggttttgttattgtacaggaaatggaatttggatcccagagatgctccaagactgttccttgtggtccctgcaggatgaatctcctccgaaacaacagctgcctctccaaaatgaagaattccatggcttccatgtctcagcagctcaaggccaagttggatttcttcaaaaccagcatccagattgacctggagaagtacagcgagcaaaccgagtttgggatcagtgagtgtgcactttgcaatgagtttaaagacaccatttttttttctttttctctttctaaggtttcttttgtcctattataattgagttgcttatttctgtttcagttttgtggtgtttttattttgttttgttttgtttttccttctcaattttttttcagcatcagataaactgctgctggcctggagggaaatggagcaggctgtggagctctgtgggcrggtaggagactcattttgggtttcggaacttaccaagggggtgagattttgtgctcccacttttcrctttctcatcaaacactgggtcgatctctgtcaaaaatcaggtgttcctcaccatgctttgagcttaactggaccagctgaaaagaggccaagagagtagccagtgaagggagcccctctgtggccagatgcaagagctgcatgaatggacagagatggtccaggtttaaataagaagcaagggttaggttcccttggggaaaagccaagaccatttcctgttargaagggcattggattgatgatcaacactccctcttgtcgaaggtttttgactaattttgttgggatgctaaatccataggaaataaaaggtctaggcagaaagtctcagggcagcgtaaatcagatgtcaccaaaaaaagttaattatgaaggcaaaggaaatacatgtgacttaatgaacctcacacaaactgaaggttgaagtcaggctccggggctttttcctggacttatcctctgttttcccctgtgtacttgggcaaggatcttcacctgtgtcttagtatcgatttttatgaatcagtactgatggagtatatgtgtgtttaatggtgaatattaaccatagaagggctgagtgctcctccccatcttgggactcataatctgtgaaataaaacagtctgggcctccctgcccgggtagcatcaggatagacagatgaagagaagagaaagtaatgtgtcttgggcatcttctgtatgccaggcaccatgccagaggctttaagtacttcatcttacttgactcctcagatggccctgttagaagcctattttatgcaaaaggaaactgtagctgggggtaagtaacttgccaaggggtcacacagctagaaagcggtggaccctagatgcaggcgcagccattcagaccccacagtccacattcctttgagccagtccattgagggtcctcagggaatgtggcgggtcccctggtctcgctcccccgcagatcttgcatctcagcatgcgcctaccacatcagttgacattagcacagcttttccattaggagaacgaagtgaaactcctggtagaacggatgatggctctgcagaccgacattgtggacttacagaggagccccatgggccggaagcaggggggaacgctggacgacctgtgagtactggctggggggcccctctgtgcccagcacacacagacagccctggagcttcggtgtgtgtgtcaagggcaccctcagtggctgtgcgggaccattctctagagcatgcttccctgtggggtcacttccagcaaatcatyactgagcttcagtttccaaatctgttcagtgacaagaaaaacagtcttaagtcacgaagttgtaaggatgaattcagataatgcatttgagacgcaggccataatctgtaaaggctgtaaaatgcaagcagcctctacccctgtagcagactcccctgatttgttccacccaccctgactcaggcatagctcagagcagaaagtaaaacagagaaggaagaacctgatgaggcttaggagtttggacctggaaactattcgtttgagtctttgtcaggtatttggcattggctccatgaggggcggaggggtctaggcagatcactcctacctgaaggagatcacatgtgctcctggcgtacagatggagggaaccaggcaggccgcttgagggctgtgtcaccgtgagctcagcagtgttccctgattctctcactaggattcttaggacaggagctccaaatgtcagaactttgattctgtattttctctaattaaccctttattctcctctagttcttttatttgtatttgtattatttttttaagagacagggtcttgccctgttgccaatgctggagtgcagtggcacaatcatagctcactgcagcctcgacctcccaggcttatgcagtcctcccatctcagcctcccaagtaaccgggactacaggcgcatgccaccatgctcagctaatttaaaaaaaaaatgtttttggctgggcacagtggatcacatctgtaatcccagcaccttgggatgccaaggcaagaagattgcttgtgagcccagaagttcgagaccagcctgggcaacatggtgaaactctacctctaccaaaaaaatgtaaaaattagccatatttgacctcaagtctagacagaacttctttgtatattttagagaggagcaagcaagggagctgtacaggagactaagggaaaaacctcgaggtaagtggggttctgtgtctgccttgggcttctccttatctcatttatggggcatcactactctctgctggcttccttgaggaactatgctaccctccctctctccagaccagcgaactgagggtgacagtcaggaaatggtacggctgctgcttcaggcaattcagagcttcgagaagaaagtgcgagtgatctatacgcagctcaggtatgagccccgaccttcctgctctggaggaaggactgggagatgcaggtatgaggtcaccttcctccctcctctctgattcgctggacctcatgaagagagtttctgcagctgctgactggatgcacagctgccacaggttctgctttctccagcccaaatgccattagtttgccatgtttattctttgcagtaaaactgtggtttgcaagcagaaggcgctggaactgttgcccaaggtggaagaggtggtgagcttaatgaatgaggatgagaagactgttgtccggctgcaggagaagcggcagaaggagctctggaatctcctgaagattgcttgtgtgagtgagtgctgtggtcccgggcccttggcctagcagcctcctgtgcctttccacctctgtgcactgccgccatcccacacgggacaccacagagccaccagcagcccactcagctgctgctcgggcttcacgtcgctgttctttgacttggtgtaagcggggaggtcagaggaagggcctgtgctaattgttttcattcatctgtgtattactttcgtgtggctactgtaaagattagcacaaactgaggggctaaaacaacagaaatttgggctaggcatggtgactcatgcctgtaacgccagcaatttggggaggctgaggtgggaggattgcttgagcccaggagttcaagactgcagtgagctgtgatcatgccactgcactccaacctgggcagcagagctgtctctactaaaaacaaaaacaaatgtgttatctgagctctagagcccaggagttgaaagtcccgtgtcagcagggctgagctccctctgagggctcttggggagggactgtccttgcttcttccagctcctggtggttccaggcgttctttggtgtgtgactccagtctctgtctctgtcttcatgggacccctgtgtcccttatctgggtgactcttacaagaacacttgtcattggatttgagtcccacccaagtagtccagggtgatgtcatctcaggttctctaaagacgctttctccaagtacggtcacactcacaggctccaggagttgggatgtgggcatatccttcttagggccaccaattcagcccaccgtcatgcacggcagtgcaacttggttgaccatcgtctgcgtctgcactgccctcagtgcagtaagccacgctttctgtgcacaccgtcttaacgtagctgtgagtccatgggatgccacatggtggggaaatgggaaacaaaacagccaagaactgagacgggcaggcctggccgtgttgtgggagccagagctgttgggactgcaagccccattgtgaaaggctgcagagaaggtgacatggatgaaagagtgatttaggtgtcagtttcccttaagagcaaagggaaggagagagggagatggttgctcatggtggaagcaggagatggtgcattaggagattctcattgtcaaaggcagaggggacaatccacacacagtgcagagaacagaggggctggggtcgcatgccagagcactgagcatgccttgggagcgtgattgacacatcctcctgtaagaagagaggaacgggagaaaacaggatgacgaggtagagaggatctgaagaggagaggraggtgcaggtatgcgcaggtgatagcctgatgtgccatctacatccattgagcatttactgaatgctaactatatgcccagcaagacacacaggtgagaaggcatggcacctgttcccaggagggcctgatccttcaaggggcacagacagaggcatgagtgagagccgttcagggcaggaagggctaggaagcagctccaggaggcatgagctgcagtttctgtgcacagggggagctccagcttgtcttagaggagagggagcaacaagaaggttcacaaggagctgttccagctgaagagtgaggatgttccaggacagagacactgctttatcaaaggcagagagcctggggagtcagtgtgttctgagtggggacaggctggtgtgtgtggggaaggccacaatggaggatgaagctgctgaggtaggcaagggtgagcttacgtgggccacgcttcattttctttttttttcgagacaaagtctcgctctgtcccttaggctgaagtgcagctgctcaatctcagttcactgcaacctccacctcccgggttcaagtgattctcctgcctcagcctcccaagtagctgggactataggctcatgcccccacacctggctaatttttgtatttttagtggagatggggtttcaccatgttggccaggctggtctcgaactggcctcaagagatctaccccccttggcctcccaaagtgctgggattacaggcatgagccaccgcgcctggcctatgtccattttcaaagcacacaggacacatggcagtatctgtcttttcccttgatattaaaggaacttgagtgtagggatatgatcacatctgggatttggggaagtccctctccaggcagctggaggatctgagtccctggccaacctcagcactgagacgggccgctcagcgaggctggagttgagccgccgctgtgcagcacagaacagggtggggcaggagctggggcagggcctggctgggagggagccaggcagtgcaggagccatcccctgccatactttcggtccagggcagaagcacaggaggccaatgccgggcctctccccaggcatggtcagcagggaaggtgcagcaggaggaccaggaacgggaggcttgggtgcttaacatggcttcttgatgtgtgggccttgaggtttcgctggaggggaggatgtggagccaggatggttccacggcctgagggacacgtgaggggatgaaggactgcaggccgaagtgagtgtcaggtgtggggcctggggggctacatgggtgggttggggaccatgcagggcagagatcagcagaggggtgacctgaagattggccggcggtcgtgggctgtgagctgaggaggctcaggtagctggaatgggaacccctgcttgacccttcgggctgggaggggcagtggctgcagccccttgggagtcagggtgtccttgtttcttctcagccaggtcatagaggatgcaagccacaggaattcccatagcctttgtgtgtgtgtctgtcttctacctggaaaacagtaagaatactttcctgttcttttcttgtaaaagttcattaaggggctggatgcagtggatcatgaatcccagaactttgggaggctgaggcagatcacctgaggtcaggagttcgagaccagcctggccaatatggtgaaacaccgtctctactaaaaatacaaaaattagctgggtgtagtggcacacacctgtaatcccagctacttgggaagctgaggcaggagaatcgcttaaaccccggaggtggaggttgcagtgagccaagatcgcacatcgcacttcagcccaggcgacagagcaagactctcaatcataatcaatcagtaaagctgatgaaaataaaaaagcctgcaaattaatgtaggcacccaggtctccttaaatttagaatcctttcctcaaaagtctccgttgatacagaaacacttttgaagccagatgtgaagcaccagttgacccgcaggtgggggtgccaactggtaggctgtagggttagctctggcctctggcagccagccagttgtctcctaagaaaatactgtggcgtgaatgcaaaatgtgattcatcacttggctcctaatttcttttgattttgtcccctagagcaaggtccgtggtcctgtcagtggaagcccggatagcatraatgcctctcgacttagccagcctgggcagctgatgtctcagccctccacggcctccaacagcttacctgagccagccaagaagaggtaggtcctccttagcagtgccaagtgtgaccatcaagrgcacgtcaggagatcggggatggaggcgtttgtcactggtaaatgtctgtctgatggtattaccacctctctggatgtttgttgcatctgctgggtcctgtggggacaaaagtgatacatgtttggctctcatagtcccttgaaacttactaactagtttctttgtccaaggcttggatgactaactgcttaatgagaacattggaaatgctggtcaggcacatgctgttaccctttatccataggaagccacattcccttcagggaggccctgaagccatctgcccccactcaccctaccagtaccttgagttaccgagtcaccaccctcctcccggtgccactgaccttcccattcttcccgtcctctccctcctcttgcctgaaccatcgcagcagaggtgggggcagggctttctgcctcctgcctcctgcctttctgctgccaggccctgtgtggttgaattaatcttcacgaaataccactctgaccaaggtgttccttagtcagtcataaataacagcttctccctccattatagatgctcaggtctgagctttcgtcaagtctcatctgggccagcagtgcatcatcaaattctcaggtcctgctggagacctcacttgagagctcagggttggggcccagcagtctgtgtctagcagccctccgcccgttctccagcacactgcaggccacttctgctcccacgcccatctcttcctgtgttttgttttgtttgacaccttctgtgtgcagggctctatgggttcctgcaggctaatctctaggcatgggaaacaccgatgattacctggggcaggggaggaggttgggagtgactgataattcaaggtttcttctgaggatgacgaaaacattctgaaactagatatggtgatggttgcacagctctgtaaatacgcgaaaacccttgaattgtacactttaaatgggtgagctttatggtatataaattatatctcaatacagtctgctttgaagaatcttgttcttgtccttgggagtttgtagcctcttttggtgtttatgtgaccttggatacttaattttctcttggctgtatggcacgcgcttgtaatcctagcactttgggaggccaaggcaggaggttcgcaggagttcgaggcaagtctcctgggcaacatggtgagactgtctctctctctctcttttttttttttttttttttttgagacagactcttgctctgttgcccaggctggagtgcagtggcgcgatcttggctcactgcaacctccacctctcaggttcaagtgattcttctgcctcagcctcccgagtagctgggactacaggtgcatgccaccacaaccggctgattttttgtagttttagtagagatggggtttcaccgtattagccaggatggtctcaatctcctgaccttgtgatccacctgcctcagcctcccaaagtgctgggattacaggcatgagccactgcacccagcctttttttttttttttttgaaatggagtttcgctcttgttgcctaggctggagtgctatggcacgatctcagctcacctcaaactcagcctcctgggttcaagcgattctcctgcctcagccttccgagtagctgggattacaggcatgagccaccaggcctggctaattttgtatttttattagagacagggtttctccagcctgttggtcaggctgatctcgaactcccgaccttgggtgatccgcccgccttggtctcccaaagtgctgggattacaggcgtgagccaccgcacccggccctttttttttttttttttttttaaataaaaattatttccccaacctctcatgagctcctggagtatagtagctagaccgggagcctgttccattcccttctggggcaggcactgagcctttaggctagctagaggccccatagatgaggcttggcagaaatgtgctctgagctcctgccatcagattgtcacattttgcagagtgagaggagttccagggcagtcttcctttatgtggcttattcccttcagtgatgtcctcaaaggtctagaaaggtggacctgggtatataggatgtctctcgtctccccacagcatagagctgaggttagaaaaagacggatgttttactacatgctgctctttttcactgtggcccagtcctcagaggaaacatgggtttcttattatagaaaagagagagatcagattagatggaaccaaatcccagaacttgattttcaacagattccaaggaactgtgaaccctgataaattccttggccttttttttgtctacttcaaaaattggaaaacaggtgatttggagaatatctttagattttggcagtttgaaaattaaattcagctatctagtaagtcagaaagcagaaagaggtttttttgcttctgacttttattgagatctgtttgcttttttgcattttggacagtaacgctcatatgtggaaagtgcataacaagatgaatgaaagtattagtcartgggttggtgttttaagacactcaggatcaaaataattgttacttcatttaaaaagtattatcaaaactctctagcatattttaaaayagcartgttagctctgataactaataatgaccactttctaataatttgatcattttctttagtgaagaactggtggctgaagcacataacctctgcaccctgctagaaaatgccatacaggacactgtgagggaacaagaccagagtttcacggtaacagcttgtgtgagactcctgcgattccatgtcctttctttctatggcaaaatagaagagaaaatggaaatgcaatctggcattatcctcaacctcagtgtttgtttgtttgcttgtttatttgtgacagggtctctctctctcacccaggctggagtgcagtggcatgatcttggctcactgcaacctccgcttcccgggttcaagtgattctcatgcctcagcctcctgagtagctgggactacaggcgtgcgtcaccacattcagctgattttttcagtgtatatttataattttctagtacacattttttattattcataataatagtgatgtctaacaattattgaaggcttacaactacatgtatgcattatcttatttaatccttggaacacttaattccgatgatgaggaagaaggtagcattgttcccagaagcctgtccccacctgcaccattggtactactgctgagtatttgtgtgttgagtgctgggctgggagcaggaaccagccatggccttgtcctcagggccttggagcttagtggtaggtagtactagttatgagaaaactagccaagttacaggtacattaagacaaagcttccattgttgagagaatcctgcatcatttgcttagatctttacatggcctttacctgctaatcacttgctaacctcccctaactttaagcttttggaagaattacaagggataccactgtgaattgcagcctttgctgatgtagtcgcatgtcctcctccagtctgtggacattctatatctcttgctgctctcctcctcctggcatgataatgttttgatcagttcattgcttacttgcatgtctgtgggaggaagaggaagtctcatcaggccaagtcatgtggtgaggctggaaatccataactgagattagctacccacagtgagcatgggagtgagtgctgtgagccacagtggtactgacatcgactttctaattcccacagtcacagaatctcaaggactctgagccaattcaaagaaaagatcctgtacagtttgaatatgtaacttagcttaagagtaccctgcagtcacaagatttattaataaaagggtttggctttttaatttgtatttgtttaatttatttgttttatgcagcctgggtcttgctatgttgcccaggctggtcttgaactcctggcctcaagcgatccgctcgcctctgcctcccaaagtgctgggactataggcatgagccaccatacccagccaataaaggggtttcaatatatttctttttattttttattttttgagatrgagtcttgctcttttgcccagggtggagtgcaatggcacgatctcagctcactgcaacccctacctcccaggttcaagtgattctcctgcctcagcctcctgagtagctgggactataggagcttgccaccacgcctggctaattttgtatttttagtagaaatggggtttcaccattttggccaggctggtctcgaactcctgacctcatgatctgcccaccttggcctcccaaagtgttgggattataggcatgagccactgtgcctggctgggttttagtatatttctcaattgtcctgatttcctcctgaagaggaaaaataacctgaaatgtgttggtggstgttgtttttttaacatgtctgttgactttcaggccctagactggagctggttacagacggaagaagaagagcacagctgcctggagcaggcctcatgatgtggggggactcgaccccctgacatggggcagcccatagcaggccttgtgcrgtggggggactcgaccccctgacatggggctgcctggagcaggccgcgtgacgtggggctgcctggccgcrgctctcacatggtggttcctgctgcactgatggcccaggggtctctggtatccagatggagctctcgcttcctcagcagctgtgactttcacccaggacccaggacgcagccctccgtgggyactgccggcgccttgtctgcacactggaggtcctccattacagaggcccagcgcacatcgctggccccacaaacgttcaggggtacagccatggcagctccttcctctgccgtgagaaaagtgcttggagtacggtttgccacacacgtgactggacagtgtccaattcaaatctttcagggcagagtccgagcagcgcttggtgacagcctgtcctctcctgctctccaaaggccctgctccctgtcctctctcactttacagcttgtgtttcttctggattcagcttctcctaaacagacagtttaattatagttgcggcctggccccatcctcacttcctctttttatttcactgctgctaaaattgtgtttttacctactactttggtggttgtcctcttttcggcaaagttggagcgagtgccaagctctccatctgtggtcctttctgccaagagcgactcatagtaaccaggatgggagagcagctgccttattctgaatcccaaaaattacttgggggtgattgtcacagaggagggacagaaagggtatctgctgaccaccagcctgcctacccatgcccatgtctccattcctgctcaagcgtgtgtgctgggccggggagtccctgtctctcacagcatctagcagtattattaaatggattcattttaaaaatagctcctatattttgtaacatgtctcaaacactcatactgggttccacaatccactgttagaatacctatggttagggcttctgaactaaaataatggaaaattttaacaatttgtatagtgcctggatcattactagtgccataaccctgcttcttcaacatttcacagaacttctcttttatataaaggcaagagcacaaaatgagttcagatgatcacaaacaggtgagttttgttggagaagaaagttggagtaggagactttcacaagtggtttccatggagatagaatgaagcattctgtggtcaagtaagtttagggagctattcatgtttcacttgctttgtggagattcacactatgcactgggaaagtatctgaaaagtcttataataaagaaacaggcttaactttgtgtaagaacactgtttatcaatgtcatttggctatagaaacattttctcctgctgattgtgtgtgtgaaacatgtattaacattccaatgaactagcatttaataaagcacaattttggaaaccctggtaaatgacagtgggaaataacacccgaaaggcaaggacgggcagattggggagggaaaggatgttgggctaagggctgtgagcttatgttacaggcaactgagccactgaagaattttgacgaagaaaatgccaaccaaagcagtcattttaaaagtttatggctgttcagttacaggacaagttgtgaaaagaaagaaaaaaaaatggaaaaaaaaaaagtttatggctgaaacagtgtaattgattaaaaagtgaaaatccaggccgggcgcggtggctcacgcctgtaattccaacactttgggaggctgaggcaggcagatcacctgaggtcgggagttcgagaccagcctgaccaatatggagaaaccccgtctctactaaaaatacaaaagccaggcgtggtgggacatgcctgtaatcccagctactcgggaggctgaggcaggagaatcgcttgaacccgggaggcagaggttgcagtgagccgagatcgtgccattgcactccggcctgcgggacaagagtgaaactctgtctcaaaacaaaaaaatttgtaaaactgatcccacaattccctacatttgtaacttttaaaattcagaggtaaatacatttttatttaaggaggaataattcttcagagcaaaataatctgaatatcacctggaatagagattggacagaaaaaagtgtgaacagggaaaactaggacaagtcatatatgtaaatgagagtataaagagtaaatgagagtggtcactgctcactgcagcttaactaatcagatagttaagttgcaggcataaagtttttttaacttttattcctcaagtaataaattgaggaaaatacaaatatgtacaaaatttttacaaaagctatccataaaagggcaagtagtaatatatagaaaagatctaccagattagtaacaaactacccccattaggaaaatggtaaatgatatgaataggaaattcaaaaaaagaagaattacagatttccaataagcataacttaagatatacactgatattgtaaggaaacacaatcaccacaaccttgctaatcaaagaaactaatgatatttattggaaaataatgggaatttttaatagactgggttagaagactagaagtgtacgtcccaaaatattaatagttcagctgtagggtgagatcactgattttaattttctccttttatacatttttccagatttctctacagcaactacgtatcattttgtaataaattttaatttttcgatgcacaaagcaattgcctggaattgcagttcgatatgaacccaggagttacgcttgtaaaataaactattgctgatgtgacatttccatttctcaagcagactgtaaatttctcagatgtaggtcatcatgttataattagggttccattgctcatgatctagatgaaacacttctccctttcttgtggtctcttcattaatttggtccctaccgcaaaggcagggggattaaaaataaaatatcttttgacactggttggcaggtgtactaacacgtgtgcgggaggattcctgttctcggcatggttcacgccgggctccggcagcgccctagtacgtaaggggctgcactggagtgtggactgcccggtatccttagagaaagttttgacagtgtgacgccagtgtcgcctctaaccacgtacaaaacgcgccatgcattgggtagctattacagtgcacatttttgtgcaggaagctaccccaccagcgcaagtatttcagaatcaagatcgcactcccgtttccccttctagggaaaggattccagataaacactgagaaaacagatttaatatcttaggtcaaaactccaggtcttcccataggaaggcccctgggctgtcattctgaggtgcctatttcccccgcgccgtgtccacgtccacgagtccacgaaccctccgagttctctctcctcacctgccgagggctcgcccctctagccccgccccgccccgcccaggacgcgtgacgtcacaacaagcgccgtgcgccccgccccccatcgggggcaaccattgttccgccggtcgcgccggagctgggttgctcctgctcccgtctccaagtcctggtacctccttcaagctgggagagggctctagtccctggttctgaacactctggggttctcgggtgcaggccgccatgagcaaacggaaggcgccgcaggagactctcaacgggggaatcaccgacatgctcacaggttagcaccgggccgggccccgctggctttcttctttccttccagcctcttcccctgccttccttctctcccacaccgacagtccagtgggtagggtaggttccttgcagcgggtcgtcttccgtggggatctccctccggcgcccctggctggttgtcagtcctgccggctacacctgggccatcgcttgggctgcttttggtctggcccttggaggaaacgggtggtcactgtctcttagaggctgccatatccccttccagaaaacagttctcgtttgtttactcgtggttcttgttcacccgagccttctgttgcctttcagaactcgcaaactttgagaagaacgtgagccaagctatccacaagtacaatgcttacaggtgggacagtgcagcattctcgggtagcatacgttctgggataccctgtttagtgtggcaattaacaggactgagggcccagtggatatttggtccatctgcaagagcgggaaaaagcaagaatcgaggctggtaccttactatttcttgaagaatgtgggcagtgcgttataggatcagttcagataagttcccaattctgattgcagatagctgtagcctgatacgtattttgtcatcatcaaacatgaattactagaaatgcggtgtaattttaaccgtaatgaaagacagcggatgaagtccatactgtgaaatatatgtggttcaaggaatcacattttttcttttggttggtctaaagttgatcctgtgggatcctgatcctgatccttgttccttgttcatgggatcctgtccttgttcatctcaccaggggccttatcctattcattctttccacatccacctgcttctactccttagcctatatttatttatttatttatttttatttgagacggggtctcgctgtggtatgatcatggctcattgcagcttcaaccttccagcctcaagtgatcttcccatctcagcctcctgagtggctgggactactacaggcgcacgccaccacacccagctaatttttttttctttctttttttttctttttttttttgtagagaccgggttttgctatgttgcccaggctgatctccaactcctaaactcaaatggtccacacaccttggtctcccagagtgctgggattccaggcatcagcctcggtgtcagctctccttagcctataaatatgtgcaagtccctcagctcttaaaagcaaaaccaaaacaatcttaacttccctctagctagcaccttccctcttttctcactttatggtgaatcttcttgaaaaatcttcattccttgcctggacttcttaatacctaatcatttactcaagaagtcccagtccttgcctggacctaccagtgctctgaaaatccgctcacctacgtctcatcttattggactctctgtggcattcacccctggctcatgctgtgaatatctcttgacttctgtaatggcactctttctggtctttcatctcttcttctgtcttaccttttaatgttggtataggttgagcctccctaatctgaaaatttgaaatgctctaaaatctggatgattgccgacatgatgacacaagtggaaaattccacatccgatctcatgtagtaggtggcagtcaaaatggtcaaaactttgtttcatgcacaaaattattaaaacgactatataagattaccttcagggtatgtgcgtaaggtgtgtgagaaatatgactgaattttgtatttagacttgtatctcccatatccctaagatatcttattatgtatacgcaaatattccaaaccctgaaaaaaattcaaaatctgaaacaatgctggtcccaggcatttcagataagggatagttaacctgtggttccggggagtctgcctgcccttagccctcttttcttacttctgtagtttccctggcaatcttgccattcttgactttgaaatgccacttatgtcagtgactccaaatctgtgtatcactggacttttttccacatttttagccctatactgtctttatcccaagtcagctcccttcttccattcccactccacacagttcagagctgattgtgctccctcctttccttacttctgtgacttcctctgtaaagtaaaataattgtattatcatccatacatttgatgattcaaaattacagagatattcaactttgtattctatttggatcacagcaggtctcagaaaggaggtgtttagtttgaagaagctcatcgggataagtgagagggccagcagtctagacaaataaaatgtgccaaagcattgagacatgaagggtataacgttttctggaagtcagatgttcagtttgcttaacgggtatggtatgagtgggaaataagtctggaaaagcaggtgattccctaccactcctgcatgctcctccctaccccagtagacatttctgttgattgtggccaaagtattcttttgaaaatagttatctgatcttgtcagtcaaataattaaataatattttctctttaccttgataaaacccaaatacatcatagcatacaaaaggcctttcatctgattcttcttcccttttaggctttgcctcacagtgccaatgacctggaactacttgcctttcctgaaatgatcccctccataaactgtgtttgcctgctcctttacttataaatatgtcttttcagattcatcatcagtcatgtgcttagagagaagttcaaatccaaatataaagggttatttgtgctataacagaatgcaaatccaaggttccaaagactatccagtgtttatgcttttgacttagctgtactgtcacttctcatcagcatcaactctgaattacattttgcattgaaattatagacagaataccgtcagcgagctcccagggtgtatccaatctgtcaccagattaacaaactggatatgtgtggaggtgggcaagaattacaggtcaccgctttatgctgaactgcagtgggaacaattttttttttctgtccataagtttattgtctttatctgaaaaatcctcgtagaaaattgtttggtttagctctcagcagccccctcctgagccgtggggaagcttgccttcttttgagctatgcgatctttcttctgagcaagggacattttgggatggttccacctctttttaacttctttcttgagcttcttttcatagactggattctctcctatagcagcatgagctttcatctccttcatcatgtctgaagttatgctattctttatgtattgagagaactgtttcttgtaagcatctttatcttccattaagtagtgcatgtaatctgcaacattctggcctatgttgtgcttctggtgtaattctgcattgaattccttgctttcagaatcataaccagggaatcatttggtactttgagggatagacaagcctccatccaggtcaccaaaaactttattgccagtggtagttctggcaaggcctgcatccaaatagcaggtgaaagcacctggctgaccatcaatgctttctacattgtattatcgccagtcacctccacttggccttcatagatcttgtccatgccaaacctattgagaagcctgtgggccagcagcaggccagtacaatatgttgcagcataatttgtcaggccaaccttcacaccatattttggcagttcgtgtgcatatgctgcgcagactatcatatccccctctatacgggcataagcaatctgacaattgatatctctgtttgttatatgaactatcatcctctatttgggtgtgttgtatttatttttatcctgtattaccaagcgtttctgagcatagtaatcagttttaccatcttgtcatctttaagtttcatttggtatctcttaaagtaggccttattctt

SEQ ID NO: 96440 - DNA, 23780 bp, Homo sapiens
agctctttctctgtgtttttcaggtttgtattctgctctgctctacctctcctccttgccccttttctctcccaggatgtctctcctttccaaatcctttttgtacctgaataccttttgccccaccctgggctctcatttccatctcagaccttagcctgggatctaaagggctgacagtgtccctttcttcatgcagatgacagtcgtctagaggagctcaaagccactctgcccagcccagacaagctccctggattcaagatgtaccccattgactttgagaaggtatggggtggggctcaggacagggaaggaggatgggcaaagcatagacaggctggagaaaacaggagtatctggagccagccccgggcctttgtggggatcagattgtgggcctgccatatggctctgaatgagtaggtgttcccagccatccctttgtgatctgggagagtccagcaggcaattgcagtggaggatacacatcttctttatctgatcctctccccactgccttcacaccctccccactcataacaggatgatgacagcaactttcatatggatttcatcgtggctgcatccaacctccgggcagaaaactatgacattccttctgcagaccggcacaaggtgaggggaatctaaatctgatgttccaccctcctccaggtttgagttacccacacttagcccctctgtagaccctgaggctcttgtacttaactaccaccttcttttgtcccttctgtctctcagagcaagctgattgcagggaagatcatcccagccattgccacgaccacagcagccgtggttggccttgtgtgtctggagctgtacaaggttgtgcaggggcaccgacagcttgactcctacaagaatggtttcctcaacttggccctgcctttctttggtttctctgaaccccttgccgcaccacgtcaccaggtgggggcctgcatccgaagcagggtttgggtggggtgtatctgtgtagatctggttctgattcacgtcataccctgtcaccaggtgagggtttctgtctgtgtacctaccctttttgtgtatcctttttcacttattcattaatcacattatttgagtacgtgcgaaaagatgggatatttgaattgtgccctgggagattattagtaactacacaataatggcagccaaaatttattggacgcttcctacacttaagtgctttgcttgcttcattaatgaattcactcaaatatttattgagcaccttttgtgtgcagggactcttctaagttatgttcctcaagtagattatataaataacctattaaatgattttggaatcaaaaaaggataaaaagaggccgggcgcggtggcttacgcctgtaatcccagcactttgggaggccgaggcacgtggttcacctgaagtcaggagtttgagaccagcctggccaacatgatgaaaccctgtctctactaaaaatacaaaaaattagccaggcgtagtggtaggcacctgtaatcccagctactcgggaggctgaggcaagagaatcacttgaacccgggaggcggaggttgcagtgagccaagatggcgccattgcactcccgcctgggtgacagagcgagactgcatctcaaaaaaaaaaaaagataaagaggacttgagaataccagggggcgaggggatgtatttgagattttgtgtaggatggtcagaaaaggccttgctgaaaagatgacatttgagatcagacttggaggatgtaaggggacaaactgtgcaggcttggtggcgagtggggacacattccaggcagagggaccagttcttgaaagggtaccaagataggggtgtgcctggcaagttggaggaattcaaagtccccagagtgagtgtgagattgaggagggtaggagatgagaagaaaacagaatttcattgcttagggtgagataggaaccacaagaggatttcgaacaaaagagggttgtgatctgactaaacacgtctgcatgggggtaggggggatggagacagatgggggctggaccctctgggatggtctccatcttacactcccctctttgtcttgcagtactataaccaagagtggacattgtgggatcgctttgaggtacaagggctgcagcctaatggtgaggagatgaccctcaaacagttcctcgactattttaaggtaaggcccctcccttactctgtcaccccacctcagggggcgaggtgtacacggtgacttgctggcctgtccacctccatgaccctgctgttccccctccctctccagacagagcacaaattagagatcaccatgctgtcccagggcgtgtccatgctctattccttcttcatgccagctgccaagctcaaggaacggttggatcagccgtgagttggacactggccaggctaggggaggccctgtatgggttggggagcctcatcatccagctgtcccactccagttcactgcccctacctacctgcccatcctctcttgctttctgccctcctgaccctatactcccatccccctatccccaggatgacagagattgtgagccgtgtgtcgaagcgaaagctgggccgccacgtgcgggcgctggtgcttgagctgtgctgtaacgacgagagcggcgaggatgtcgaggttccctatgtccgatacaccatccgctgaccccgtctgctcctctaggctggccccttgtccacccctctccacaccccttccagcccagggttcccatttggcttctggcagtggcccaactagccaagtctggtgttccctcatcatccccctacctgaacccctcttgccactgccttctaccttgtttgaaacctgaatcctaataaagaattaataactcccacatcgcctgccctgctggttccagggaaggaagggacttcctggagctgtctggttcagatgataactcagagggctcaaccccaccacacctgccagttttctggacaaagaaaatgtaattgccacctcttcctgccctctctgcctaggaagagatggaggcaccagtgaggccatagtgagcaggtacttgggtccatgtgactgttaatttgagctgggttcaattctcaccttctccatgtcctaactccttgctctgtgaagaggaaagttacggtgaccaggctgctagggcatggccagcgtgccttatgtccttagggcagatcccctcccacctggctcaaagcactcagaccctgggcagccttttgtggtcatggttcccagcaccaggaatgcctgtgctgctcttagttcaatttccttgctgcaggggtgtcttaaacagctctgccgaatgccagtgcctgcaggcatacttcgtgatttttatggaaatacttgagaacatctgtagaggaaaagcccgttgcttgccttacgcttcccccggccctgccgccgccccagccccaggtctgcctgtattccccttgaggatcttcagcctcctactttggagaagacagctggctgtggggactgaggggtgttcatcgcttagagcaggtagcaggaggcctaacaccagccccaccgggactgcagagttaccgtgctctgtccttggtcttggctgagtgctccagacaattgaaagcaccagtctggccactgctacatctttgccttcttctattgtactggctcctggtgcctgaggagtccattcatacttctgttcctcaactaaccaataatttatctaccttacttagaaacaagatccctcactcttctactcaaacctgagtgtaaggaatagctcaacctgttctgaactggcttgattcccatcacagcctgtgcccacatctgctgcctcctgggccagtagttcctggtcctgggcacagtatatgcccttgtccacctccttctgatcattttattttcttggcctgctctgcttgggtgaccttatccttccacagtttcttcttccccactaggacgttgaggacagaggcattttccctttggtatctagtggtgatactgtcaaagggaaagtttttcccaccacaggaactttcccattattgctctagagtaccctagacactccacaccgcagtccactggccacaccactacagcagctgaggcttgaacacaactgttgtcttctttctccagtatgccagctcctttgcggatactctatagacaccttgttcactgcacctcccccattacggctccatgtcttccccaccacaactcctggatctccttgacaccttattcgtgcctgacacccttctccatcaaaacaagcttttgagtcatgcatgaatcctggttgcatcttagttgttccccctccacctcattccattttacttctgcggtttgtctaccagtctaccattgttaacaccagccagatgggagatcagggcttagcaggcgggggttgcgtcattgcaccgagccccctgcacccagcagccacaaaggatagggtgggacaaaggtttctcttgtcactgcctggaactatttgcccacctccttctgatcattttattttcttggcctgctctggcaggcattcaacaaacatttgttgtgtgctgtgtgccagtcactttctaggcacgtgagacagcagtggataaaacaaagatccctgtcctcttggggttttacgttctgctaggttgacacccagaatagattataaacacagtaagcaaattgtaccttagaagttgatcagtgctcttcaaaaggcgaggaatagagcccgatctggggatctggaatgatggcagtgcaggtaggaatttttaaatcggaaaggcttcatggagatgactttgaagcaagcacctggaagaagtgagagaatgaggcacgtggatgtgggccagcagcattccaggcaaagggaaccacagcaaatgcaaaacccctgaggctggattgtgcccgtttcactcaaacagctagaaagagcgctagtatggtggcagtgagtcaggggaagaagaggaagagatgaggtcagagaagtgatgagcctgttctatgccaaggcgaggacttttatctttgtcaaatatttccactcccatcatggcccgggaaatctcactaatgtaaaccttactgaaaatcctaactgctgtgatcaaggctgccataaagggaagcccggaagaggcggggaggctgccttggaacagggtagtgtaaggatgtgccagaaggcctgctggaggttgcagccctttgagctggacttggggatagtgtggttttccaggcagaaggaagtgaaggattaggtcggcctggtagtacttggcacacaacatgcgcccaataaataaaatggaaataaaaccgcggagtgttctacttgtgttgactgacatcaaaacaaaacaaaaaaccctcagagtgaggggaggcacgggaggggctgtgccgggcaagagaggtggcaggaaaatccaacgcacggcgcctatgcaaatactcgtgtgaggcagaaaagaggctccgccccgctcgaagttccaagcatgcgcagtagcggctcctgcgcctctaaggatccgcctctttccttctttctcagcctgggttccaccccgggaggcccgctgtatgagatggagggcgggctaaaggcgggacgagactcgattgagcgcaattatgaccaatcaccttgcggaatattcggcctatagcgaaggaggagctcagaacaaaaaggagaccccacccccgccgacggtgaaaacctatgaaacctgggcggaggcgtgcggagtcgggtagagagcgaaatcacgcctcttcagtcagccacgccctttattcttgctcggcctcgccacagagagcaaatcagattggctgggcgacaacctcaaagggcggggctgcacacgttcactacgggaatgaggtagcggtggagggggcagttgggcggggataggccgtcctagctaaggtggtaaaggccaataactcttcaggctgcctctcctcgaaaagtcatcwtctcgcgaacctttaaaatgccttcctccccaagcacctcaagggactagaactgagtgcttcatttgtcttttttcctccttgcaaaagtcccgtttgccaccatggggatgtaccaagtgagaccgagtagggggaacgagtggtgattgacgcgccaggttactggccactgctcacctaggcgctagcaaacttctgccaagatcggaactgagtactaaacagcctccacagttctccctggtgccgtctccggcttggcgccgcatcctcctctgggctcgcgatggccgcgtcccctcccrctgcggacgggtcctttggtacatgcagtccgaggtgagtcccctcctttccacttcacccttccgagcgcctgcgtgcgcatgcgcggagcgcggcgcgcgcggcggttgggccgttggctgttcggccctgggatccgccgccactccgcgatcagaccgctctgtgccgcgagccgccgtgagcactcggattcaagccggcgccaacgagtccgggggcatcgcccgcagcggccaagctcatggccggctgagcgggacgccgcctccgcctcagccaccgccgccgccgccgcctcctcctcctcagccggcggcggcccgggcccagcaaccatggctgaagactactgggacgggcgcctgcggcgaacaggaggagaaggaggtcgcgcggcctcatcccgggccgccgccccaggcgccgccgcgccggccccgcggctctgaggttgctcgcgcgcccccgccggtgagcgcgtccccgaggcgtggaggctgcccctcctccttcagaacccacctcgggcggtgcccaggggtctgggctgcggggctggcaggtgcccccacccccggcgaatttcccagaatgcaccggggcggggggtcatttggggcctccctgaccttggccccgccctgggcctgtcctgggagctggggttgggtagtgctgtgggtgctaatggggacctgggggagtcaaaggaccaaagggtgtggaaatgggtgacaatggggtgaaagacttgggggggttgctgatgggggtcggagcatgtggcagtaagcctcacgccaataagtcgtgtaaggttcaaggccccgtgtgtgcttgtggaaggagggcggggtgcggagcgggtgagggacccgagggtgtataacggggggtagggtgtcgaggaagttctaagacatgctcatagggattatgtccgcagagaggcccggtgtgtgttcatgggggacagggtggcacaggtaccagaacgtgtgttggtggggtcagggctctgaggcctggtgcgtggcgatgaggccctggatggtgttaatactgcgtgtctgtccgtggggcctgcagtgtgtgagaatgcagtgtgtgcttgtggagggcaggtagctgaaggactcgagtgtggtgtgtgcgccagtgggggtcatggctgtagagggtgtatgcctgtggcctcgaaggtctaggtagtttgggacccagtatatgctaatgagggcagagtggaggaaggacctgagggtatctaacggaggaaggactgtggaatacctgagcctggcctaaaggagatgagaattgcgtgtctgtctgggcccaggaaggagtggtggggaagtgtcttagcactgtcagaggcttagtggacgaagggtaaaggtgatgtgaggtgtgagtgtgtccatggacacagggaatgtgagtctcgagggcacactaggaaggagcagggtaatagaagtactggtggttgctaatgtgggtttagagacatagaggcacttcaatgtgtgccatttcgagagtcagctgtgtgaagtctggaatatgctaataagcatcagaaccttgtgaagattgtgcccttgtgtccgcggaggaccagagtatgttgaggttccagggggtgctactcgggggtagggctgcggaggggatctagtgtgtaataagggggatcagggctttcatgaagggatctaagtgtgaaccaacaaggattatatctgtggagatatctctgagcagagagcaatagaggacaggaatgtgtgatgatctcggtgtgctaaagtggattacagctagggagggctgaagtgtgtgctaatgggagtcagggctgaatgagacctgtgtgcactaatgagggtcaggccatggtagaacagtgtgtttgtgtgtccctgcggaatagggctgagtaagggttcagggtgcactaatggggaggcaggactgtgtgaggcccggcgtgtgctaatagaaatcaggcctgagtgaagactcagtttgtgctgacagaggggacaggacagtggaaggactggaatgtgtgttaaggatggtcgtagctgtgaaggggcctgagtgtgggtaacactggttagagatctatctgtaaggttcactttatgttaatagcattcagagcagcatgaagaaggtccagtgagtgctaatgtgggtcagctatagagtaccccaagtgcatgttaatagaggtcagaatcatgtagggggaacagtacgttaatgaggggagtcagtactatggagaaggtaacaagcagctaggccagggaggggcccaagaatgtggtggcaagagttacttagaggaggctaagtgtgtgctgacagagttcagggcggtatgttatgtgttagggctttgaatgctgatgggtatatgagataatagcaggtaagatgtagtgaggcctccttgagggtctagcgtgtattaatggggatcaggacatagggtgcgatgaccaagtccttagtggttggtgtgttgagtatccttgagtatgagagtagtctgaggatgggtgtatgtctttggggatcaggaagggtcaggcaggacatgtgccttttttggggtaaggttttatgtccagtttcttgctccctccttttttgaaatctaaaaagctcattcaactgaaatgatatttaaaagtttccttgcgtataaatgttcaattatctctgttcacaggggcatgtctgagacccccatccccctttctgggagtgttatgtgatatacagattttacaccccatcttcctaaaatcccaaaaaactgaactccagagcatgtccagcccttggggtttccagttagaggtcgtggacccatggctcctcctggcttcctccccatcctccattcagccctacttccagtctcccccagcccctcccctactccctgtcacaacatgcaaagcaactgggtatctgtgccatatggggacacaaggttgtctttgggagctggccatgctttaccttccttgccttaggcccagtattcagcctcccaggtcaggatgttttgtggttatcctgggttctccatggatggacctcatcctgtatctgaggtctttctgctagggtggcccctacccctcctggggatagtgagttcagccaggtgggggcgagaactgctgggggaagcacctgatttcaaggtagcagatgacccatttctctcctcaaatccagccccagtctcatcctcgacctcctatctagctctacttcccttgggcccagggccatcttaggccctgctgtgagtccagatggttcctgggtcaggtctttccccctccttgctggcccagagcycaagaggaagcagaagacggctggcctaagccttttggtggccccattcccttcagcaatccatctaggtcatcttcctgtcgatgccagcatccctggrctaccttgtttagggttgttcaatgaatagcagggactcatcacctcagcagaggttggtcctaggccctcagccccctgattcacttatttctgccataagcactttttgagcatctactctgtgtcagtcactattccaggtcctcaggatatagccgtgacctaaacacagaaatctaccctggcggagctgatcttctagttgtggcggtgaggagatagacagtaaagactaaagaaaccaataagtaggtggtgtcatttctgaggaggtaatgagtgctggggggataactggcaaggtgagggagttcgggatggttgagattttaaatagggttattcacagaggcctcatgaaaaaggtgacctttgagcaatggcccaaagggagaggggagtgagccatttcgaaatttaggggaagggtgttccaggtaccaggaacagccagtgtaaaggccccgaggtgggactctactgggtgtggttgcagaacagcaactaggaatgatggcgggggggtgtgggggtgggggggggccgtgggcaagaggcaataggggcaaatgaggtaaagaaacacctgtgggccacattgaggactggggcgtgtatttggggtgatgaaaaatgtacattcttgagtagaggagaaatgtgacttggcttgtaaaagtctagattggaccctaggggtcctaacctgatcaaacckttctggcagccctgagaagagctggtgtacactgagacccccccgccctccacacaatcccacccagtggttgggtctgggcaggacaccctgacacacgctcccctccccccccccacctgggtagatgaatgggatgatgcagtggttgtcatgacgatgagtgctagagaagtcaggaagagggtccctgtggccacagggaatagtctgccttggcctttgagggtggtgctaggggaactatgccactctatggccgtgctcgagaccatgtcacccatccttcaattctgggcacacgccctggccgacccatggctgggcccatcactgcagctgtacctgagaagatctgcaatggagccttctgctcctgcagtggggcttttcccctagatcccaacaatccatcgttagggcccttgccctcaatcagccacctaaatctgagaactcaggtgggctacgtaggagcagggtcccagtggggctggctgtgtgggtgggcaggtactgacaaagatccccatccatgctgggtttccagaactcctgagtggctctggggtccatagtggttgagtgagcactgacaagttcatgtcagtgccccctgctaggctgtgggctttagggaacccatggtgatcaagcaaatgctaataagagacccatttccatccttgtcccttgctcagatcgccatggatcggatgaagaagatcaaacggcagctgtcaatgacactccgaggtggccgaggcatagacaagaccaatggtgcccctgagcagataggcctggatgagagtggtggtggtggcggcagtgaccctggagaggcccccacacgtgctgctcctggggaacttcgttctgcacggggcccactcagctctgcaccaggtgggtccactggctatcccctctcccrtatggccccaggctgcttcccaggtgttgcctcctggtcacattcctcattttcctctaaattttctgccctttctctgccccccatgtgctctcttctcccccttccctcccatcttctctcaacaccgtctgtctatctgtccatctgcgctcctcttcttgcctttctgcccaggccccgtggtgggggacagaaggtgccttgcctgtcacagctgccccaaggctccctctgcccttctgccctctatgatggcctcctcagtcctctggtacctgcctgccctgggcctgccttcccaggacccttggcttcccctgccaccacctagctgccggctctgagctcagcttgcccttggaaggaagggttccactaggtgacttttgcttccccaccccccagttcaacctgccctagatgtacctgagcttccctgggctcaggtacatcaccctctccccgagggactccaggtttcctgtgggggccacgtgcacacatgtgtgatgatggaatatgtttcgtgggggatggggtgtcctgtggttcctgaccccacctggcctgccctacccctctccctgccaccagagattgtgcacgaggacttgaagatggggtctgatggggagagtgaccaggcttcagccacgtcctcggatgaggtgcagtctccagtgagagtgcgtatgcgcaaccatcccccacgcaagatctccactgaggtgcttgaccccgtctggatggtggaggaactggaaaagggggttggacctggggaggtggagctcatgatcctgtttctctcttgccttacctgctaggacatcaacaagcgcctatcrctaccagctgacatccggctgcctgagggctacctggagaagctgaccctcaatagccccatctttgacaagcccctcagccgccgcctccgtcgtgtcagcctagtaagcaccttctgttcccgtcctctcctttttcttctctcccagacccttctcctgagccagctttaacctgcctcatttgtcccacagtctgagattggctttgggaaactggagacctacattaagctggacaaactgggcgaggtgagaggcaaataggaggcccatggtggggatgaaggtcagtgggaactcctggaatctcatagcacctctcctgtcayacttcctcacattccagggtacctatgccaccgtctacaaaggcaaaagcaagctcacagacaaccttgtggcactcaaggagatcagactggaacatgaagagggggcaccctgcaccgccatccgggaaggtacacacccccatcccatctgccccaggcttccccaacccacccctggcgcacacactccataatgagaacaaagactggttctaagaccccccaaaacactctggctttcatgggaatgcctgtcacccacatatccaggtaataatcagggtaaccaggaatctgttcccatttggataaaaggtagatgaattgcaaaccagggtttggttctgagaacacccctgaaagtgctcaccagtttatttactgtaacaatttctagtcagaatatcacatggaatgaatttgaattgcactgaaatttagtgtgcaaattcgatttcacgcgatgctgcaggcctatgtactgagggttggagccaggccccttcccagaaaccaaaaacaggttgtgaaaatctagtgtcacatgagcctggggctgcaatcccaggttcttgctccatactctcctctgagtcttattttccacatctgcaacatggagacacaactttcttctggcatgaggcgggttagagctggtggctccgaggcattaccctgaactgtctagagaaagaaagaaaacctgggcttgtccctttctagtccttgtcctcacctctgtcctgagggtaggaccctgactcttcccctgtcccactcccatgcttcctgcagtgtccctgctcaaggacctcaaacacgccaacatcgttacgctacatgacattatccacacggagaagtccctcacccttgtctttgagtacctggtaaggttgagtggcagtaggtcccagggggaggtgaggagaaggccaggagccataggaagtaaccctcattcctgtaccacctcttctttcctcaggacaaggacctgaagcagtacctggatgactgtgggaacatcatcaacatgcacaacgtgaaagtgggtgtggggcaggaagcaggggcacaagggggcccccactcacccactccaacccacaaatctcccagaaacggacttttccctttggctttttttgctaggagcccttggagggcactgggaccctgtcctcttttgtgtgacaaggctctgggcctagtgtctgtgtttgggaggggagcagtgcctgctgggggtcgggctagtggatagtctttgacctctgcctgccattcctgggtccccagctgttcctgttccagctgctccgtggcctggcctactgccaccggcagaaggtgctacaccgagacctcaagccccagaacctgctcatcaacgagaggggagagctcaagctggctgactttggtaccactggcctcccctttcttattggctccccagcctcctactttcccatgaccacttagtctcacttcccttcagccttgccagattttgcctaggacaccctcagtctcaactgcactctccccgagactttgcccatgactccctcattctagctgtcctttctctgatttccaggcctggcccgagccaagtcaatcccaacaaagacatactccaatgaggtggtgacactgtggtaccggccccctgacatcctgcttgggtccacggactactccactcagattgacatgtggtaaggacaggtgsaagtgtggcaggggccatgtggtaaagggggtggcttggtcacaacagccacccagccagctgcctttctattcactgtgccctccctgcccaggggtgtgggctgcatcttctatgagatggccacaggccgtcccctctttccgggctccacggtggaggaacagctacacttcatcttccgtatcttaggtgaggaggcatgggccctaggcgctgtggagacacacrgggaggacctgtgaaatgtttgggataactcctcttccctactaggaaccccaactgaggagacgtggccaggcatcctgtccaacgaggagttcaagacatacaactaccccaagtaccgagccgaggcccttttgagccacgcaccccggtgaggctggtgggtgggtgggcgttaggggccagagtgtccaaactcattttaaatcaggtctctttgtccttgtggcagacttgatagcgacggggccgacctcctcaccaagctgttgcaggtgagaccaccttgggtcagccttgggggtatgggattccaagtgtggggaaacagggacccccccccctcaaaccaggggcagggtctgaggtgggcagagagacctacttgttgaagatatcaatactatccccctccccgcacccccactcagtttgagggtcgaaatcggatctccgcagaggatgccatgaaacatccattcttcctcagtctgggggagcggatccacaaacttcctgacagtgagtggagctggggaatggaccggccagcgtggggactgggaaacaggactgctggggccagctggcgggttgtgtaggattctggctgtgccacctctacgtggggggacatcttgttcacgtgtgtgatgggttgtatttgttatgaaaacattttttagttttcagttccttttacctttcatgaaaaatttaaaacatacataaaaatatatgcaatagcactttactttttttaaagtagacatttccttacatgtgctaaaaaatgcacaaatcataagtatactatacaatgaattttcataaatgaaacacatccttgtaactagcacaaaagtcaagaaacagaatgttaaaagctccccacccccagctcccttgcatctccttcagttattcccagccccttcccaaagggtggccactgttttgacctctaacagcaaggataagttttttctgtccttgtactttatagaaatagaatcacatgtgatgttctttttatatctggcttttaaaaactttttaatatggatattttcaaatatatgtatttatatattagtcaaagtaatatgatgagtccctaagtactccagtgagtcatcaattcatggtcaatctggttttatctatattctctctgattattttgaatcacatccaatcccagacatcatagcatttatccttaaataatttcagcatatacctataaaagatttttttaaaacaacaatattattatcaaacctacaaaaaacatttgctcactttccctatcttcccactggattaatatataaagcaaaccccaaacaccacccatcacctagacttaacaggtggtaattgcaataccataattcacttgacaaagttaataatgatttctttgtgtcatgtaatagtctatatttcatcttccctggttktagctggtttgtgtatggaattgtttgacagataaaggtcaagcctctcagagaaggggcagctttttctaattcttcccatggggtcatatggggctggtcctagatgacctcatgggtcatcccccacttctatgtctcccccatctgtagctacttccatatttgcactaaaggagattcagctacaaaaggaggccagccttcggtcttcgtcgatgcctgactcaggtaggtatagccccttgtcttcctccctgccccacccacctacctgcttacccaccaacagccatctgctctgctttcccccacaggcaggccagctttccgcgtggtggamaccgagttctaagccacagaccgaggccccagcaggcagcggctggagggatgccacacccctcacagggcagcccccaactacatcttccctgcttactctctgcctacctgcctgagccatgttcacctgcccacttgtcccctgctgcctgcccaaamaccccaccattggcctgtcaacccacccattggcctgtctgctgggtgctaacaaagctctcatcactccttcacttggtctgtctgtctctgtcttggtagttgccggtggacagcatggccgtgccagcctcccacactgaggccaggtctaccccccatcataccagcccccaggaccactaccccacggccagccaggggtccagagctagcccaggctggggatctcgactcagacaagatggtgacaatgccttgagtctgaggcatcctctgcctgctttcctgcctgccccacctgcctcatattgtgtgggcctttttttktttgtttcattcattgtttttttttttttaattattttaaatgagatttttgttttttttaaatgcaatatctctgtatacagactggctgggccccaccccctgcgtgtggccctcccacagtattttgtgcaatgaagccctgctcccagcctttcagagacagggacacagcccctatttggaaccctgatcatcaccagaccctgggattggctatgggaaagcatgccacagccactcgccttcctacccccgcccgccatccccagttgcagggggatctggggactaccagagactctgggaaatggacaaggtggggggccccactctttctctcctgcagtcccgtagctggggcctccttccttctcagggtctccccagcccagtccccttgctcccatcccactcggtgctgttgggtaggggccctgccaggaactgaccagctcagcgaggagccataatgtgcatatgtgcacaagcagggttgggggaggggggtgtgaggggttgtgcccaggtgttgccccctatctcctggggagggtgaggcagggcagggacagtctccagggtcagtccctggatgggtggttacctccccttcctccaccctaagccctggggccctkaaatggggtgggagggcaggggtgggagccctcctagtgggtttggggggttgggttcctgaatgcaccataatcgctgtatgaaatattaaaaagtctaaagtgaaaagcctgcttgcaaatccctgtaggggtggagggtggccgagctggggtgattattgggaccttggagaattcatacctcatcaccactgtctaggaaaacactgggagtgggccagggacacgtcacgactatgaaaaaggcatctaaggtattgcatatgtaacagtagaacatggagttgaagcaggtagggcaggctgaatggtgttgatgggttgagaagcagaaaggggagttagatttgcccaggaatatgaggaagcctgataagagggtggaggcagggaagtggagagacgatgtttgaaagacactggacggcccaatagaaccatggatgggaagatgaggcaaaggcccagtatggccatctgactaggaaaccatgaagaggagggaatgttcaggacggtagggggtagattttggaccactgagtaggtagagaaatcctttaatacatggatcaaattaagcagtggggccatagatggacctggaaatttcaattattagtgtccaggaagtaacagaaaccatgggcatgggtgagagagtttgcaagaggccagggatcaatgacacaacctggggtttgccctcagatatgaggataattgaaacttattttctttgtcctgtgagttccagccccagtcccaccatcttgggcaaagccaaggattgttttctaagcagaagagggggtgagcagggccaggcaaatactgcaagtaatggcaaccctaattaagtggctgtttactaaagcccagtggtgggggcccatgaacttctaatcactctactgtgtgtgtttgttttttgagacagagtctctgtcgcccaggctggaatgtggcggcacaatcttggctcactgcaacctttgcctcctgggttcaagcgattttcctgcctcagcctcctgagtagctgggattacaggcgtgcacaaccacgcccacctaattttttatttttagtaaagatggggtttcaccatattgaccaggttagtctcgaactcctgacctcaagtgatccacccacctcggcttcccaaagtgctgtgattacaggtgtgagccaccaagcccagcctctaccgtgtctttctaagcactttagtgatgtttcagcttgcagcctcatggtgccatgatgactgccatgtccccagagatggaaaagcaagcagggaagacagaacaccttccttacctgtctgtgttcttttaacggctggaacttccacaagctcctcagcagacttcctgtgccatttcttggctagaatcagatgacatggccacttctggcagcaagggaggatgggaaaaggagggccttgcaaagggggacaggattgccaggctggatttaaaaggtctagaactcacccaactgctctgggaagtggtagggtcactggtgtgggcagaggttggcctctggaaggtggaaaaaaaaaaacggtctagggctgggaaaggaggtctcttggatttacctggctgcccagataaatggggagggggagtctgcagaggggcaatggggagaatcaattcagagaatctgacaagattcaactgggcttgaagagcagctatctgccatgtgtctgactcaactcaaatgccactttctttggggacccttaagtgaaaggcctgctccctttcctcacccagagcttacacaactgagtttgtgacccctcatctatgccaggtctgggctgggggctggaatcacagtaataaagacacaatccctgccccgcagagattaactgaaaataggtaaattatgaaattgtgagggggaagggaggttcgaaattaaagtcatcatcaacggggctggcagccccagcagaggaaagaatagcatagcctagagcagtggttctcaaccagagacatttttcccccaaaggacatttggtaatgtctggagatacttggttgtcctgaggggtactacttggtatctagtaggtagaggccagggatgctgctacatatcctgcaatgcccacaacaaagaaatgacagtgctgaggttgagagaccctggcctagtccaagggttctcaaactttgggtctcgggattcctttatgttcttaaaagtttaagatattcaaaagagtttttgcttatgtcatatagcctctggattcagaagcctctggataatcacactgtacacccctgagagaatgagagtgaaaaagtattgtgaaaatagttttcattttgtgaaaccccaagaggatttttggaccggtagacaggctgggaccactgggaccacacggttggagaatgtttggcctggtgtttaaggtcacagctctgaaaccagatttctcaagtctaaactgcagctccaccactaattagctgagggacgtttctggtactcagcgtccccattgttacccatgggtgacaaggacagtacctgctgcctgaggctactattttagtccaataaagcacttaaactgggcggacagctagtttagttatgattgctatgactccaacaaacatagggcctggggctaacttgtcttcaacaccttgtctagtgaataaatctagttcaggaagagaaacaacagcccgcaggcctcggtgggtctctggaggtggaaacctcttttgcattgggttttgatggtacaatgaagggcattctgatcaggctaacaaaaacactgctcccagggtaggagtcctagcccacctcgggaacctcagcctccactttccatgccacctgtgccctaagtctacagggcgttaggaccccacaaggcacttttgtctttcttggttcccactgaagattttaccccacctagcccttcgacgcgtctgtgcacggggccatttccaatatggcagtagccccgcgactgtttggggggctctgcttccgtttccgggaccagaatccggaagtggctgttgaggggcgtcttccaatctcgcacagctgcgttggctgtagaagagaacggacggcgatggcgacggtcgcagcaaatccagctgctgctgcggcggctgtggcggcggcagcggcggtgactgaggatagagagccacagcacgaggagctgccaggcctggacagccagtggcgccagatagaaaacggcgagagtgggcgagaacgtccactgcgggccggcgaaagctggtgaggctgggctgcggtggagcctcggcagagggaacggtgggggcattgacaaccgctggggattcggcggccgagggccgcgggaaagctgctgcggggtgcgggggcgggggagtggccggcgggacagcgggctaaaggggcggggaagtgcctttgaatgaatcgcaacgtctggaaaaggggcggggcctgtgtggtgcagtctgacgcctgagaacaaaatggggtttgttgtgatgagaccagtttcggtcctggaggtggggccgggcctgcgtagtgaaactgcgtaggaacctgggaagaaggtgggttctgctacataaggcgggggcgcggcctgcgctgcgtaatgcaacttttgggggcgaggagcggtttccgattgctccggggcggctgggaacgaggcgagctttgtgacgtcagcagaagagcgggatggagccgaacggtccgagggagggagcggggacctccgtgggggaggggggaggagcctggagcctgggaacgaggttaggttggtgacgtgagctgaggcagaaaatggcgcctgcgaataagcaaagtttatgacgcgccgtggtttttgattctggcggaagccttcccgagtcgagagaacgtgcaggtgattagcaccggaggggccttccatgtttaattggttttctgtgttggtactgttttgtttttagaatcaagaaaaagtcgtttttttaaaaaatagaattttgataaatcggcttgttttactgatttcttgctaaacagtccttcttgaaatttactgcttctgagttcattttatttctcgccgagttgcatctcgttttttaattgtgaaatacgtaagacttaaaaagattatataaaacatttacgcagcccagattgacggacatcctgttaaaataaacggcctacactcttcaaaaatgtcaggatcatgaaagacaaaggctgaagaactgttccaaattgaaggaattaatgcaatttaacgagtcatgataactaaatgcaacatgtgatcctcgattggatcctggaacagaaaaaaaaattattttaaaaatcaattttttatcataagattatttttgtctcttttactgtaaaaggcaatggaaacgtcggtgaaattttattaaagtgggtagatactagtactactaataattgtgatcattgtggctgtgaaaaataatatccttgtttataggaaatactgaaaaatttagggataagaacgcatcgtgtaagcagtttattctcaaatgcctgaaaaattagcatatataaatttatatatggcgaggggaaataaaattggggagatgttggtcaaaggatacaacatttcagttagacaagaaaaataagttcagatctattgtacaactatagttaataaattcattgtatacttgaaaattactgagagaagattttacatgttctaccaccccccaaaaaataagtatgtgacgtaatggatgtgttaattgccttgacttagtcattccacaatgtatacataagtcaaaacttcatgctgtacactctaaatatatgcaatttttgtccattttaaaataaataaaaataccaaaaaatgcatgtaaagaaacaacgattgagcaaatgagtaaaatattagatttggagaatctggatgaaggacatatggggattctctgtattatttttgccatttttctcaatctatttcaaagtttaaaaattaaataataaataaaaacgtgtgaattcaccatccatgttaagattcagaacactgtcttaagaaatccttctgtgcccctcccagatggaaattcccctccttgctccatgggaaactgttatcctgaattttgagttaacagtctcttccttttctttaatgttttaccacagctgtatgcatccctaagcggtatgtattgtctaagctttcactttatacatatatggaatacatatatataaaattctactggatgcatactgtgagcccttatcttcgcatcgggtaatacatggtatccacatggcatcattggtgatgttaaccttgatcacttggttatggtagtgttggccagctttctcaactgtaaaggtaccattttcctctttacatatgcagtaattatttttaaaacatgtatcatgtccagccattcctcaaaatactcttaacagcttcccatctcttgcagcgtagatgctaaaatccttacaatgaattgcaagcctttatgaagctggtctcctgcttgcattctgatgtcttcccatatctctcctctgattacgcactccctccctgtctccatccaggccggccatattggactcttgctgttcctcaaacacatctaaccttagggctttttcgagtgaggtttactcactacagagttctttaataaccacaccagtgaaatgtgtatctctgttactggggagatgagttgagattttccaaatcgggaatacaaacccaagccgtgtttttctgccattacgtcacacttttccagcaagaaaaagcctcatttcatcctgagaataaacaaaataaccacagtgttttgtaactcatttgaagatgttcaaaagggccttgaggctttgatccttgcctcttcctacctttgtagccttgtgattgtgtcactggtaggacatgacatcctgtcatccttgataatacgctttaaaattaccccaccagtactgggttttcttttgggatgatgaaat

SEQ ID NO: 96441 - DNA, 24777 bp, Homo sapiens
tatcattcaaatgatttgggcaatttcatcatatactacatcctttccaaggcatgtaacctgatcatgaaatagaaaattaatgcttcaataacaataatttatacagaaaattttcctgaaaataacatgtagactattttccttggcctttgtattcaaacaaagatgaaagaactaagctgttaaaaagctaagctgggctgggcgcagtggctcacgtctgtaatcctagcactttgggaggccaaggcgggcggatcacgaggtcaggagatggagatcatcctggctaacacagtgaaaccctgtctctactaaaaatacaaaaaattagccaggcgtggtggcggccacctgtagtcccagctactcgggaggctgaggcaggagaatggcattgtgtccggaattggtgggttcttggtctcactgacttcaagaatgaagccgcagaccttcgcggtgagtgttacagttcttaaagtcagcgtgtccagagtttgttccttctgatgttcggatgtgtttggagtttcttccttctggtgggttcgtggtcttgggggctcaggagtgaggccacggaccttcgcggtgagtgttacagctcttaaggcggcgcatctggagttgttcgttcctcccggtgggttcgtggtctcgctggcttcaggagtgaagctgcagaccttcgtggtgagtgttacacctcataaaggcagtgtggacccaaagagtgagcagcagcaagatttattgcaaagagcgaaagaacaaagcttctacagtaggggacccaagcgggttgcccgccacctttaattttcacgaccaccttgtgagttagaggaattaggtaattgatcttaaagaagtaaagagcttctggttatatgtggtgaattgagcttatctctgctcaccctagaaatcacgtcaaaataagagtaaagaagtgaaaaagggcaggcatggtggcacgtgcctgtagtcccagctactggggaggctaaggtaggaggatcacctgagcctgggaggccaagactgcagtgagccatgatggcccaactgcgctgcagcctgggcaaaaaagtgaccctgtctgaaaaataaaaaatagccgggcgcggtggctcatgcctgtaatcccagcactttgggaggccgaggcgggtggatcatgaggtcaggagatcgagaccatcctggctaacacagtgaaaccccgtctctactaaaaatacaaaaaattagccaggcgtggtggcaggcgcctgtagtcccagctactcaagaggctgaggcaggagaatagcgtgaacccgggaggcggagcttgcagtgagccgagatcgtaccactgcactccagcctgggtgacagagcgagactccgtctcaaaaataaataaataaacaaataaataaataaataataagacatgaaaaagcacaaggacaaagagaagactacagcaaatgagagactgatttagtttgatacagatgtgcagataactgacacaggatttctgcacaggatgtgcagaaagccagatgtgcaggataactgacttaagtttggggatttttccattctactcataatgtagggagtgaagagccaacaaagaacaaaataatcagtcttagatcccaaaaaggctcaaaaacagaaaagtccttgggcctctgaaagcaggggaaggaagattggaaaattccttgttggagataatgactgactcaggagaagaagccaacaggaactcaaatgctgctccctccctccttactcccagggaggcccacatatgacggtctctgctcaccccacccatggagtttccaggcagctctctcttaagtggggacagacagccaaggatcatctgagagttgaaggcagcctccaacataaaagaagccaaaagaggaggagcccagagagtaacagataatgaagggaccggaagaaaatatcctaaaactgcaatgactatacttagaaatataagattggctgggcgtggtggttcacacctgtaatcccagcactttgggaggttgaggcaggtagatcatgaggacaggagttcaagaccaacttggccaagatggtgaaaccctgtctatactaaaaatacaaaaattagctgggcgtggtggcacatgcctgtagtcccagctactcgggaggctgaggcaggagaattgcttgaaccccggaggcagaggttgcagtaagctgagatcatgccactgcactccagcctgggtgacagaaaaagactctgtatcaaaaaaaaaaaaaaaaaaaaagaaaagaaatagaagatattgcacccatgatacaaaaacaggatgctttttttgtttgttttttgggacagtcttgctctgttgcccaggctagagtacagtaacgtgatcactgctcattgcagcctggaccccttagctcaagtgatactcccacctcagcctcatgagtagctagaactataggtgcactgcaccacagccagctaactttttttgtttttttgtttttaattaagaaaatgtgggggaatggggtcttgccatgttccccagactggtcttgaactcctgggctcaagttatcctcccgccttggcctcccaaagtgctgggattacaagcatgagctatcacacccagccctggtttcttaataatacaccctgaaaactagaatacaggccatgggcaaggtggctcatgcctgtaatctcagcactttgggaggccgaggtgggcagatcacttagggtcaggagttccagaccagcctgggcaacgtggtgaaacaccatctctacaaaaaatacaaaaaccaccatctctacaaaaaatacaaaaaccagatgggtgttgtggcatgcacctgtagtcctagacagttgagatagtgaggcaagaggactgcttgagcctcagaggtagcggcggcagtcagcctgagccgtgttcctgccactgcattgcagcctgggtgacaaagtgagaccctgtctcaacaccaacaagcattcctctggatgctgaaacattgagaaaaagaaaaaacaaacaagaagaaaactgaaaacaatgaggcaatgccttcaaaattctaaagaaacattattttaaatgtagaattctatactctgccaagatgttttcagacacacaaaaaataaacttgctgtgctcctttctcagaaagctactggatgacaaattctactaaaacagaggatgaaacaaaggaaaaccaaaatatggcatccaggaaataagtgagtcccagggtgaaggtgcagggaagggccagaactaaaactttgcagcaggtcgaggacaaccaatccacattggagcaagctcaggaggccatcacgtgaggttaacaggttacctactgtatttgaccaatgagaggaggtttctatttctcatggtaaaagaataaaaacaaaaacaatgggccgggcgtggtggctcaagcctgtaatcccagcactttgggaggtggtggctcaagcctgtaatcccagcactttgggaggccgaggcgggcggatcacaaggtcagatccagaccatcctggctaacacggtgaaaccccatctctactaaaaatccaaaaaattagccgggcgtggtggcgggcgcctgtagtcccagctactcgggaggctgaggcaggagaatggcgtgaacccgggaggcggagcttgcagtgagccaagatcatgccactgcactccagcctgggtgacagagcaagactccgtctcaaaaaaaaaaaaaaaaaaaaaaatgctaggtgtggtggttcaggcctataattccagcactttgggaggctgaggtgggcagattgcttgagctcacgaccagtctaggtaacctggcgaaaccccgtctctacaaaaaaaatataaaaattagtcaggcgttgtaatcccagcacttcaggaggccgaggcaggtagatcacgaggtcaggagttcaagaccagcctggccaagatgatgaaaccgtctctaccaaaaataaaaaaattagacgggtgtggtggcacatgcctgtaatcccagctacttgggaggctaaggcaggagaatcgcttgaacccaggaggcggaggttgcagtgagcagagatcgtgccattgcactctagcctgggcaacaagagcgaaactctgcctcgaaaacaaaaaaaaaactaaattataatattctatagtaaacagtatagataatggctaaaatggaaaaattaagaaatagccatataagttcattctttgggaataaggaagtaagcacaggaagagctagctaaagaagttaaattgattacttctgggagtagacctcaagagtgcagaggggtagggcaggaccctaccaatttttattacaaatctaacttttaaaactatataggccaggcacggtggctcacacctataatcccagcactttgggaggccgaggtgggaggatcacttgagcccaggagttcaagaccagcctgggaaacatagaccgcatatctataaaaaaaattaaaaattagccaggcatggtggtacatacctatagtcccagctacttgcgaggctgaggcatgagaactgcttgagcctggggggcagaggttgcagtgagccaagacagtgccactgcactccagcctgtgcgacagactccatctcaaaaaaaaaaaaaaaaaattagctgggcgtggtagtgtgtgccttagtcccagctatgcaggaggctgaggcaggaggatcctttaggctaggaggttgaggctacagtgagctatgatcacaccactgcaccccagcctgggtgacagagcacagactttgtttaaaataaataaaaatatatatatatattttttaattttttattttttgagagtctccctctgtcgcccaggctggaatgcagtggcatgatctcagctcactgcaacctccgcctcctgggttcaagcaattctcctgcctcagcctcctgagtagctggaattacaggcgtgtgccaccacacccggctaattttttttctatttttagtagagacggggtttcaccatattggtcaggctggtctcaaactcctgaccttgtgatctgcccacctcggcctcccaaagtgctgggattacaggtgtgagccaccgcacctggctgaaaaaaaaaaaaactttaaaaaaaattataaagggaatagatgttccttgtaaaataatatttaaaccgtataatataaagtctcaaggtaaggttacttgtagagtggattttatgcatgtacactgagaggaaaacgccagcagggtgtttaggacagcagagactcaggagacagcataactgatgcagggaggtgctggcaggagggagggagccagaacttcctgcctcacggccttgactctctgtaaagatgtcaggcttctgttgagagtgatcggggagtagaggaaggtatagtagttgctacaaggaactgacttgcagggctgagcagagtcactgaaggcagctgaccaatgggaaactactgtttggtggtgattcaactcctggcgagacaggtctgagacaagtttggattttgatcctggttctgcctcttcattagctaaatatccttggccaaataacctaaacttgctgaacctcagaagtccacatgaaaaaactgaaaaggttgagtatcattccatgcttggggttcagctgtgtgagtgcagagtaaaagttattggcaagaaggtggtttaaataaggtcttcgttcattagaaatggaaacctggctcctgggcctgtaatcccagcacgttaggaggcccagacaggtggaaacagagacatagagaactcaacaaggaaggttctccttcaggccagggactcctcccctctctcacactcaaaaccatcaatatttgaagcaaaaaaggaaaaaaagttgccaagctttatttaggctgtaatggttacagataacacayatctaaccctatattccgtgcttcccatgcagtcccctaagcagactcagctaccctttccctccagtctcacttcttgtcttccyccttcttgtccttcttgccgtccttggtggcctgggaggccagggagcccatagcatttcgaatggcttcattgttgggatcyacacctsggaggttctctaggacactctgaaggaactckgggtcctgcatcacgtcgtaatcatcctcctcctgcaaacaggcagtgtgagctcaagggagggtatggagcggcaggaagtaagcaggtgttaaggacaggagcatgccrctgccagaggccccctgccttctgactgtgtggggatctgggcacctctggtcgacgtaaggaaaggacaagtcagcaaaatcctttatacagcatgaatgcagttattactaaccaaatagaggggcctgctgagaactctgttaattgagctctgaggagaaaaacagatgccatcacattgaggtttcctgctctcaagacacccagttctcctttttctttttcccagacccgcttttttccctcctgggaagacatcctagagaactgcccaggctgctcccaccagcaagaaaggaaaattacagaacaagaggacatttctccaactctgaccattagcattgctaccttagcaaggtttacatgtaagaaatgcaaatccatgtgtttccctctgctcctcaaaggacttagctatggtagaaatactcccagccccagagggatgaggatctaaattcaaggactttaaacctgatgggggcagggttgggtctcaccttggctggctcrgatgtgtccatagctgagctggcatcaatgtctgctgattccgcctggccaaactctgaggaagagaggtcagtctgttcagttacacttcctcaccccaacctctgcctaggcaccacccaggctctggctcacctgctccctgcagggacatctgcatggcataagcaatctgctcttcctcagtcatactgcttaggtcaggaagcccagtgcggccaaactcttgctggctgatggtcatcttcagcagggcatcgtctgagtctgggaaaaggaaaagaggagcagggtagaattggtgccatatccacacaggccagcctccaaggccattcctagcccagccctcccacatattcctaccctgtcagacctccacactctccctgcagtgcctacacccagctttcaatgtttagcatcccgcagtcccaggacttcggattccacctctttcaccttcagtcccagtcgtagcaatcccggcctcagcagcagaagctgcagctgcccgccgggcctcctcctcctgccgctgccgctgctcttccatagatacacgaagggcctggtgaagggcagggcataatcagggctcccctgccctcactcctacagggagctgggaaagtcagttggggtgtgggaaaggaacataaaggggcagcttctggtttatcacacagagaagaagctggagggataagcagtggtacgggattaaaaagtaaggacttgggagaagcctcggttttcatcagaagtgaacaagaaagcatctgacactggtgcccctagagatcagacagcattatagggaagaggyggcaaaaggaggtcttggaaaatgagtgattggtastgtctaggactatccagcctgatagaagctctgtgatgtgtgtgccagaagagaacaaagagggacctttggactctacctggggtcaacatttgctcaccaaggccagctcaggatcagcactgggatctactccaaattcaaagtcactggcaccaagacccagcatggcaccaccttcaccagccaaaatcggagaactgatgagagcatcagccaaactgggcccaggaggcactgtcaccagatgagaaccggttccatctttgccattcaaygtgtttacaaaggctgtcagcttttctgtgttcacctcctggggaggaaagaacacatgatgcccttcttcaggccttgctccctgttctttcccatttctgcactactctgccacagtacccgcactcctcagggttaaggaccattctgtttatgaccaaattaagtcaatgccctccaatcagtccctactcacctcttccccaaaattgataatgtcaacatttactttctccttcttgaggcgtttagccagtttcaccagctgggaagaaggggagaaaaatcaagaaatctgttccatactcgagggggggaaaggacccgccgcataaaagcatacagaaatctattgacctccccaaggtcctccaacagaatcactgaattctccacattcacctttccccaaagtgatgagcctgatgcctctgccaggttctcctgagggctggaagacctcagtcccaaacatgggctccccacattccccagctgccacttggactcacatccttctcattgtcctccactgggcttcccacaaaggcaatgatgcgcatcttgtgattcttgccttgtcggtgcttcagagccagcttgtaaagggagaggaagttctcagagttaaccagaggaatcactcagctctttcctctgtcactcggttccctttttcttacagtttctttgtacctgaagtacaccatctaccatcacgttcacacaagatttaacacccccacctcctccctttttgctatgactctctgtgcataaagaagggaggttaattctctttctctctttttttttttttgagatggagtctcgctctgtcgcccagtctggagtgcagtggcgtgatctcagttcactgcaacctccacctcccgggttccagcgattatcctgcctcagccttcctagtactggctaatttttatattttcagtagagatggggtttcaccacgttggccagattggtctcgaactcgtgacgtcaggtgatctgcccgtgttagcctcccaaagtgctgggattacaggtgtgagccaccgcgcccggcctttttttttttttttttagagaaacagggtctccctatgtgcccaggctggtcttgaactgctagccttcagcaatcctcctcccctggcctcccaaagtgatgggattacaggcatgaactaccacgcccagccttaattctcaattctagggatttttcccttcacaaccctcaactaccctgggattcatcccccatatcctttctactccaagttagctttctcttgctctggtcctagctcaggattccaggggagaaatgagtatgatggaggcaggacctcagagcagggaggaaaggtccagggaacccagtaggactcacatgggccacgcggatgcccgtgcagaaggtgatcttgcccttgggttggacagtatgtagcttggacaggatacggccagtgtctggggtgagtgtggtcagcacttcacagtcactgggatgtaggaaaagcatttcagtgaattcaggtcagcacaagtacctctaaactgtgtctaacttttatttatttattttttagacggagtctcactctgtcacccaggctggagtgcgtggcgtgatctcgggtcactgcaagctccgcctcccgggttcacgccattctcctgcctcagactcccaagtagctgggactacgggcacccactaccacgcctggctaattttttgtattttttttagtagagacggggtttcactgtgttagccaggatggtctcgatctcctgacctcgtaatccgcccaccttggccttccaaagtgctgggattacaggcgtgagccaccgcacctggcctgtgtctgacttttctttaaagacctggataataaccattatttctattctaattgtaatctctattcttcttttttattttttgagacagagtctcgctctgtcacccaggctggcgtgcagtggcgaatctcagctcactgcaacctccgcctcccgggttcaagtaattctcgtgcatcagcctcctgagtagctgggattacagatctacaccaccacgcccggctaatttttgtatttttagtagagacggggttttgccatgttggtcaggctggtctcgaaatcctgacctcaagtgatccgtctgccttggcctcccagaatgcagggattacaggcgtgagccactgtgcttggcctctattcttctcaatcaaacatctagtatttaatggaaaccaagcacagaaataattaagtggctggctttgtaagaaagctgccctctacttccaaatattttcccctaactccttttaaaggctcacagggccctgagaatccaccaaaataacgatgctaatttgtatctctcctgtcctctccacctccagacccattctcctagctaacagtatgtacactggagtgggaggctactcatttaagaattatcagttcctaaaacaaaacactttcagggtaaaaggatgagtgatatatgcccaggggctctgatccaaaaattacttttttctttttttttgaaatggagtctcattctgtcgcccaagctggtgtgcagtggtgtgatcttggctcactgcaacctccgcctcccgagttcaagcgattctcctgcctcagcctcctgagtagctggtattacaggtagccaccaccatgcctggctaatttttgtatttttagtagagacagggttttgtcctgttgcccaggctggtctcaaactcttgggattacagacatgagccactgtgcccagcccaaaatcacttttcactgactttaaaatatattatgaaatttcaccccctaccctagccctgcccaacaaacaataaaaagaaacagaaatttcaccccaggagatttagcttccgtactacattaaatacaggttaatacaaaaaacaagttgctattgacatttacactaaatagtgcagaaggcagtctaggaaggtgatgggcaaaagcagcttcatggaatctaaagaagagtagcatgtaacaaccacccacctactgagtcccctcctcctctgtcccccatacttagccagtgtgataaggcccacgttgttctcagggttgctgcgggtctttgaatgacaaactatgttgacagcatcctgctgggcctgcagcctggtgggtaagaagtctccattccgcatatactcactgttgtccacactgtcagattagggttgaaggacaagagagaagaaatgtagaagttttccaaaaccttctctccagttccagaggccccctatagcagcagtcttcatagcatcacctgtagctttttttcttttttaaatatacagatgatcaagccttagcccacatttattgactcagaataaccaatgaggaatttttttttttttttttttgagatagggtcttgctctgtcactcaggctggagtagagtggtgcactaatggctcactgcagyttccacctcctrggctcaagtgatcctctcacctcagcctcccaagtagctgggactataggtgcragccaccacgcagctaccttttaaattttttttgtagagacagggatctagctatgttgcccaagctggtcttgaacttctgagctcaagagatcctcctgcctccacctccccaagtkctgggataacaggtgtgagccacctggtgcccagccgaaaaaatttttaaatccttacaaaatgattctgatgagcaccaaaggtggtgatctactgatgaaccacagcaatttcttacaagctgcacttaagtgctactaagctttgtcatggataaatactctaagtctgccattaaatggcagtaatccaaatataggaaatgaagaaggtaacttaaaaatatctatagctgggcgcggtggctcatgtctgtaatcccagcactttgggaggccgaggcaggtggatcacctgaggtcaggagttcaagaccagcctgaccaacatggagaaaccctgtctctactaaaagtagaaaattagctgggcgtggtggcacatgcctgtaatcccagctactcgggaggctgaggcagaagaatcgcctgaacccaggagacggaggttgtggtgatcacaccattgtactccagcctgggcaacaagagcaaaacttcgtctcaaaaaaaaaaaaaaaaaaagaaaaagaaaaaaaaaatctataaaataggctgggcacagtgacttatgcctcccaagtgcatcccagcactttgggaggtggaggcgggtgtatcacctgaagtcaggagttagagaccagtgttggctaacattgtgaaaccccgtctctactaaaaatacaataattagccaggtatggtggcgcacacttgtagtcctagctactcaggaggttgaggcaggagaattgcttgaacccgggaggccgaggttgcagtgagtcaagatcacgccactgcactccagcctgggtgacagagtgagactccatcaaaaaaaaaaaaaaaaatctataaaatagggccaggcatggtggctcacaactgtaatcccagcactttggggggccgaggtgggcagatctcttgagctcaggagtttgagaccagcctggcaaacatggtgaaaccctatctctactaaaaaatataaaagttagccgggcgtggtggcaggcacctgtaatcccagctattcgggtggctgaggcaggagaatcacctgaacctgagaggtggaggctgcattgagccragatcgtgccactgcctcaaaaaaaagaggtctataaaataacacacacttggcagcactgagtgcagaaaartacaatgcaatcatctcattaaatgcttaacagctttgacagctgaactgaacggtaaaaatgaggttttgtggatctgaagtctcacctcttagatccctgcaacttttcatgatctaaaagtatccagctaatgtgaaatataatctcgagtttcccaaagaccagaagaaggcaggtaagtgatgcagttatataagctcctgtaaggatcaattcttgatgacctctgaggtccctgagagctctaatagttaaggttctacctgtgctaatggacggaagcagtgccttagatgagatacctcatttctttcttttttttttttttgagacagagtttcgctcttgttgcccaggctggagtgcaatggctcgatctcggctcaccgcaacctccgcctaccaggttcaagcaattctcctccctcagcctcctaagtagctgggataacaggcatgcaaccaccatacccggctaattttgtatttttagtagagacggggttcctccatgttggtcaggttggtctcaaactcccaacctcaggtgatccacccacctcaatctaccaaagtgctgggattacaggcatgagccaccacacttggccctcatttcttctttttagaattttatctattttttaggctgggcatggtggctcacgtctgtaatcccagcactttgggaggccgagaagggagaatcgcttgagcccaggagttggagaacagcctgggcaacacaggaagacccagtctctaccaaaaaaaaccacattttttatttattttttattttatagagatggagtctcactttgttgcccaggctagtcacaaactcctagactcatgtagtcctcctgccttggcctctcaaagtgctgggattacaggtgtgagccacggcacctagccaagacatctcatttctattggcaagcaaaatgtgagcctggggcaatttttttttctttagtatgctttgtttggcaataaaccaaaaatggtaaagagaagtaattaagaaggtactggaaaacaagtattaacagaaaagggaatatataggttaagtacacttaatcagaaactcttgagatccgaaatgccccaaatcagaaagtttttgagttttgagtgctgacatgatgttcaaaggaaattatcactggagcacttcagacttccagattagggatactccgctggttaagtataatgtacatattctaaaatctgacaaaaatccaaaatctgaaacacttatggtcctagccatttcagatagggaatactcaacctgtctagggtagtattcaggcacaggttcaagcgcaggcacaggttcaagcgcagtcacagctcactgtagcctcaacctcccaggctcaatagatcttcccacttcagcttcccgggtagctgggaccacaggcgtgcaccaccatgccagctaatttttgtatttttagtagagacggggtttcactatgttggccaggttggtcttgagctcctgacctctgatgatccgcccacctcaacctctcaaagtgctgggattacaggtgtaagccaccgcacctggccatttcacatatttttttgagacaggatcttgctctgtcacccaggctggaggccagtggtgaaatcatagctcactgtaacctcaaactcctgggcttaaccccttctcctgcctcagcctcctaagtagctgggattaccgccaaaacctttattttaaaagagaatacaggctgggtgtgatggttcatgcctgtaatcccagcacttagggagtccaaggagggaggctctcttgagcccaagagttcgagaccagcctaatcaatatgacaaaaccccatctctacaaaaaatacaaaaaatagctgggcatggtggtaagtgcctgtagtcccagctattcaggaggctgaggcaggaggatcacttgagccccggaggtcgaggctgcagtgagccaagatcacactactgcactccagcctgggtgacagaatgagaccctgtctcccccaaaaaaaaaaaaaaaaaaaaaaacactcgaaaagggtaatacaatggcacatgtgcaaggcagtcacatcaacagcaggttccccatgatgcactacatggggccaagaactatgtgcatactgccacaaaaagaataaaataccttggctgggtgttgtggctcatgcctgtaatctcagcactttgggaggctgaggctggtggatcacctgaggtcaagtgttcgagaccagcctgaccaatatgatgaaacctcatctctactaaaaatacagaaaaaaattacccgggcatggtggcacgcacctgtaatcccagctactcgggaggctgagacaggagaatcatttgaacccgggaggtggaggttgcagtgagccgagatggcgccactgcactccagcctgggcaacaaaagcgagactccatctcaaaaaaacaaacaaatagacaaacaaacctaggaatacaactaascagggagatgaaagagctctacaatgagaattacaaaataccgctcaaataaatcaaagaagatataaacaagtggaaaaacatctcatgctcatgaataggaagaatcaatatcattaaaatggccatactgccgagcatggtggctcacacctgtaattccagcactttgggaggctgaggtgggcagatcacttgaggccaggagttcaagaccagcctggccacatggccaaaccccatctttactaaaaatccaaaaaaaaaaaaaaaaaaaaaagaaagccaggtatggtggcgggtgcctggaatcccagctactcagaaggctgaggcacaataatcacttgaacctgagaggcggaggttgcaatgagccgagatcacaccactgcactccagcctgggagacagagcaagactctgtctcataaattaattaattaattaattaaaattggccattcttcccacagcaatttacagattcaatgctactcctatcaaactaccaaaaacattcttcaaagaactagaaaaaactatttgaaaattcatatggaaccaacaaagagccagaaaagccaaggcaatcctaagctaaaagaacaaagctggaggcaactttacccaacttcaaactattacttagggctacaataaccaaaaccgcatggcactggtacaaaaacaggcacagagaccaatgggacagaatagagagtctagaaataaagccgcacacctatgaccatctattctttgacaaagctgacaaaacaagcagtgaggaaaaagagtccctattcaataactggggatactggctaggctagccatatgcagaagattgaagctggactcctttcttataccatacacaaaaattaactgaagatggattaaagacaaggtaaaacccaaaactataaaaatcctggaagaccggccgggcacagtggctcacgcctataatgccagcactttgggaggctgaggcgggcggatcacctgagggtgggagttcgagaccagcctgaccaacatggagaaacctggtctctactaaaaacacaaaattagctgggcgtggtggcgcatgcctgtaatcccagctactaaggaggctgaggcaggagaatcgcttgaacacgggaggcggaggttgcggtgagccgaaggttgcggggagctgagattgtgtcattgcactccagcctgggcaataagagcgaaaaaaaaaaaaagtgggcaaaggagccgggcacagtggctcaacgcctgtaatccctgcactttgggaggctgaggcgggtggatcacctgagctcagcagtttgagactagcctggccaacatgatgaaaccccgtctctaccaaaaatacaaaaaagctgggcgtggtggcgggcacctgtaatcccagttactcaggaggctgaggcaggagaatcacttgaaccagggaggcggaggttgcagtgagctgagatggcgccactgtactccaacctgggcaacaagagcaaaactccttctcaaagagaaaaaaaaaaaaaaaagtgggcaaaggacatgaacagacatcagacactttatttttatttatttatttatttatttatttattttattattatttttttttttttgagagggagtctcactctgtcgcccaggctagagtgcagtggcgccatctcggctcactgcaacctccacctccggggttcaaacgattctcccacctcagcctctggagtagctgggactacaggcgtccaccaccacgcctggctaatttttgtatttttagtagagatggggtttcaccatgttggccaggctggtcagtaactcctgacctcaggtgatacacccacttcagccttccaaagtgctgggattacaggcctgagccacgccccagccagacacttttcaaaagacgatatacatacagccaacaagcctattaaaaaaacctcaatatcactgatcattagagaaatgcaaataaatcaaaaccacaacgagataccacctaacaccagtcagaatggctattactaaaaactaaaaaaataacagatgctggcaaggttgcgagaaaagagaacactgttctatcgttggtgcaagtgtaaattagttcaatcactgggaatcacttgaaccagggaggcggaggctgcagtgagccagactgggccactgcactccagtccgggagacagagcgagaccgtctcaaaaaaaaattattcatcgtttatctgaaactcaaatttcactgggcatcctgtatgttatctggcaatgctatgctcccccgagaaaataaaaagaagaaatctcataggtgcctgtttcacccaatcggtgatttgtgttcgtcaactattctgtattacattcagtgattacacttagaaggaactcttgaaaccctgcaaaaatttatgtcctcctcttctaatgtgactcgtaataggtactcagcccaagcctgaaactgacaaagagagctacctcaccggataaagcctttgtgtcagacagccgtgggtttaaatcttgactccaccacttaactagctgtatgattttggacaaatcacttaaaatcgctgagactcggtatcctgaaccgtaaaatggagagataatttaccttaaggtgtggttgtgaggtataagtgagataaacaaaatgactgatacataaaaagcaatctgtaaatggtacctttgaagatgatacagggaaaggtaatgaagttagagacgagggaatggggagaggaagggattaataatctattttcctaatagacgttattttgcaaagaaaggagggcagaaaactattacgatgagtccgaaaagcagaactgtagctaaagacagacccgggctgctctagagaagacggcgctagaacagagaaaggaagcaggaatgaccagtcaatgaccgtccccctgggggtaacagtggtaacccgggactatccgccactccagggccccgggatgactcagggagtccagcgggctccttacctccggggccagggccgcctctcgcccatgagccccyggcccccaccccaggccctccctgccttggcgctacacgcgcccggaacccagctctgcccctcctgccccgaagtagctcctcaccacaccatagtgctttccaacaccatcttgccaccttcctccctcccgaccgggtctccgggacggcctaacaacaactcctccaattggcccgtcgctcttcaccaatcacagacctcggcttggccagctgcttccgcctccgtcccccacgttgcgttctgggagttgtaggtgccgccaaacaaatttgtaggcgtcttgagggtagttgaagggaatcgcggtaacacaaaaaacaggatctagcctccactttccctgccattgcagttctcagttggggtttcccgctggccggatctcaggggagctatggaggaacctttgaaagtgctgtgtcgattccggcttcggcattttaaaaaagtgtcgggatcggccgagcgcggtggctcacgcctgttagcccagcactttgggaggccaaggcgggcggatcacgaggtcaggagttcgagaccagcctggccagcatggtgaaaccctgtctctactaaaaatacaaaaaattagccgggcatggtggcgcacgcctgtaatccccgctactcgggaggctgaggcaggagaattacttgaacccgggaggcagagattgcagtgagccgagatcgcgccactgcactccagcctgggggacagagtgagactccgtctcaaaaaaagaaaaaaaaaagtgtcgggatcgctaatgactttctacagccctcagttccctgtagaattttaattcaacaagcccttatacccttcaattgaatttatttgtatatttatctcctccctcgtttaactaagggtgggcaacgtgcctttttttttttttttttttttttttttttttttttttttgagacggaggagtctcgctctttcacccaggctagagtgcagtggctcgatctcggctcactgcaacctccacctcctgggttccagggattctcctgcctcagcctcccaggtagctgggactacaggggcattccaccatgcccggctaattttgtatttttagtagagacgaggtttcaccatgttggccaggctggtctcgatttcctgacctcagatgatccacccacctcagcttcccaaagtgctgggattacaggcgtgagccaccacacctggccggcaacgtgtcttaatctttacaattccctaagcccagtacagagcccggaaaagatttgacaactcaattatattaactaatctgccaaagaacaaaccactaaaccgttttggttaatcaaaaattacattcaaggcctgatgcaatggcttaggttttataatcccagcgttttgggaggcccaggcaggaggatcaactcaggctaggagtctgagaccagcctggacaacacagccagactccgtctctacaaagttttattgtttgagacagggtgtcgctctgttgcccagattggagtgcagtggcctgatctcggctcactgcaatctccacctcccgggttcaagccatcctcctgcctcagcctcctgagtagctggggctataggtgcatgccaccaagcccagctaatttgtttttaattttttgatgtgggaggatggcttgagcgcatgagttcgagaccagcgtaggcaacatagccagaccccatctctgaaaaaaaaaaagtctcaaagtgttgggattacaggcgtgagccatcacatcagctggatatttgatattaagcaatttttttaggcatgataatagtgttaaagttatcacccttataaaagtaggctttattaagggttatatgttgtattcatagataaaaaaagtatatgaagtttgggatttaacttaatcctctggaagaaacaaatagttttgttttttgagacagggtctcaaagtaaaacaaaagagacaaggtctcactgggctggagtgcagcagtggtgcaatcatacatagctcactgcaacctctaactcctggcctcccatctcagcctccgaaaactgggattacaggcttgagccactgcacccggccacgctggtcttatttatgttgataattattgaggctgggttatgtgtacatagtggttcaccatactactctacttttggtttggaaattcccataatgaaaaaaagaaggccagctgggcacggtggctcacgcctgtaatcccagcactgagaggccgaggtgggcagatcacttgaggttgggagtccgagaccagcctggatacccccgtcgctacaaaaaaatacaaaaattagctgattgtgatggtgccagcctgtagtcccagctacttgagagactgaggtaggaaagtcgcctgagcccagaaagtcaaggctagagtgagctgagattgctctgggtaacagagcaagactaaaaaagaaaaccaaggctgggaaatctcagcactttgggaggccgaggcggacggatcataagttcaggagatcgagaacatcttggccaacatggtgaaatcccatcctactaaagatacaaaaattagccgggcattgtggtgggtgcctatagtcccagctactctggaggctgaggcaggagaatcacttgaatccgggaggaaaaggttgcagtgagccgagatcgtgctattgtactccaacctgcgcgacaagagtgaaactccgtctcaaaaaaagaaaaacaaaactaataaagaatgagacttcatctctgaatacatctcagaatagctgagattgacatgcttaagggtaaaatatcagaccagatgacgatttccaactttattatcctatgattttaatttctcttttagttagaagttttacactaatagaccctacttgtatctgaatataaattagagcatatagctagagaataagcactagtcgctgctcaccgctagagggaccctctgatcataagaggattatctacaccacccattcagtagttttgagtacactctgagtgacaaggtcagggatgcagaacatttatgcctaaaacatgttaacctccaattcctattagggaaaaaagttttctccttatccagacaaaaggaggactggctggggctgtgggaaaatcaaattcaaaactttgagaatctgggccgaatgcagtggctcacgcctgtaatcccagcactttgggaggccgaggtgagcggatcacttgaggctaggagtttgagaccagcctggccaacatggtgaaatctgtctcaaaaaaaaaaaaaaaaaaaagaaagaaagaaagaaaaagaaaagaaaaatgaaaagaaactttgagaatcccccattcctcttccaatccaagtacttgctttttctttcttctttttttttttttttttttttttgagatggagtgtcactctgttgccagggtggagtgcaatgaatggtgcaatctcagctcactgcaacctctgcctcctgggttcaagcgattctcctgtctcagcctcccgagtagctgggattacaggcgcccgccaccatgcccggttaattttttttttttttttttttttttgagaaggagtttcactcttgctgcccaggctggagtgcaagggctcgatcttggctcaccgcaacctctgcctctcaggttcaagcgattgtcttgcctcagcatcccaagtagctgggattacaggcgtgcgcccaccacgcccagctaattttttgtatttttagtaaagatgggttttctccatgttggtcatgctggttctccctgttggtcgaactcccaacctcagatgatctgctcgcctcgtcatcccaaagtgccgggattacgagcgtgagccaccgcgcctggcctaatttttgtatttttagtagagatggtgtttcgcattgttggccaggctgctcttgaactcctggcctcaagtgatccacccatcttggcctcccaaagtgctgggattacaggtgtgagccactggacttggccaatcctctgtttaattctgatggaactttgttagtctctcaattattttgtatcacatcctattggggcaaaaaatatttcagggttcccaatattgcctctaactatacttattccaatattctcatcatgatctcttccttgttctcaaaaacagaccattctcatgcatctaggtccttgtgctgaagtgaaacattctcttaacacttctttcgcacgtaactgctaatttttcccccttttatgttctgtgccaccttcagagagcttaagtagctgtctcacatataacatattgtttttgtgatttgtgttcctcctggaaactagaaacttttgaaggacaattatttctttgatctccatctactccatgcattgctcattagctgctatataaatatttggagtgcccttaacaagatagggaatagtggtatgaaaagcagctgtttgcttaactgcttctctccaaaggttccctatcttcatgcctcagaatgaacctcaccgctccttttttttttttttttttttagacagtctcagtcgcctaggctggagtgcactggcgcaatcttcgctcactgcaacctctgcttcccaggttcaagcaattctccagccttgacctccaaagtagctgggactacaggcgcatgccaccatcccctgctaattttcaataaacggggttttgccatgttggctgggctggtctcgaactcctgacctcaggtgatccacctgcctccacctcccaaagtgctgggattacaggtgtgagccaccgcgcctggcccgcccctacttttttgtctagtttcctatcaaaggagccttagctcaacctcacaaaagaaaacagctaaagaaagcaatctctatgatcttctaagagtgacgccctagggccaggtcaagagaacgaaagggagggaatcactagggccagctaacctcaaacttacttttcccactgtccctctcctttcctcacttaactgagtaaagtgagttttgaacctcaaatccctgttaaattgggttgcaacctaggcaagagacctacagtaactcccctcatattcattcactgcttttcctcgtgaagataatggggttgctgaggaagaggatataaggacataaagccttaagagtgaagctggagtgttgcaagctggaaagtatgcagcctttgtttagggcaacatgaacaaaactgagcctgggtggtggagtaggagggtgagcagatggtatatgaaaaagaatcagaaaaaataagaggtctaaataactcattaaagtttattacattaaaaccatatatcacttttatattgtatttgccatttctgaacaatacaaagtagaggcaaatagtaacacttaataaaaatgttgcttccccattcctttccctaagacccagccctccctcaaatattccctcccacccctaacagaactctgtccttaataaaacacttaaatacatcataaatagtaaattatgaaaaaaaaatagcaagaattctttccttcttgtaaaaaacatggcagcaaagacaggcagccagaaactggctgggggtgtctaatatagacagttatttggggtatgggctaacatattatcaaggcagggtgggatagagaagggatagaacaggaattcaacaatctgcctgagataccaggcccccttcttcccctgacaagagtggaaggatcagatggaaaaccacaactcttgtagacggggaggagagggcatatgtagcccccatttccaacttccctgcatgaagacaggggggtaggacatatggcacagcaatgacctcaccaaggcaagaatctgctgtctccccatgagtttaagaaaatatttgctggcctcacagatatggactgtctgttaaacagacagaagtgtcccctctttaccttagctccacaaacaggagaacactgttggaaaagatgagaagagcaaaaaaaatctcctctggagaatgatctaaaattcatttggtaagtcttcacatttagaaaaacaaccagaatatatttcaaattgcaaaatagtaataattactatagcctggcagtgaa

SEQ ID NO: 96442 - DNA, 21497 bp, Homo sapiens
caggagggagatggataagaggagtgttacaagttgaattgtgttcccaaaaatgatgctttgaaatcctaaccccatggtacctctgaatataaccttacttgaaaatagggtctccactgatgtaaccaagttaaaatgagatcatgctggattagggtcagccgtaatccaatgattggtgtccttataagaagagcaaaattgggacacacagacacacatgcaagaagaatgccatgtgatgatggcagcagagactggagcaatgtatccacaggccaaggaacctgggagagaggcagggaactgatcctccttcagagcttccagaaatgagccaaccctgccaacatcttgatttctgactacggaactgggagtgaacaggttcctgttgttttaagccacctagtttgtggtactatattacatggcagccataggaaactaattaaaaaaactgtatcagtcatttttaggagacacgataatactcttgggcccagctggccagttaaaaaaggctcaggttggtggggcacggtggcttacacctgtaatcccagcactttgggaggccgaggcaggaggatcacttgaggtcaaggagttcaagaccagcctggccaacatggtgaaaccctgtctctactaaaaacacaaaaattagctgggcctggtggcatgtgcctgtaatcccagctacttgggaggctgacacaggagaatcgcttgaaccagggaggcggaggttgcagtgagctgagatcacgccactgcactccaaccggggcaacagagcgagacactgtctccagaaaaaaaaaaaaggctcaggtgaactccagcactttgccagagacatggtttcccacacatcattaagattctactagtggaagtaatcgaccccaatagcatcattctctttactaactaacattatcctctggcttaagagagctggtgctatggttctgggatatgttggaagtctgtgcagaggggtgcagcagcctccccaacaatccctcagtgacccggccggaggtcaaaccagcaccgccagttatccagcccaaagatttgcactgattgctctctcactcacacggcctggcatgggaaagggaagcaatatggccttgcagtcacgttgttccacaagcagcacggctgagagaaccaactcaatggctgactttatttggctgcatgcctggagaaaaataatattatagtagttgaaataattagaaatagctaaatggacattgatgggagccaaaagggttactgaaaccaacagtcctcatagtaagtgaaactgctaaggtaattcttccagtgcaggactctccttcctcatacccagccccaggagacacaataggattagagggataggaatttggctattgtgccaagagccaaaattacagtccctcactaggtactgtagcaaaaatctagctcccgctgcatatagaggtgctcaaatgtgttgttttgattttgcttgtagacttttggaaggtctctttactatggttttattttccactcctatgatagtagccctagctgttatgttcattcccactgataggaaaggtggggttaacgttttatgggtctgcagcagaggccacctcctgagaaggagtagataggatctcacccaaaggaaggggaagagtaggacccaagttttctgaaaaatgcacttcaaggactcagattcaggaaagtcatggaggtgatagaagccctggagctcggggctagaagctgagaagaatcctgaactaaatcaaactccagatcgcttccctctgagaacacaaaatgccacccctctgcctgccttcagcaaaaatctatgctctcgccccatagagaggtgctcaaatgtgtttagattttgcttgcagacttttggaaggtctctttactatggtttattttccactcctgtgatagtagccctagctgttatgttaattctcactgataggaaaggtggggttaaagttttatgggtctgcagcagaggccacctcctgagaaggagtagataggatctcacccaaaggaaggagaaggctaggatcccaggaagggggtggggcaccaccccagtcctgacaattagctccaggagaccagtcaagaagcgcaattgactacagaaggagcaggattgaaataaaaagataaaaaataaaaagaagcagctcaattgaatgggagtattgcggaagataaaaatggtagtttattttttcacttgacagaagaagaaacacaagaactaagatggtgcctgccactgtgtttcaagactgtgggtctttataattaattattttgttcttcatttatactaattggccttttaaaaatttcaagtgtttcattcaaatgtgaaaatcatcagagctgctatgggggatggtgatgtctgaagtccctagactctcaagtaaagagagatttgaattttcctttcacaagaaaacccattctctcatacctctccgcacaggtgtccaggaggtaataggtaaaggtcaagccccttgcgagagagccctgactacagcccagttcccatctccctcccttcagtcaccacctgccactcaggcactggtcatgccctgccccatgtcctcaaacagtaaggaagagaagatgccacattagaccagccaggaacccactggcccaattcatcagttctgggtctccagatacaaatcagcatcctgcagagcagccactgatgtcttacacactttaattaaatacctgaaatttttaaaaggcaaactagtgggccgggcgtggtggctcatgcctgtaatcccagcactttgggaggctgaggcgggtggatcacaagatcaggagatcgagaccatcctggctaacacggtgaaaccccatctctactaaaaatacaaaaaaattagccaggtgtgttggcgggcacctgtagtcccacctactcgggaggctgaggcaggagaatggcgtgaacccaggaggcagagcttgcagtgagccgagatcacgccactgcactccagcctgggcaacagaacgagactccatctcaaaaaaaaaaaaaaaaaaaggcaaactagcttaaataaagaacaaaatattaattatctgtaagacccagaagcataaaaactgtcaaacatgagacaaagaagtttctaaggtgataaatatatactctagtctctataggaccacccaaacttctcaagcacctgtggactctgcccctatccagcttgggactaatgagttttcctggattggttctcatgatagcttggtagttatgcccaattttaccttctgttgagaacaaagtgagttaatagaatgagctgtcccctatacaacaagttaatggacattttcgagccattaagagtaggtccctagtcacgcttctttccattcactcatccattgcccaacactacaaaacttcccaacaaaaacttcccagctagaagccaagacagtctgtgacttgatgaacagaggggtaagctgcttcttactgtgataaaatctaagacctcaggcttccacacccacatataataaaaagaattccccaaacatacagcctagtgagtgtctgaattgtttcaaatgtttgttcactggttgccatttctcagacccactcatgaaatatcactttggccagatctgcaggagaacaaacccagtgtacctagaagcccagagtttgagtaactttggtgtcaagatagcaatagatgcagagaaaaggagagaagacagaaaagtccatgatcagagatctacctgctgaaccaacctgaaactgaacttcacagaatccagtgtctaagtccaagttaagggacatgatgatgtctaaataaaaccccaaatcctaactaaggacacaattcctaccactgtacacctcttctcccgtggaaaagagctacctttctagaggaaacagtatggggtccttcaatcccaaagtggcagccttttcctcctgagtagtaaaagaagcattctgagaaggtgattgtgccatccaaaccttggaaagcaaatgggaaaagggaaaaagaaaactagattttccccccagagcaaagctcacagcagagcacattcctcacccttttcctttcaactggacaaaaccagcttgctcctgtgcacaagcctaattcctgaacatgaactacaatgaaactaaccaggggggaaagagaccaaatgagaaaagggggaatccattaagaaacgcttgaaggctgggggcagtggctcacgcctgttaatcccagcactttgggaggccgaggcagaaggattgtttgagcccaggagttcgagcctgaccaacatagtgagacctcgtctctacaaaaaaaaagtcaaagaatgagacaggaggattgcttgagcccgggaggtggaggctgcagtgagcagtgattgcaccaatgcactcccacctgggtgacagagtgagaccctgcctaaagaaaaagaaacacttggagacaagatggcatcttccggatccttgcctacagctatgcagggcagccagcagctgtgcattattttgcactctcagccatgaaggaattcaggcaatccttcaggaacctacacagtaaattcttttcttgcagaataaatgcctgcttctgaccttgtttattctgcctcagagcattgcataatctcctggtcctaatgtaccaagaacagagttcagtggcctctaggcatcacttcctaagaatctgcaggtaagaacttgcgctgcttctgcttgctaaattctgcttctcagaatttagaatgaatgcttcctctttacatcattccacataagagcccttctatagcaactcctttgccactgcgcctaaaatagcaacagttttgcactaaccactgcatcaaataaatactttccaatagcaataagatgattttgctgttaaatattcattttttttttttttgagatggagtcttctgttgcccaggttggagtgcaatggtgcgatctcggctcactgcaacctccgcctcctgggttcaagcgattctcctgcctcagcctcccgagtagctgggattagaggcacctgccaccatgcccggctaatttttgtatttttggtggagacagggtttcaccatattggacaggctggtcttgaactcctgacctcaggtgatctgcctgcctcggcccccaagtagctgttaaattttcaatacattactaggactaggttttaatatcctgtttatgtgaatttccacaagaactggaaaaatgtcattaaaatggacaggcaatctgtatgagtcaagatacctgctacaactaaacacacacacacacatgcacacattgtttcccatccttaacccattaccccaaacataaccctacaatttcttttggcctcaattataagggaaaatgtattcaggttttgctttttgcttctttgacaatctaaaaatgctatacctaaagttttacaccatatatatatatacccacaatattgttatcatttatattttaaaaataattatatgtgcatctgtttatatattagcagaacatctttgtgatgattcacaagaaattgataataaatacaagataatagatgtgggagggaggcttgcttttcactatatatatatatatatatatatattttttttttttttttaagagagacaaggtctcactatgtttcccaggctggtttcaaactcctgaactcaagcaatcttccagtctcagcctcccaaagtgctgggattacaggcatgagccaccccacctggtctccctgtatatatttttgtgcttttgagttttgaacaatgtgcctatattgtgtatttgtaattaaaatgttgggaggctgaggcaggagaatggtgtgaacccaggaggcggagcttgcagtgagccgagatcgtgccactgcaccccagcctgggtgacaaagcgagactctgtctcagaaaaaaaataaataaataaaattaaaatgttgcatgtagaatgaaatcctccttgtaaaatacatgggtacatgggtgtacatcccatcagtcccaggcatcagtaggccatccacagaccatgttctggggagcccagccagcagcgcctcacacacagcagccactaaccgcgtcagagcctccctcactcttcgccctccatgtgcttggcaagacactaggaaaaggtctccaaggaaatcatcaggactgaaaaccaacacactcatatttgaatttgcccaatgtcaccagtttgagaaaggcctttctctgctagagggtaaggggaaagctggggccagaatgtgaggacagagactgcctgggcagattgttcttgccaacatcctaatcctcagctgtgaagctgagagggaaccatggggtggggctggggtgtcaatcaagataaacagaccatgaatgacagcatggcaggactttctcatctttctgaagggaagtcagaatttggaagcagattccatctgcatgctgatcctttccccaacatcacccagtcatttatagcactcctttctctcccccatagccacctggatcaagcccacttaygcagtccatagagccaactccctgttacttgtcaagtttcctccctgggcagaggagggtttcactagccaagtcagctgaatcacggaatgtgttgaatcgttcgagaaagccaagccaatccatacgctacgctctgcacagcgtacagaggaaactgaacctaaaacccttgcagaccagcagagctgtgccacgtgtaaggatrtggtcagggcagcggcacgcaggcccaacctggggctctgagtctccttgctctaagcctgccaggctcttccctgtcttcttgctcagccaattaataccacgcctcattcagtccttcctgaccctcaggggttaccgctctcctcaggacacctccactcaaaaggagctgaggcgtgtcccatctatgtttctgatgactccttggtcccttgtctccgtatgagtgagcagtctctgcagctcttcctgatcacccgagagatgcatagcttcaagaccctaccagctgtagcaaaaccaaaacaacattcactgtggggagtgggacaagggatgatatgtcttgttattttactccttgaacttggatcatactccttcctgtgggaggccccttttcatttaatctacaaatgttaagaaatgtacagagaaacattgcaattcatagtatttatctggaataccagctgacctatgtattcaggccaaatgctgagtttgaartgagaatcagtgcaggtcccagaggatttgttttccctctttgctgccccaaaggtacattgtcatggcctacagagcaagaacaagaagkgaagactgtgtcctaagagtccaactcaaacagtgtatcatgcttgagaaaaagataattttttatagatcaaaggcatatgggctgggcacagtggctcatgcctgtaatcccagcaatttgggaggctaagggaggaggatgttttgaacccaggagtttgagaccagcctaggcaacacagcaagacccccgtctctacaaaatgaaataaattagtccatgtggtagcacatgcctgtagtccagrtactcaggaagctgcagtagtgggaggatctgtttggcccaggaggttgaggytgcagtgagccatgatcatgccactgcagtccaacctgagtgacagtgagaccctrcctcaaaaaaaagtcatatggagaaatttgcagtccaaccsagaatcacaccaagtaaattgtaatctcttatagtaaatgctcagaaaatacaggtgaatcaatgtgttgcaatgaaaattcacctaaactttcacgtatggctagcccaggaactcacccatcacagactcatgatgatgaatcaatgcataaattgttctcacatttggttcaactacatcccaaaatgtgtgagcctcagagaaacatttatcagtggaaacctgcagctattaagaaagttgtataaaataatgcagtgtctacaataatttcagacttcccaaaattttatttcttcattgttcagtcagttagtatgttgatgatacaggcattgagaattcttactaaaattctcagtttgcatttttgtatgaatactctggacttacaaaaagtaaagcaaacttgagtcaaaatgagatcaaagttatccrtacatcgtataactgagacttgtttaagcaaggcacagtgctatttgatggagtggggaagaggacatgaagaatagaagtcacaacacagattcgcccacagcgactcacgtccctattctctagcacgcgccccggttcagcccgggccctcactcccagcctcctgaggygggtcactgagcttgcaggcagaatgtgggtggggctgccccacctctctctcaacctcactgagctgactagtggaccttgaagtcctcccctcggctgaactcagtcaccacatttctctgttcctgcttccaagtcactgactgatggtggggtggaggacactcaaacaggccttacaaattcccgctattcaatctcagcagaccctccctgcaggccgatcgagggtcctcgccacccagatgctctcagcagaccctccctgcagaccgatcaagggtcctcgccacccagatgcacacaatagctcttctgaaattcacttttccctagtactcagtctcagccttcctgtctctcatgcagagrgatcgtcagaaatgcagcccctcaactcctcccacctcggaggatccttatgtctttatgcagactttcttccctcttctgcctaagaaaggtcgagaatacgacacaggggtccgtaactccctgcctgaaaatatatccttctgcctckgatgacttcatctcagactgccctgcctctctccttctgcatgttttatttccttatatcctggcttttctttcttccccacactccatccctgggaaatttcactaattctcatgaatttgtcggaaaactcactaaatctgcaactccatctcttctctctctggatctctagactctactttgcaacttttgcttcaacttttccaaatgcatgttccacgaatacctcaaacccaattctgctcaagcaagacccaatctcttcttccacttctccctgttccccctctgttaatcaatgacatcaacatcactaccccatctagaaactgactgacagcctcatctcctgcctctctggatcaaccaccacgtctgtacaaaaaccatgcttctggccaggcacagtggctcacaactgtaatcccagcacttggaaggccaaggagggtggatcacctgaggtcaggagctcgagaccagcctggccaacacagcaaaactccatctctactaaaaatacaaaaatgagctaggcgtgtaatcccagctacttgggaggctgaggcaggagaatcttttttttttttttttttttttttttgagacggagtctcactctgtcgctcaggctggagtccagtggcacgatctcagctcactgcaagctgtgcctcccgggttcacgccattctcctgcctcagcctcccgagtagctgggactacaggcgcccgccaccaggcccagctaatttttttgtatttttagtagagacggggtttcaccgtgttagccaggatggtctcgatctcctgatcttgtgatccacccgcctcagcctcccaaagtgctgggattacaggtgtgagccaccgcgcccggcagaggcgggagaatcttgaatctgggaggtggaggctgcggtaagccaggattgcaccactgtactccagcctgggcaacagagtaagactctgtctcaaaaagaaaaaaacaaacaaacccaaaaccatgagtctcatgcctctaattccagcactttgagaggccaaggcaggcgggttgcttgagctcggagttcaagaccagcctgggcaacatggcgaaactccatctctacaaaaaatacaaaatgtagccgggcatggtagctcacgccagcagtcccagctactagggaggctgaggagggaggatcgcttgagcctgggaggcagaggttgcagtgaactgagatcgcaccaccgcacttgagcctaggtgacataaccagaccgtgtctcaaacaaacaaacaaacaaacaaacaaaaaacaaaaaaaaacccgccatgcttctcctgggctgcccgaagccagtgactaagctctgccggaaaactaatgcagactcattcattctctggagatataagactcctcccatgggcagctgtagctccaggactccatgtgggcctgatggaaactctcttagatctgttctgtactgtaagactcttcctacccagtcttyattctgcttctctccccttccaccaaagttagacctgcattagtttggaggctccccttccctctcccgcttctccccctccctctcctctgatctcagaggcactctgcaaaacacaggatcaatccttccacttccctctatagtaacttttcctgtctacccattacttagaggggggaaaataaatcccttttggctctgagccctccatattgtggccccataccttgtttttcatgtccctctgcaatctaacattctaaccacatggtctattcaccgtccctcaaataaccacgtatttccacacttccatgcctctgctcatgccataacttcagacgaagtctccatcctatttgcagacccatcaaactattcaatatctatttccttataagttataacctatagctggggatatctttatcatcttttacctcctgacttttgtacaccaagtgcctgaagcagtatcttatcttctacatctgactctcaataagtgcagaatggaagcagatggaggaagctgtagaaggagatttggcaatagtaccttaataacccactgataacaaaggtgatagcaaacaccaatccaaaaaccaaaagctaagcagtctagggcactttatgtatgggcaaatggtcctatgtaccataatagccctcaagaatagcactatatttataatacagtataattgatttcagtttgatagcactgaatatgttttgaggttagagtaagttatagtcataccgctgcactctagtctgggtgacagtgcaagaccctgtctctaaataataataataataggatctgggtgtggtggctcacacttacaaccccagcatgttggcagaccaaaatgagagaatcatttaagcccagaagcttgagaccagcctgggcaacatattgagacccccatgtctacaaaaaaatttaaaaaattagccaggtgctgtggtyctccttgtggtctaagctacttggaaggctgaggtgacaggactgcctgagccggagaggtcgaggttgcacagagctgtgatcattccactgtagtcgagcctgggtgacatagcaagatactgtctcaaataaaataaataaaataaaataaaaataaaatgttttaaaataaaaatgataataatgaacagatgttatactacagttgtctaaacccctagaatgtgcaacaccaagactgaatcctaacgtaaacaatcttcactttgggtgaggccaggcgcagtggctcacctataatcccagcattatgggaggccaaggtgggtagatcatctgaggtcaggagttcaagaccagcctggctaacatggtgaaamccccgtctctactaaagatacaaaaattagccaggcgtgrtagttcatgcctgtagtctcgcctactcaggaagctgaggcaggagaatcgcttgaacccaggaggcggaggttgcagtgatctgagatcgtgccactgtactccagcctgggtgasatagtgagactccgtctcaaaaaaaaaaaaaacactttgggtgataatgatgcattaatgtaggttcaattgtagcaaatgctctggtaggcaatgctgataatgggagactctacgcttgtgtggaggcagtgggtttaatgggaaatctttgtagctttcactcagttttgccatgaacctaaaactgctctaaaaaataaagttggtcgggcaaggtggctcacgcctatgatcctagtattttgggaggcagagtcggaaggatttcttcctgagcccaggaattcgagaccagcatgggcaacacagtaagattgtctctagaaaaaatacaaaaattagccgggcatggtggcatgcgcctgtagtcccagctgctcaggaggctgaagtgcgagatcacttgaacccaggaggtcgaggctgcagtragctgtaatcacaccactgcactccagcctgggcaacagagtgagaccccayctcamaaataaaattaaaaaacccaaaatagtccaggcacagtggctcacgactgtaatcccagcactttgggaggctgaggcgggcagatcacttgaggtcaggagttcaagaccagcctgaccaatacggtgaaagcccatctcaactaaaaatacaaaaattagctggctgtggtggtgggtgcctgtaatcccagctactcgggaggctgaggcasaagaattgcttgaacccaggaggyggaggttgcagtgagccgagatcgtgccattgctctccagcctgggtgacagagcagaactggttttgtttgtttttttttttwaaaaagtccgggcacaatggctcacgcctgtaatgccagcactttggaaaatcccagcactttggaaggccgaggcaggcggatcacttgaggtcaggagttcgaaaccagcctggccaacatggtgaaaccccgtctctactaaaatatacaaaaattagacaggcgtggtggcaggtgacttaataccagctacctgggaggcagaggcaggagaatcatttgaaccccggaggcagaggttgcagtgagctgagatcgagccattgcactcaaacctgggggataagagcgagacttctctcaaaaaaaaaaaaagatgctttatcaagattgagggttttttaattttgttttgtcttgttttttgagatgaagtcattctgtcgcccaggctggtgtgcagtggcgcaatcacagctcactgcaaccttctcttccctgcaacctccacctcccaggttcaagctattctcctgcctcagactcctgagcagctgggacaacaggcatgcaccaccacagccagctaatttttgtatttttagtagagacagggttttgccacgttgcccaggctgatgctgaactcctggcctcaagtgatccatccgcctcagcctcccaaagtgctaggattacaggcatgagccactgtgcccagccaagactgagatttctagtttgggattctaattttaataagaaaggaaaaactgatcataatttattttaggactcaacacattaaaaatttttttttactttttttttttcaaagagacaggatgttgcccaggctggtcttgaactactcggctcaagcaatccaccyaccttaacctcccaaagtgctgagattacaggtgtcagcctgtaatctcatcacttttaaaacaaatattttcacccctccacttttaccatgatatacttcgacatttatctgaatatcccccaaataattgatagcataattatttaagattccatcagggatgatcccgcaacaacattcaagtgcttgccraattatgtcttgcacattgcatttctccatttcctttttctcagtgaaggtactgcctttgcttgagtttttgtttgtttgtttgttgtttttttttttgagacagagtctcactgtcgcccaggctggagtgcaatggcgcgacttagctcactgcaacctccaccttccgggttcaagcgattcttctgcctcggcctcagcgtcccaagtagctgggattacaggcatgcgccaccacgcccaggtaatttctgtatttttagtagagacggggattcaccatgttggtcaggctggtcttgaactccggacctcagatgatccacccgcctcgccctcccaaagtgctgggattatgggcgtgagtcactgctcccagcttcatctttgcttctttacattgagaagatatattccaactcttaactctgtctttccatcccatttcacatcatttctgaacgctcatgacattttacccacagctttcatggcacctagaactttttaactgtctgtctgatctatttatattaagaaggtaagatgtaagccccttggagatagtgactatgtttattcaaatgtatatcctcactgggcacggtggctcccgcctataatcccagcactttgggaggccaaggcaggcagatcacgaggtcaggagtttgagaccagcctgaccaacatagtgaaaccccgtctctactaaaaatataaaaaytagctgggcatggtggtgcgtgcctgtagtctcagctactcgggaggctcaggcaggagaatcgcttgaacccaggaggcagaggttgtggtgagccaagaccgtgccactgcactctagcctgggcaacagagcgagactctgtctcagaaaaaaaaaaaaaagtatatcctcagagtgtctttcaatagtagtcagtaaacatttaacaattaggcaacaaggtgacagtccaatctgcctattgagaattaatgacaaaaacagagctttttcacaagatggcgccgaaagcgaagaaggaagctcctgcccctcctaaagccgaagccaaagmgaatgctttaaaggccaagaaggcagtgttgaaaggtgtccatagccacaaaaaaaaagaagatccgcacatcacccaccttccggcggtccaagaccctgcgactccagagacagcccaaatatcctcggaagagcgcccccaggagaaacaagcttgaccactatgctatcatcaagtttacgctgaccactgagtctgccatgaagaagatggaagacaacaacacacttgtgttcattgtggatgttaaagtcaacaagcaccagattaaacaggctgtgaagaagctctatgacawtgatgtggccaagggcaacaccctgattcggcctgatggagagaagaaggtatatgttcgactggctcctgattatgatgctttggatgttgccaacaaaattgggatcatctaaactgagtccagctgcctaattctaaatatatatatatcttttcaccataaaaaaaaagtatatatatatatatatatatatatatatggacaaaacagattctgctgtgagggactacatatacaaatagacaattaccagaccatatttaaaaatagaactttcacccacacctgtccaggaaactaacccgcttacttagaataaacaatcaaggaagccagcctgctacaagttagacttacagagaaagccagattgctatctctagtgacaatccaggaaaccgaacaacaacttccctaacaattggccccaaatggccagaactcgattaataactgatagcttccctaatttttgtcccacttccaacataggaccaaccaggctaagccaaacatgtacccataaccaatcacatcagttgcccgacttctagtaaatcctcagacagcttcccttgtaaacaacctccaatcagaacacacctaaaggcttcccttttttccacaataaagctttcctctcctctgccaatatgcaagtctgactcccttgctacagcaagctcattacagcctttgtttctctcatttagctaatctttactgttacagtcatttaatggaaatttattggaatcatcctaaagaagaaataataattcctataagctgggaattgaatgagtcgggaatggccaaaggaaagccttgtcacagactgcggggcctacaggcaggacctggcaatgggcatcatctggctaaagacaagtcgtggcctcggcctggggaacagctgccacggcctagttgcccctggggtcagttcaggagagtgcgcaacccaactagggtgacaaagccaacacctgcagctgcattacacaatgctccctccctccactcactgccctccattaaccatttagtagaaatcactctggaacattcagctggcacaagtccatcattctgacaactcatctcctcagttctagttgaataatgtgaacattggagggtttagtttctcctctctcttccacaagcaatgtgcaattttgtgtaaactttaatccctgcagtttatctacgattagttcagtctagttcagtctagttgccttgagatgaattcactgaaaagactacacagcgaggcataccatagctaaaagtaactggctttggtcataaagtaatttttaactttgaattaattataaaatgaatacctacactgcagaaaattccaaaactgcaaagtaattaaaggaaagctaaaaccactaataagggcaccattcagagaaatcagtgctgccagtgacacatatccttctagtccttttgttgttgttgagtgcatgtggatggggaatgcaggattcacttgagcaggacaggattttgaactgaatagctttgcttgtttctctgaataatgacttacttagcagccagttcatgatcaaagtattttgtcaaggcactttctgaattgtccaagaagagggggagcatccttagtgactgatgaaccacccgtcctcccctggttctgtccggccattctgtcctatacatgttaatcccactacctccagcagcctcccccagatttatctagcagagcatcactgctcattcttcagtattgcacttccgtgaccccttcccttgccctagcagcaggcttgagtgttcccacgtctgtgctgccaggaagctgctgcgtttccactggggcagttggcatatggcagggtgattctagtgcaactgggtttgtgcacatctgtaaactggatattccaggtgagtcaggacagaagttttccactttgtacacccacgaccttgcaaaggacaaaatgaagagagagcaaagtagtggatggagtgtggacagtggagctgggctgcctgggtttgaattctgcctccatcacttaccagctatgaccttgggcaagtcatgcatcatctgaatatcacggtttcttcatttttaaaacagaagtattaatggtattttcctcatagggttgtaatatacattaatacatgaaagcacgttaaagagtgtccagtacatggtaagcactacataaatgtctgagattactgagttatgtgtaataagtaacccaagtatttccaaactgatcacaatctttactctgcaatgaggacatttaacactcctataactagctctcactacagttttctctgtacatggcaaacaaatatttaatccagaattcctttctgactacactggaacacaggcattcacatgaaaccaagtttgagtaatggtgctccactattaaatggaaatgctactaccagagcttacatgcaccaatttgctctccccacctggagaatattcattcaccatgacacgtgcacacctcagagtcaaaattcatcctttgcagatgcatcctcctccactctcccaacacccccagctcactattccaagaaacaagctttgttggagaactggtccatttcagggaatggggggacttctgattgtgcaatattttctgcgtgaatcatcccaaactagatggaacaagctcaaaatgtcacagaagctgctaggtttaaaatttatatggcatgggcatggtggctcatgcctgtaatcccagcattttgggaggccaaggtgggtggatcacctgaggtcaggagttcaagaccagcctggccaacatggagaaaccccatctctactaaaaatacaaaaaattagccgggcatggtggtgcacgtctgtaatcccagctactcaggaggctgaggcaggagaatggcttgaaccggggaggcagaggttgtagtgagtagagatcatgccactgcactccagcctgggcaacagaacaagaatccatttcaaaaataaaaataaaaaataaaaaaattaagtttatattcaagttgcaaattacttttcaggagcccacttccacagtgaagaatcagaatcccttaatgttcaaattattcagctggaaccaagaactaaactaaaaaaggatacacaactttgccatgtttcccaggctctaatgctctgaaaagaacactttattttagagtatatatattataaaaatagctaacctaaacattccctgactttgaaagtctcaggaagggattcacttgttcaaatattcacctaaaataccctgctttaaagatacacaactcttcactcttcacacatcaaatgaattaggattctgattttttcttttcttcctttctcttttttttttagacagggtctcactctgttactcaggtggaagtgcagtggagccatcttggctcgctgcaacctccactgcccagctcaagtgtttctgccacattagcctccggagtagctgggattacaggcgcacaccaccacacccggctaatttttgtattttttgtagagatggggtctcgcaatattgcccaagctggtctcaaactgctggcctcaagcgatccacctgcctagacctcccaaaatgctgagattataggcatttgccaccgtgcccagccaggattctgattttctaaaatggaaatagataaggcttccctccgaccatccctaaatctcaattagttcaattcagcaaaacatgcaggttttcaacgaccatcagatttgaaaccaacaaaggcagcagccctcagcatagcctgagcagccaacctgaagcagataggctccatacctcaaatgtccaccttcaaacaaaataaagcttgccatctgcacactagatcctttctatcatagcaacaaaataaaacagctgctctctcttcatttgactctagaagaaaaagagataagtatctccatgattgaaagtgagataaccagatgagatttttttttaagagctcagcctgtgcccttgacttatggattgtccccccaccccatggaagtcaaatacccacataaaaatacccctgaaaagcaatcttggaccattaaaaatattttaaacctaaaataaaattctaagaaagtctatgactaaactgacctttcttaaacaaatgtaaatcttatttgtgtgtttttctagaaaaaccattcggggtagggcacagtgactcgtgcctgtaatcccagcattttgggaggccgaggcagacggattgcctgaggtcaggagttcgacaccagcctggccaacatgaagaaaccctgtctctaataaaaatataaaaatgagcctggtgtggtggtgcgcccctgtaatcccagctagtcaagaggctgaggcaggagaattgcttgaaccagggaggcggaggttgcagtgagccgagatcaagccacagcactccagcctgggcgacagagattctgtctcaaaaaaaaaaaaaaaaaaaaacgaaaaaaaaaagaaaagaaaagaaaaaccattcggactcgaaaagtactgctgtctttcagttggtaaataataaaatttggacgtgaggtaagaaaacaattggaagatactgcgatctaaagaagcgtgggggagggaggcgagatgtctggtcacttccccagttgcacgaccttaggcaattcctagatcctttgagtctatccgggtctgcgcaggtaatgacacctctcaacccaaagtatgagagcaccctggccggtgagagggtgcctgggaagtggggaatctgctacaaaacgcaggggaagctcgcgggggccctaggataaagaccaagaaccgcacaacaccgactctctcctaacacaaaactgtctgctccgagaaccaaatatcccaccttcccgcggctccggaggtacccgccactgttttattttaatccacacattcccagtcctgagcaatccttaccccagagctcgattttcagggaaccacaaaagacaaataggccagaataatctaagtccaagggagccctcccggccacttacaaacagggtcttccattttcaagggtcttttcaaacggatgttggcagggaccgtcttctcgatcaattcatcaatgctctaaaattaaaacgcaaggcagaggaaagtgcctctgagttaaaagagtcacctctgtgttttgcgactacaaagccttgtgggaacctcattgaaatcgcctaattagggttctttttaaaagaaaaggaaaactctgagcaagccagaatgatttggaggaaagaaaatcgtgaagtggggtggagattccgccactcggggttggatttcagttgcaaccggagctaaccggtaagcccactcttaatcagggggtcttcctcctcttgcaaagtttaggtccatccacagggccacttgggctgggggtggtttaaaaatgtacacttttgaggcacgaagactgggtgcaggagaaagtaagctgttaagaagtaagaaggcacgaggaccaaaggcacgaatttgcttccacgccacggcccgggacccagggtgcggggaccacgcggagcgcagcagagctcagggtaggagccgggaggccgcgcaggcagagcccgggcagggcggaggggaggccgcggagggccgggtggaggtccttaccgccagccccaaggtctgcagcatctctctctggtctttgtccccagggccgatgtgcctccgagcgaagtcgtcgtgtctgggcagaaggcgctccaggaggcgcgaggccccagccgcggcgctgtccccgccgccactgctgctgtcccggctccgcggcgcccagcacggccccgatcccccagccaggcggcggccgcccccgaccccgcggcccaggcgcagcccccacgccctggcacaggactgcatggccgcggccaccgtcccctgccccggcccgcaagggtcagccgcgctcttggcccctctcctggcctcggtcccccgggtggcggctgcgcccggcctggagcccctttcgctggacagtcggccggacagatggatggacgctcgcgggcaatgaa

SEQ ID NO: 96443 - DNA, 398287 bp, Homo sapiens
  misc_feature (1)...(398287): n = A,T,C or G
actgagtaacagcttcctccctccacatttactgaaatccccactgctccctaatgtcccacatccaggatgcgctgctcatttgcatttcctgcctcatccctgtaggtctagatactctccacctctgctaaagatcacttgagatcagtacccacctgttcccaaatgaagaaacaggtgtgttaagtgtaattttggaacaaaataggatttatctcattgtataagattatatggcttcttatggaggatgaccctattatgcataaggttgttttaagtgacttaacaaaaatattaacccaatgttatttcttccacaggtgcttcgaatccagaacattctaacagaagaacctaaagtgacacaggtttatgcagaaaatggcacagtgttgcaaggcagtacagttgcctctgtgtacaaagggaaactgctgattggcacagtgtttcacaaagctctttactgtgagctctaacagaccgatttgcacccatgccatagaaactgaggccattatttcaaccgcttgccatattccgaggacccagtgttcttagctgaacaatgaatgctgaccctaaatgtggacatcatgaagcatcaaagcactgtttaactgggagtgatatgatgtgtagggcttttttttgagaatacactatcaaatcagtcttggaatacttgaaaacctcatttaccataaaaatccttctcactaaaatggataaatcagttatgtcaattgtcagatattaaataacagtgtgtgaccccaaaagtacttaccctaaaacatgtgttgcctgaaagcacatgtgtgtatcgctgccttgccatgtcttgttcagaagacacaggggagcagggttagctcacgtgtctttagaactccagtactcacccagggactccagttcacaggccagaaaacatatgcattatgaagttcccctctactccatgcacatagtaagtctgactatggcagtcagacttacttactcccattttcccttcgatatatgactttttctcagtaaatattaacctgaactattccaactccccttgtactcttgctttttcaattctcctgttgcaatgacacataggaaaatcttaaaattcttgggagtgttgtcacacctgaaaattatgagtctctatgatcttggcacaaattgtacatttgagtgtctttgacttggttaaaggaagtttgttcacttcgatgactggatacagaatgaatcccataattgacatgggcgaagctaaaagtgtccccaaagactacactgttgttgaggtggtggtagtgctggtgggtttttgtttaatatttaaacttcttgttgtggaggctgaaaagaaaaaaaataatagaaaggtaaacaaacaaataaatagaaaagatcaacaacccctttggctatctactgagacatgactaggaagaaaacatgactttatcattttgttatagaagctgatatataaaggttacacattttcatttatttgtttttctgatttgaaggtataaccttcatgatgaattacttcttcagggtgttaaggcagtgactttagaaacaaatttttttcttgtttttgttttgtttttgagaccgaatctcactctgttgcccaggctggagtgcagtggtgcgatcttggctcactgcaacttctacctccgaggttcaagagattcttgtgcctcagcctcccggatagctgggactacaggcacacaccaccatgcccggctaatttttgtatttttagtagagacggggtttcaccatgttggccagcctggtctcgaacacctgacctcaggtgatccacccgccttggccttccaaagtgctgggattacaggtgcgagccaccacacccagccagaaacgaagtttttctaaggcacttgttatgatgatagtctggcatttccgggaaaatgttttgccaataaattgagaaccaccaacagttgtttaagaatcactgacttgaagtaataaacaggaacattttgtttgggtcaaaaaaccactttattcacagcaagattggagttactcatgattccagtgacataatatcccgtgccctacatgggctcaatttttctgagatgctgctcacagcccaggatgctgggttctctgaaagactgtcttgaaattatcaatgagtgtgatgcttagggaacacccccaacatatttcattatttagaaagaaagaatttcctgagtagttaggctccctaacatcttcaataaaatgaccacattctgttctttcttgttcttgatgatagataagcaaattccactgaagaaacaaaagcctatccaatttgacacagcacatactcaagatcactcaaaaagggacatggcttggttagaaatttcataacatacattgtgaaaaagaggaaaacagcttaattcatgtattctgtgattcccagatctaaattttcgcactgacataggcttagtcacatataaattatagtttgcgtgtgtaagaatgaatgaaattaatagccctcacttatttttaaggctttagaaagaatattgtttaaaataaccccatactctacgatggtcctgattcttccttagcttgcccctcgctatgtgagactgactacttaatggatttgtcacagaggttttcctggctgagagatatcagagactttgatggtgaagcagcgacaggggaacaaaatgacgggcgaggaagcttcgagtgcaggctttgctcttttaactttatgcccagttccataattgtgctttcaaatgtaatttctagctgccaatttacactttaccacagttaagacttagtttcatttccatgaaaaatgtgcactttgctcctgattgacagatatatgctttgacaattgatacaggtttacccagtcaaggcttgttttagttgaaggtgaaaatggaagagggaaaaaaaattgcttcaacagacctcagtatttctttttattgcattcgttgtctaacaacaataatactcattggcaagaaatttatttacactaacaaattaaatttaatcacaggtattgttagattggtcagaaaacaaaagaccactgtgatattttgcttgaatgcctctgaaaaccaaagagtaaggaatgtcatttgaaactttttgaacaatctagagaagtacatattaaccaagcacaagagaacaattcagacgtggcactattgtctcttccatgcaaatgatcagacatcaaaatgtacaaattaaaagcttaggtaacatgctatccatacttatcagacttaaaattattttcaaacaattcgtgttctttactgatatacaaagaaagctgaaaagaaatcaacttcttacagtggaatagaatttattctcttttattttcagctgcccagttttgtcagtaaggtgtagcaggtgtacaagtggttgcaacaccattaaaaaatataaaagcagtagttatattaaataatgttgaagaaaacatatacatatatatttaaggaatttcactaagcactaactaaatttcatgttgttgggaggtgttatctggctggagtgcctcttaattctttttaaggtaatttaattatttcttgccaattgttctttcttgaatgaatgattacatccttaacagaaaacctgggtgtataaataatacagctgaaagaaacagaagtgtacaccttccaacaacatacactcccaaccacttgtgttgtttttggcaacaaccaaaatgccattgcttgcacaaaaagtaaataaatgatcatatgatggcaacattcatcataagagagccagtaggcagtgactgtaagcatcacagccaccaattatgtcattttagaattgtgagcaaattcacaagaacacacagtgcaatttttagctgcatacatttcttctgagctccaactcagcaatatgcaatcttgacatcaaagcattagccaaatatttgaggaaattttcttactaaaataccaagtatctgataaatcaattttaccaaaatatataaacatatagaaggataagtgcatttagtagaaatacttacaataaaaaaatctcttaaaatctatgagccattcaatgtatacacaacgcaagaagtggcaataaggctatgattacagctccaggtcctgactgacctcgccaagttccatacacaatatattttttaatgccatgtgattgcagtgtgtgtgcgtgtgtaaggtgggagtgatattcacacatatgtagttctgaacatctacacaaacggcatgcacattgttgagaagttatctgttctcttattgcatacatcttactcactgttgaatccctagcagttttggggttgggttagggtcaagcataggaaatcatcatatttctttccttctccactcttgaggatctggaatcaggtcacagactgtgctgggtccacacgcttacatatgtgaaccttcaagtaactaccattccctcaataggcccacatagacaccacggacaagcaaataaggaccctctgtctaccataaatagaacttgatgctttcactttccaggagaagctgattctgtcggctttctctttgcccctccaacttcttagttgggcctattctatgctgctacttcaagttactcaaatgtgttttgtctggtgttatttttttctccagtgttttggaccaagactagatttcctgagactttaaatacgcaagacaaatgcaaacaaaatctgccaacatacccaggctgcttttcaggagtgaatcactgaagtgcatttggatttcctataacactactttcttttgggaatgtacagccctcccccagctccccatcccccatcataatgtaaaccattctaagagaaaatatggatgttttggctgggggtggtggcacatgcctgtagtcccagctacttgggaagctgaagcaggaggaccacttgagcccaggagtttgaggctgcagtaagacatgatggcaccactgcagtccagtctgggtgacagatgacagaaaaaaaaaaaaaaaaaaaaaagaaaagaaaatatggacattttatttctggactttatccttaaatgcttagctttagaatagtgcacaggtacatccttaataaaaagtaaatttgaaaagacaggaaaggactgtgcttttctcttccattttaccttttcattctgagaccactaaggtctttgcattaagtaggtgacgtgaaccctagtggccactgcccaccaaaatgcccctcatctccagctctgtcaggagtacctttagttactcaaatggaaatatctcagtgtaatgatggggctacaacatatccaaagtatagatggttctctcagggctgctggggcagcttcctttagaatcctctagaacactattgttaaacactggatctcctcttgaagtttagtctgcataacctttaacacttaaacatgaatcagagtatctatataaatgcaaattttcatttcccttttataaaatgcaattttcaagcacatgctaattctggtgcacaatgaacccagacaaatttgtcttcagcacaaactctaacggccgaggtgctagatcaaaccacctgtgaccatttttgtagcttgggactgggatattttaagatttcaggctagtgatgattacagggtcacagatagtggcaaaggtaaatctggttcctcattttccctcttgccactttgtttccaacaacaatggagcaaaaggtgacagtcccattttgtgccagttgaaagctgagtttggctttagtacctatcatactgcaatcatgaactgctgtgggttaaaaaaagcttgtgatgttgagggtgtgaaatcaattgtcaatcccagctaaaggatgatagccacagaacagctttattgtcatgaaactaaagggggacttcatcaggagtgttagaatggatgaaatgaggtttcttccctaacttaacattctgcagaaaattcctgattcaggtaaaaaaagaatgagattagtattacataaactgtgagttacttgaagggagatggtcttaaacaaagtaatctgttataaaactaacatcctttaatgggaaaccctgacccagatacagctcatacaatgctttctgtctgcagcttggcctcctcaccacacattccctcccaacaaagcataacctataccccaaaacacttttggctattgttagaatcatactgagctctcctttagggaatcagttcatagcaaccagatattccctttttgttcattttctgataataaaaactgcagtttttaaggttgatgaaataacaattctgtgttaaattgtaaggacactgaaaaccactagcattaaagtaggaattgtgcaagacattggagccttgattaggtatcatgcactacagtcaataaaagaaataatrrgaaaacaaaatgtkcacaagatctgaggtctttcactttgctttcatacccttaatcagtttacatcttatgctttgtggggcaatcaaaccaaatgacttttacaatttcatccgttttaagtggtaatgttaaaataactcacttcggcctaaaattactataatttaacttaaaaaatcaaaatacttataatactaaatgattttaggaataagaatttgatttataacattgtcagttggacatttatctaaacattcaatatacaaagttataaagaaaaatacttctaagatatttaagaaaatgcaatataatagatcataaattagrtgcaaaaacaagacacttacagacatttccagtatatacatccattttcaaatattaccaaagtgtaaacataacttaagataatcatccttctatttctactcttgaatacagtgaaacttccagtgtgatccaggtcacttttttcccaaagataagcaaaaatggcaaaaatttacaatagcaagcactaatattaccagatttttactaatttagtgttttagtatttgaaaagttttgccaaattgtatcactcattaatagtggcttcttatttctcatgatgtkaaaaaataacaaagcaccagacatctcaagacattaatagagtatccaatayggcagtttcattatcatacccctaatgaagacagacagaaaaacataatggtgactttgataactgtaaaacacaatgttacttcatgtcaacgtttctgaggattgaatgaagggtctgtacctaatgacaaaagagctgacgcataaccgacaatactctggcaatgaaaagaaaacaggccttgggggtaaaacagaattaaaaatgtccagtttagataatttctgaattcagattttcagataaaaaaaaatcacactgttattaaaatacaagatggggctacaagggagttcccttaatctgttacactcaaaagccttgccgaggctctaaatatggaatacttctagtggaagatacgagatgctgggaacagagcagagattcccataaagtaaaagaagtaaaatactgtccaagaattcatgtggcctcaagtcttattctgaaacttgtcctttggaaagtggataacctcatttttagagtcaaygcagmaaagagaaccagatacatgagcataaaaaacaaaaaaccctcatcacatgaaatttctcaaaacgagtttattttctccttcttctgccccagtctcctgcacttgacttagtttggtgaaacatggaaatccttaatgctggcttaaaattagtataagttcctccactactaaagtatacctatgcactgccttaaacaaactttttctgtaaaattgagaatctttgaagtatggaaaggaatggttcggaaaaaccattcaaaatctctctaaaatgttaactgacagtttcctctaactggtatttctatttttcttaaaagtacatttgttaaaatactaactgagcccacctgggaaatcttgagtagaaaatatgtgatgagttcctgattgtgacataggcaggctgaagaccagccagaatgttccccaggagaggaaacctgaaaatggtggtttccttaaaaatcaatttcctgttcaatttcttgggttaggtrgggggaagaggaactgtgttgtgtttgccagtgttgctgaaatgctgaacacacagcagtagcaaggtcaacagatcccaatatcccatggctgcattaatgtctgatttttttctttcttgttcagccgtatctagaggataaatattaccctcagaaccccaaggtaatacccacatccacattcttaaggcttttgcttttttcagtggttaacaaatagctataatttattttctttctttttgatgcctagcaagcagaatgacttgcttgccttttcccttagtaggtaactacagagcagagcacccatgtttccacagcggggtggtctcactgtccagactgagaattaagagcaaatctttcccacacattggagtaggtgttgcagtcctagaagttaagtactggtctcagatctcatggcagggtgctctctgccatgcagacatgtgcaattgccatttcaggatcccacactgaaaattcacggcgctccattaacaacaccagggtgtgtcatgctcttgggtggggtcacactagttctccaagtgacaaaacacacccaacacaacacaagatgttggtaagttagagaagagcaaaacacagctacttaaatgaaatctctggtttgttaatgaaccaaaggtggcttgggattattttagtagttaaaattaagagtgcattctattgcagaaaatgcagttattcaacacacagttcctcagccggcctagagccgcattacccttatcatttagtttctttttcatcctctggaggagagcagggcaggaagaggtggggacttctcttggagcatctccatcatctgtaagagggtatgtgttactgctcaccagcaccctcggctgtagttgacgtcatcttttctgtctttttggacttcctctgcatttgctcttgctcctttctcctyagcttttctctttgtttttccattttctcttgggccttccgagccttctctagagacatcttcatttccttgagtttctttttgaccactgctcggtcctgggatgctgtcattccaagagcctaagaaagaaacacacacacaaactgaatttgaaaaccaatgagccctctgatggtgttaacataccatatatccaagttcgtaaactaattcaaacattgaagaggtaagaacagaggaagaactagttacatttgctaaaaaccaacacactgggggctaccctttattttttcttttgttctttgaagtcccttgcaaagtataccctaaagctcattaattaaatgctttccaaatgagtaattaatgggtgaatgaatggaaaaagggcacaattctacttctccaacctttgggctgtaggcatttacgggtaaaggtattgctaaactcatcaatattttcaaagcataggagtgagcacctgctgtcacagagggctccaagaagggcaagaagaattgaaatggcttcctttctgccaatgttttcattacaatgagaaccaaaaatgtctttggggccagaatgctcgtgtcagcatgactagccattctttccctgtaggcagacctataaaggaagttgattataatgaggaggttgctcgatgaacttagaattcagaataaggggagttgcttatgtactttaaatgtttcgtgaccttcagaatcaacagcaggatgcatctatctatctccccaacagggacagccttgtcaatgaggccttcatattcacaagctattgattgatctctaaccttttcaagattgtcaagagatactcgtctgcccgtcagcccagcagggggctgaggcgggggtggggcttgggggtacatggagttggctgtaagcacctttttccctttcccaaagggatggatgccaccttggtctctaagagagatggactggacaagtggaaatgaaagtgccatggaggggagggaagatgtgtgtacatatttggggaaaaaacttctggggagaacatcatcccagtttgggagtggtgtgtaaggaagagtggaggtgaaggagaaatgaacaaggaaaagaagactcgtggatctgggtcttaattctaatgtgatgaaaaagtccacagtggccattattaaaactcatactacatcagatgtaaggagagttaatatatggaccatgtgttgccaggtggaagcaatggagtgggtccctcactctcctaatcagcagcctaccatttgatttggaacccctgatggactttctgagacttcatttactactcagaaagaattcaacatcctttctgctgaatattgatgagaattacctctcagatatgcagaatgctcttacctaatgaaaacattttaggtgatatgagtaatacaaattatacctggtaacctaagacagacatataattctttaccttaagtttatttccatccaactgcaggagctgttctccagtgatgttttgggcactgaattcagatacatactgctccagatttaggctcattaaccagtgagaaacctgctgcacactccattcctgaacggcccgattctgacactgactgtgtttgggagactgtccatcatcaaggatctaagataggaatgttacgtagtgttgttaaaggaccaagatactatggctcatattatgctatcaaaaggaatttcttaacctatgagagccacatttatgtttaaaccaaaatatgataagctaatggttctagtggtgttagaaaaaatacttattacctatatgtttttatgtttttagaagtttagaaattccccataataaaaaagcaccattattaatgtaggaagtttaatattgaagaaaatatattaatgttgcaagcttttacatcaaaacagtctggacagattataagatgtagaaaataaatatttcataaatttctatatgcaatgcatcacttatcctctaataagacattggaattttgtaaaaatatattaacaaatactgaggtatctttcacttgcaagaggagagcattaagctctcaagccttcttaggggaagtttcacaaccattatttcacttgagcagcaagcaaactgtgaggaaggtagggcatataatatccatcattactttcaagaaatgaggaaatggctgggcatggtggctcacatctgtaatcccagcacttcgggaggctgaagtgggtggatcacttgaggccaggagttcaagaccagcctggccaacatgttgaaatcccctctctactaaaaatacaaaaattagccagtgtggtggtggcgcatgcctgtaatcccagttattcragaggctgaggcaggagaatcgcttgaatccaggaggtggaggttgcagtgaaccaagattgtgccactgcactccagcctgggcaacagagtgagactgtcttaaaaaacaaaaaaagaaacaaggaaactgaggctgagaaagtctatgtgatctgcccaagatcacacagttagtaagtggtagagctcaatagttaggagtttattctaaatttctggctctgtccactgcagaatattccttttaatagtgcaaagggacaggttggttcctagacccactaagctgagaggagatgaaggtgatgataggtcttgaaggaaagacaggagtcaccttggtgacccacacagggaacacagaagaagggatagggtaagctgagatgaaggcaaaggagaggaagaagaatggaccatgtcaatgtaatggtgatggaagagaaatcgaggaactctggaggtgcaatgcggagatcctcttaagttaggaacatcttttaaactaagatatgacaaaggcagagagtaaagctatttaacacaaggaaacccttcactacagaggaagatattcttgtattgtctgatttttcagtcatctccaaagagcgaaaaaacacattcaaacaatagcacacaagccaccacacacagcccactgatagctcacctcgtcatctatcatatccaggctctgagtgagggagcaataaaagaatcaagaagaaaagtgttacagaaacaggagacacaacatatatagtacataattttaataaaattaaaattgcaccaagcttgaagaatacgggcagaaaagcttacaagaaaaaaaaaagttttgtgaataaaaaatcatgttagaaagaaatagtaagaacaaatatttagagcaaaaatatctttatttatggtgccttctgtcctccctccatttttcaaggaactaaatcactaacctcatttcctgactctcttgtacacatttatctcctgataatttgtagcaatactaattttgacccttgtttttaaataaatggttctcatgctattttccctctttatcaaaactattgattctcaatcagagacctcaccctaatcagaggcagtatcagaatcttggagtgagtgtggytgtcaggggaggcaaggaaaaaaagaaaggagtaattaggaaacttctatgtgatttctgagctgttcccccatgtttaactctgcactgcccagcctccccatcatgtgtgtttacatatacgtgtaaaaggggcccctggaaagcttaagaacaagactttgcttttctgttgagaaagggagggagagaaatcatgaagacttcaaattaaacataaaccacagtcctgatgatttctatgcaatatctaccctaaaaacattttcctggtgatggttcatgggtaaaacgtcagatttgacaaagcagctctgtcatagtgccatggaattacctcatctgatgacagtgctaaggactgagagagccctggtgttttaggttctgctcctaagccgctgaggtctgctgaactggtactgctgggactgaagtcatcattgaaggtaaaattctgtaaaaataaatgaagctcagtgttaaatgagtgcagtgagtgagcaagaggtaggtgtgtctacaagctctaaaagggctcttttaaacaatcttagcagaaattcatgtatgatttggtgatgaccttcaatggggcagcggttgagaatgctgcaccttgtctggttgagggaattctgggtgctttctccatgtgatgaaaggatagatgttttagagagacaattcttcaattgctcttcaagggtacagaattcattatcctytgcaactgctcagaggaataatattaataagcctatcttctttgaccctaatcgtgatgagtaacagtgtaagtaaaaatacaagatggtgtggagaggctgagttattaggaacagatggcaattcatattagaaaggtagctagagcacctcctgggaaggatcgcttattgttggctgtgataaatactatgagaaatggcagatcctctcctggatgtacccttcaagatgatgagttctgggggaggtcacagcctgacaatacactagtagttacatgctgaaatacaactctctcactgcacccgcagagcatcagagaggctgccacacagcacagacacaggtttccaaataatcacctgggggtgggggaggtgggagcrtgtaaataaaacttccccagaacttcattaaaatattcagtggatatgaaaatcaaacaacaatgactacgtagctgcacttgtaaaaacatttttaaccaaatctggagtctctacagtgcaagataatggcagaattcttcgaattgcatttagatgcctcagatccaatactgaaaatgtttcaagaccaaagtgatgtgctgctatcaaaacttcttttgctagtaattctaaaatggatggatttccaggaactctaagcacttgaccaacaccatcttgtttctattgcatttccttaggaattggactgttagatttccactaggttcccttatactgggtttagttggttatcaaaaataaataccatgccagaggctggagaattcagtaccgaacaaactccaaagtttgctaaaacttcagaaaagaagtctaggttagagcacatggagctaggccagcagaacatttaagcagcaggacatttaacatgaacattaccatttggtaccccagtcaaaaccctttgagctgttgaaaagatttaaattgaaactgaaaagaattaaattcaagtaacattaatcacgtttctgtttgagaaagaaaagcgaacacagataaaaggagaccaaacaacrtgtgaaagttagccaccatatgtgtttcaataaaatgttagataaggtttgcagtgtcatgctggaaataaccatcatgcatttaaaaacaagtaacacccatgcatatatttcctaattctgttgaagaactttggtgatagaattatacagcagttgttcaacacagaagtttgacattaaaagaagaaataaataaggatgctatgtcatcattggtttgttttaaagagtttcacttagatgtactgaactcgtattcagtcccaaatttatttgcttttcagtaaatcttgagaagcacagtgaaatagtttagtaatgtaatttaaagtagaatactgggtaaacagatctatcattctgttctatgattcaaatgcatctttcccagcatggcttaactgtcaaactgagattaaatagcaatatgtgaaaagataggcaaatcaaagagtaatgtacaatctacaatgaaacagcattaaagaaggtggtagttaaatgaggctttcttttccccacataagaaataccatgcattgtttattgcagtgttattacattggtttcttggatccagactacagacataagttgagaatgccttccaaagattgaagaagaggagggatttgggtttctcttgtttgcttttgtaatccatgtgttttctaccttggacccctttttatctgaaattagagtctcaggagaaggctgaagggaacttgtaggcgcaggcaggttcctgaaggaataggatcctttccggctgtcattaaaccatgagaaaggcatgcaaggggaacgagtggaggtctgagctgttgaacatggcttgggtgtccagttttccagtctgcctctgaagatcctgttttgtgaaaagaatgggtgtgttagataaagaaagggcggataaaagacctactgaacccaaggactctgaatatagtttgaagtaacaatttgagaaactgttctattcaacagagtaaaaagtttgcacttttgactacaacactaatcttaatagttatctttttgcctctaaatggattctgtgacaatgatcaacattttcgtattgctattgccatggtgaatttttataaaatgtgcctaataagtgtacgtagatgaattataatcagggaggggcacagtcttttaggaactgctattaggttaatcatcactgcattccctttatctgggtgacatgcctcacagctagggacattagctcataagcagcattctttcctgtcttcctctggacttgtgttccgaagggtctgagacttaagaaaatgatatatttaaataattttgaaatttcagggttcaaaatactttaggtggaacacgtagtttattggtttttcaccagaatcttagtgccttttcacaggaggcgtaggagatctgaagtcctcatctcccacttggagggccagggtttaccacctcctaagtacatggtctcaggccttctctcggcttttagttctccatctgtaaaaagtggatatttttatgtatctcatatgtgtttgttaagaattaaatgagatatgtgaaagtgcttacaaattgtcaatggtctatgtttattgtttaacatttaaaggattcaaaggcatttgaagaacgcagtttgaaaacagatttttttgtcttaatgtaggttctttcatatctgtaattatcttttggttaagagaaaaaataactatcagaaaccaaagtaggaacaggcagcagtttatgtgcatcttggaagaggtcacccttgcygtttgatggaatgcctattatttgatagctgctgataccacgataacacagagattccctttcaattaaaagtgcctggacaccacagccagacaacttctgtcccaccacatgtatactgaatttcagtcttcttacatctcatttcaaatatattttgaaatatatttccagtttatataaatagtataacacctaacaattcccatttatttgcaaatattattgtgaggatcgactgggacataaatgtaaaagcatcttgtaaactgtaaagcaagatacaaatgtaaagggattataaggctgataactgaagagaatgaagaagtcagtgaggttctgataaaatattgagatcagcatgctgggggaaccagatgtcatcctacacatggtctacactctaggtgaggaactccaaaaacatgaatctggttgattatayaggagagggaaagctgtcccctctgcagcctctggggagggtggagggagaaatcttatctccttaatgtaaattcaacttgggaaggatcttgggctctgaccctttgggatgtaaacatgtgtctctagggaaagatatgactagtggctccagctttacaactctaggaatgtctccatggagatggtctcatccccctcttccacttagcctccttaaaatgtaaccacattacctctgcagaggtcaatctctctggagttctcactatctatgcacccacaattcaacttctgttttcttttttttgagacagggtctcgctctgtaacccaggctagagtgcagtggcacagtcatggctccctgcagcctggacctcctgggctcaagcaatcttcacacctcagcttccagagtagctaggacttataggcgtgtgccacygtgcctggctaacttttttattttttgtagagataggggtttattatgctattgacctcctgccttggcctcccaaagtgctgcgattacaggtgtgaatcacaacactcagcctcataatttattttctgaggcttgttttttagcttaggttscacattctagtaaaaatgcctagaaagctctarctgtgtagaaacatataaatattttctctgcagtcccatactcttataattgggtatctctgaggaaaaactggaccggatgatcattatctcctctggttatagatttctgaatcaagggaatttttaaatgagttcatccacaattttcaataaaatatagtagtgcttaaatatatggatattgttttaaagtttataaataggccatgattaatgacagcatgacaatcttgtcctactcccagtgaacagcctttgtaacaatgcttttagaacaatcactattacctttaaaagcaaatagggacaaaataagaattgttttctacttgtggtcattccattgctttagttgaaaaggacttttggtagtccaaatcctgtccaagcaacatttgaaaagaaaaaaatctgaaggtcacatctaattaaactctctcacaacattttcactgtcagaaaaatattcaagactaataattccacatggacctgtgcatccagcactgaggagggtcttgaggccatgtggttcttacatgtgcggtgaaggagatcacagaagctgggcctctggtgatacccagaggcttcctttccctagctttgcacaccaagtaatagacaggaaggaggaagagccaggcagaaggcaatgagaggccacttccgagaagacacctacgtctctacagtggcaaatcaccagattcagggatattttgaagaatatttttcagtttcccatgargcttggctgtgcccctgctgaagttgtatcctgtatctctcattcctctgtgagtatctgtgattttaaaaccccatgaactgatgtaacccctgggtacttgctagtatccttaaagaactgaacagtgagtggtatgctttcatttctcggacctagagaacattcatttaaaaaacgaaatttttgctttaaaattacagacctatcagcttagcagacatgctttctaaaataaatgtcaatttccttctgaataaattgaactcttgggcccacaatagaagcagaaagggtttggcagcagttattccaygttgaccactcttatagtctatttcactttgtggagaaatccattaggaataacataaaatccttctttcctttcttatttgcttcctccctccctttcttcttctcctcctcgttccttccttttctttccttttcaccttcctttctccccaaaatcgagattggtagaaatgaactcttgatgaatctgaaaataatttttccagtggatcaaaataggtagatagtctatattcccttcaccttcttttttagctataatttactggcttgctatcatttttggaaaaaagagaatcataagtcactcctaggaactgggagaaagaatggcttcaaattcgtcytcataatccaaagataccatttcagaggtagctgtttcctggcatttaaatggtttatgtaatatctcttataagtaatgaactcatttacatatatcttgaatccagtgtatcctggggctggcatcccaaaattaaattgccagctaaacattccaaggtgatctttgttgttgtcattctaactttgaatacaggtgtgtgaagtattcagcatctaactggatgtcatcaaartatcattaagagttcagaaactgccagaacagatgaagtataaaagaaatacagaatttaagcccaggagtaaaagaagttaattgaagaaaattagttgcaaccagaggaagattgcagacttgtatttacctaaatcgaatgaagtaattctataaggttctaayatccaccaaggagtttgaggttgtaaagctagcctcatctaaatgggatctagagaccctaatggataacagctgtgagaaacatgtccatctaaagctcagggccaacccccgccccctactcagacatatcctgctcccagatcctgagttctgatctaatcaataatagttcatctgagatggtcactgtagtgttcaactctgaatcattcgagatggtgaaactattcccttaatgagtcttccccatactggaggggtttaaaatgaaatagaagaggatcacgtaaataaaatccatactatcaaaatmtaaatgctaagtttaagaataacagatatattgcttaggtgtttaagaaaatttgtatgaatagaaatctgaaagagaaatgtgtccactgattctaccttaaaatgttaaactcattttaatgatctaaactcattttaaatttgagtttttaacaaacacacaatatattaagcactttgataactatattgggacgtttagagtcactacagttaaacagtaacttattagattttcaagagcttttttaagtatggaaaagtgtttgcctgttaagaatgtaartttgtcaggcttcaggcatttgaaatactgtacttaaaaagaaaactgaatattaaattgataaatgcagctaaaaatgggctagacagttatggggaataagtccgatctactagggctaagctgacattattcaaaggtctccatgaaaatgactacattcactgggccaggcttaggcagagatggggtgtttttctactcacacacatgtgctcatctccatcaattcttctaaaaggtgtgtttccagccagctcagatgattcttaagcaggggttttgctcttactcagcaacaggggcagagtggaccctccaggtacttgtcataggatataatttcaaactcactgtcatgccatgatttatctaaagcctctttgagagaaatagcctatgaagtacagcctgaagtataatccatatagcccattcattcttcaagatataacaaaagtcatccttggatgaacaagactgccagcaaaatacgcaagaagaatgtcattttgtatccttcccatcaaacctgctttaataaacaatgataacaatagacatttttatttaaggatttgaaatgtacttcaatgtgaccatcttaatcctcctaataacatgaagaagtatgtgaggggcgggtgtgtgtgtgtgtgtctatgtctccattttacagatgagaaaactgaggtacagaaaggttaagaaacctgtccaagaagtaagtggcagagttgggatttcaacccaggcttttaaccatattgacattgtgtttttggctttcactggaaggtcactcttatacttactatgaagatgttattgaagatgttgtattttaagtaacaattttacttactttttaatctaacttttccctattcaatttactttttaataaattatattgttgtagcatatgtacttttgtatgtaaacaaattattttggaataacgaggagtagaatataaataagaaaataaacaataaatgaatagaccaactgaataatggggtagaaattaaaggaagatttgtttttcatggaatcctacagatcaacactatccaaaaagaaatataaatgaaccacattgtaaactaaaattttctagtagcaccatgggaaaaaaagaggtaaaataattttaacaataatacattttatttaccctccaaacccaaaatattattttgacatgtaatcaatattataatattatgaagatattttatgttctttttgttcatactaagtctttgagtccagcattcattattctcctacacatatcccaatatagactagccttatctgactagaggcaaccatactggacagtgtacgcagaggtgaatgggaagtcagagccatgcagtgtyagcccaatccacttattttttggtaggaaaccaaggtcccaggaattcagagacttgcctaatggaaaagtaaggactactaccttggattccagctcagtgttgtttctgttgttcacactttctacttgaatgcaaattcatttccatagaagactgccatctcctttccttatcattttctcaacatactatcacctagccccatctgagatacacacatctccccatctgagatacacacatctcacagagttttccattccgtgactacactggaaacttatctacagagctccaaagtagatgctccactgacatcagtggctacttactccagaatacagaataggattttattttaccctttggtatacattttaaggggtgaacaagctctgacaactaaatgtttcctgcttttgttatctgctatgctgcctgtttaaaatcagaatgttggctgggtgtagtggcttgtgcctataatcccagcactttgggaagctgaggtgggagaactgcttgagcccaggagttcaacaacagcctgggcaacatagcaagaccccacctctacaattttttttttaagctggacatggtggcacacacctgtagtcccaggtactcagaaggctgagctgagaggatcacttgagcccaggaggtcaaggctgcaatgagctgtgattgtgccayagtcctccagcctgggcaacagagtgagacactgtctcaaacaaacaaacaaacaaacaaaaagacaatgccactgagcacatatttgaaaagggatggaaccaagtcatatttctttgttgggtttatttgtttattattattagcctcatccattttctctagttgtctcatgtcgcgcatgtatctgagtcattatgtatccacagaaacacaacaaggtaaactctttatagagaggaaaaaactaaaaccaagaccaaatagtgaaagtcttgcctctttaaaatctaacagccataggttatagctgaccaatgatcttatcagaatcttagcctaataagaattggatgaaatgcttcaaaaagataacattactcagtccaaggatccttccctcctttttctgaggaagtctcccagggttggtgagtgtattcccagttgcccactacaatcatagtgcgaccctgcagctgatggtgcttacagcccacagactttcaggaccctgagaatccaactcaattgcattaagctcctactgggcagcaattctgttcttcctgggataggttttataaggttctgtacccattatcaatctatacagaagaatatagctgtccacagattttattagtgttaaccaattactatagcagctcaaaattttttttcttgcaagagaaaagtgtccttcttctttccttgttcttctattccaattatatgaattcctttccatcctgccaaaattctactataattactaataattataaaactatgattttattttttttgggtatgccaatgtcataacaaggtttgagggaggccatctcacacatgcctgtgaacacccaatcatcacacttaggaactacaaaagatcaaaatcatgattctaattagaaactagtttgtagtgtgggtatgtgtacaataatttctgactgctgaatcagggggactccagagttttaaaaatacagtggtggygaggcagccaatctagaagtctagctgtgggttcaaagcaggcatcgactgtggtgaagcagtgtgctgatggccacctgcccttgacaagctgtggttttgcctatagtgaggtgggcaggcactcaccaacacaatcaagattggcttgactttcatttgtgatttatacaaggaggtgaatcatctctggctactatggcaaaattccatcaaacaccctccccctttctggctgcaggtgctcacatccctctcaggtggtgcctcaaagatgagagggagtgactgtcttcaaagcccagagaccaaaggaaggacagtgtcattttcagtatctgagtttctctcccatcatgtatttatgcatctctttctcccctaaacggtttcattatttgtttttttccatgagtatgtttgattttatttttctattcttaattttaacacacaaagtggatcattctcactcccgaaccacacaaagttaaactactttcgagatgcatatagcctcagatttacctttattttcctgagattgttgtcctcattctgagagcattctacccttttccaatgtacagtataaaggaaagccacactaacaaagataattaatttgggaattctctctcctcatctcccgcccattatgctcctttaatgctcctttaattccaagaagaaggtacaatttctcaccaaggtatatgtcagaaaagagaaaaaagaaaagtaaacagcagtggacaacccatgaagtggagaagtggtccttgcatgattttatagtattttatttttagtgtgtttcttccttagtctatgatattgagattatttccaaattttataaagaaatttaagcatcattagatgcataagtaactgaaggtggcatagtatgwtggaaaaacatctacacaggaggagcaagccccaggttgacattaactgcctgctgcataaccctgggcaaatcaattaaattctatgaaggtaaagttcttcatcaataaagtatggtattattatctactctcccaatctttttttttttttttttttgagacggagtctcgctctatcgcccaggagtgcagtggtgcgatcttggctcactcaaacctccgcctcccgggttcaagcaattctcctgcctcagcctcccgagtagctgggattacaggtgtgcgccaccacgcctggctaatttttgtatttttggtagagacggggtttcgccatgttggccgggctggtctcaaactcctgacctcaggtgatccacccgccttggcctcccaaagtgctgggattacaggtgtgggccaccaagccttgccatcctctcaatcctataaggatcaaatgaaatgataaatataaaactactttgtaacttgcaaataataataaggtaacagtaatggcaatagcagcaaattgttatctttattattctttgaatacctcctacatgccaagtatcattttaaatgttttacatgaaaactcattgaatccttacactgaccttatgtaaaaggtactgttattactctcattttacatgaggaaatgaaggcacagagggtaactcacttgcccaagatttaaaagttataagtaggagagccatgattcaaatccaggcagctgggcttcagagcttgatgctttactgactccctatacaaatctcagcttaaaattatataatctcagaaaacaactgggaaaatttgataacatgctgttcaaagctcgctctttatgggaaggtctttactgaagactaagcatagttgacagtgcccacaaaatcaattaaatagccaagtgcagcaaaagatggtggtcactcctacatacatgtggacaagacaatcttgaatgtcaacaaggtacttaaatgcaaaatgattatccttttagacttaatacaatgcactagcattgtgggtagccaggcaaaaaatctgaagtatcacataaatatatttgatatttctgaagtatcacatagatatatttgtgctgaatttagataaacacttattgaaatggttcatgtggccataattctgcaattaagaaccaatggatatgcccaaggctagatggaggcyataattggagtaagaccaatataaactaattgtgcaatttttcttccatctcaattcttggcatatcactttagctcaaagatactgaccactgattttggttaacaatagaagagggggccagaaagtttaggtatagaaatacacgtgttcttaatcacacaaccgtacctgctacctgcagaaaacctactggcttctttttctttttctttccacttctttcccttgytggaattccttcgcaaaggcgccctgtaatgatagtaagcagtcagaaaggggaagctgaaattttctctttcaatcctccttttacagagggctttctttttacatcgtgaagtgcttaccccagatccacaaacttccgcttaatttttcctccttgcaccgccaatgaactggatgcccttagtgatttgggatctttggcatcatctaggatatacacatttgtgaaaaagatcaattattattatttttaaagtcacaattcaaaagtcaatgcrtctctgaatctaagggctttgcctaaattcctaattgtaaaataaataatcaatgccttcttatacgacctaggagacacagttacattgaggaactykcrgttaagcaggggaggtcctctataggacagaggctcaacattcatcacaaagagttttagcttcaactgcatgggaatgaacaagggagaataaatactctcaaatcatcctctgcattcgaagtagggaccaacatgacttttgttccttctctggctccaaattcttggcttcaagtgcctgggctctgtcctccattcctttcttgccttggggttgtagtgccttctaacaggaacatagcccacttctcccgtatctccaaagcccagcgcagaatatcacctctgagagtctgggagatttagggggaaagtcagagtcaaagttttcttctctggctctcctttgctaatggcctgtggccggtcctggaacagaggaggggrggacatgggggagactccttaaacaggggctcagctacaaaacatttatatctttgaaagggccttcttaatagttaggttacagcaaaacttggctggttccccttaatgtggaagatgccaaaatctcctcagtgttcagagcagactgatctttgcctctaggactctcaaaggtagcagctgctggggaatggggaccctcgaaatgataccaaaagccaataggaagacaggctttgcaaatggagttcaatgtcaaggtgggaaccaattccactggtggcacttgttccatctcggacaggctctacccaaactattcagcagagggtactgatcggcatcacgtttcagcatatccaattagctcagatgattaacaaatgctgttttaaatttgatgttttttatgtgtgaaactcttcctccccagttcttttttggtatctgtttttctgtctcttatcttttaaaatgtgttttaaatttctaggaactttctagtatggaaggcaaagagaatggccctcttaaaaaagtgttcaattaactttgcaggttaatgttgctcatgatttttgtttacttcaagagaaatttctcaacacacatcgacatacacctttaaaaaacatgaagtacacacacagttcatggatagcagtctaggttcaaagctctcaagcagcacaggacactgacaaatactccaaatgtttttagcaatgagcttttcatatttttagttaatgatacttagattacaataagcaactcactgaaatgtacataatgaaacacaagagtcagaaatatgtctgtgtcaaaaatccacttcaagcctcaaatatttattatgcatatttgcatcattactctttgggtaactgaattgtcacagatgtgacacaatcatataaaaaaatccatagacatagacatggcacaaacaccttctaaggtgattttactaatggattttatttttaaaagcaagatttaaattttcttaatagaagctgaagaaaagaaagtgccaaattcttccagatcaatcctaaagcaactcttaatggctaggactatgcaaagttaaaaggagactgcctaattatttcctgaatgaraggtagctgggagatgttacaatgagcgctgagaagaccagctgaggcaatgtacacgaaaacactctgtaacccatgagtgttgcagttatttggacatcaygcgactaaaagcctgattctgcctatcacagagcttggtgctaggcaaccttacatctttatctcacacatttgccaaagtgcgttcccaggaacactgaaatgaatgcttccatagggctgaagatgttaagaataaggaataatgtactttcccatttaaaatcgattaaatccatctttaatgcacactagaacttctagtctgcataaaatccaacattagattggtatgatttcaggaaaaaagaaacatacattttgtttatttagctctacgtaagacttctgttaggctttttaaaatctctccaatactacctttgtgaccaattatacatctgagcccccagattgggtgcctcaactttaagctgtggcaacctggttttcattttcaaataataaatgatctcctgatggccaaatcctaaggtcttgyactggactgcatctccttaatctcactgtaataagatacttgactatctcttcctttataatggggactcccaaatctacctggcagtcctgacctctctcttgcgctcatgacctcctctgttaaaaaaatgagttaatcctatttcccccatcatgttgctgatttcctattttctgttaatgacaagaccatatgttctgaggcgtgaagcccatgatagttttgcctcactttcttacctgttacctagtcaaggtatgtctcaagggtccttgaatcattctttcctgtcaytgtctactgctcctctttagagggcaccacctcatagggtctcctaactcagcttctccatacctggtggtgtcttttcctttttattcctctggtcaaacttcttgtggtttcctagtaatatggcaagttatctaagatgtttaacttctaaagctatatacttaacctactggctcacttttgtgtgtaactactccaccctgcataagcaaactgctacagccaggctgggatagccttgtacctttaaatcatatgatatgtgcctgtctctgttaatgacatcactttacccgctattccctccttacctaccctttttttcccttaagtgctttgatggctattctaattgtacttccttggataggttttgtttaccaacctcagctggaygcaatctctctctcttctgagcgttgatataattgtactctatctatacttgcagaggcccaatgcttttaataagcaataaatcctgtaaagctttaaaaaagccagtttctatttactagacattaattcaatgaatatttttgaacacatcttctgggtcaaataatgtgttattaaccacacaaaaaattagaataataatctctagtaattgtgagtagaaaattgatagtgttcaatttactttatttaatcttgactgaacaaaggcccagtgctatgtaagcctcgggaccaaaactttagtattaggttgtttatataacaggaacgaggaaaatattttcatgccttctactggcatataacctgttttacaaatctctagaaaaaaatcttttacttcytctaatttgatattccgttagatgcttatcatttagccagttataatgggacttctccatccyaatttccactgatgtccctcagatatgaaaaaaaatgatttgtaaatgtggtattgacacaattcagaaaatcgccaactcctgttagggtaaccagagccttatcctcaagcctgcaatcaaacatggctgtaattaatcatctttgtggtaacttgatagaccaaaagtaaaggtataacactttttaaaaattctagataaatggcaaccaatgatgaagccattttcagagtttatccagcaattttgagtataagaaaatatacttctagaccaggcawcaggaagctttctttacctttcaggggccacagagtaaaatattttaggtttgtgagatacacagtctctgtcacaacgactcaacactgctactgtagcatgaaaatagatagtatgtaagtaaaaaagtgtgactgtactcccataagacttcatttacaaaagcaggtggagactacattcggttgattatccctcttctagaagatctgcactggttacgtggagaggtatattagcaattcatccaagaacattattaagtatcaattatatgcctgtgttactttgatcttcgtctttttttcctatatgactacgttagtgtttactgaaactctgggctgctattctacaaaatcgctctatatttttctatatgactatgtagtgtttttttctttatgactgtgttagtgtttgttgaaactctgggctgccccactcccctgaagaactcccttgagtagtaaacttatagagagctgaagagataaaaatactgaaccagataggaaaagataaaactaaattaaagtaaaatacatgsaggggttgtttctcttattctataatataaaaagaaattaatattaattattagctatgagaaaacaaatgacttatgattatgagaaaaagtcatttttatactgtacaagctgaggtgttatgaagtcagaaaaagaaattaacaatacctttttctngtaatattttcttgttggtggtttggtgatggcaaggagattcttccacatcatgatcagactttgaagtagaaaacagtgaagtgtctccccacatagaggasagaggcmccatttctgggtccagtggttcttcttgaaattcagctatgtggtcagacgagaagggcacattgctatccaccggggtgaggggtggaacaccagaatctgattctggagaagacgttctcaaacccttaggtggaagtaatttggtaatatgcatgtggttatagaaactgtttgatggctgttggtataagagattataaggaaggttatgccactgagtatcagttctatgcaatacttactttgaaataagaccaaccttttattagtgaatccccatgaaaaccagtttttgttgatttacagatgagaatgcatggttcataccaattcaccatattaacatcgtcactaatacatatacctaagacctacagaaacaattacttgtacgttcattatttcccactaagtaaaaccaatagctgaatatcaaaagcaccatcatgaaatatgacaatacrgataatgctcttggttagttcactgaatgaatagacaaaatattttgaattacaacaatataaagaattcaggagacaaagacgtgaactattctagctgcttaccaactaggacatagactctgtttgcagaaaaatcataatcttcaataagctgtaggaacaatgatatactccaacagtacaaatcaggaaacggtcaagggtgctcacctttctctctagactgtcctccccatctgtggaactaacactatcatacagtcttgtcctagagggtctctggcgtctgttcttcacagagagctgggctcgagttttcagtgcttttgaatccaggcgctctgtctctgggactgcttcattcaagtctaagaatattgaaagataatcagtgagagaaacctttggagagaactgatgaagagaycrcagacactgataaaatctcaaggtaaccagtaacatcaggtaaggatcaggtgaccaccatgacagcctgtaaccaagaaataaccaagaaatcagtggggcttaggagaaatatacaaagtcaaaggaagaaaccaacactaaagatgatgaaggcgctataaaaatccaacatccgaaaagcatacaaccttcctgcaatataattataaaaatcactaatttgtatttactatttatgtgtatgcatgttgggaagttagatgaccaaagatatagaggagggtatatcaaaagttgacagatcttagaaaccaaggacaaaaaacctacaaagtcaggtttccagttcaactacaggcaacagaaggtaactatcataaatttactgtagcaaaatttactagcagtcttcaggtactatatcattttcattttaatatataattttcaacccaaaacagtttctgaaaatctaccttgttcctttttgaaacctgtagaaagaccagtgaggaatttacctaatcagcaaattgacgatagctggggaaaagaaacaaggtctggctacacaaatgaagaaacaaacagttaaaaaatcgtaagtacttagtttactagtattgtggatgaggtaggataaacatttccttttctttcattaacatctaactttgtattacaagttatttgtatgtgcctctgactcatctctgtgaataccttctctccccaccagaaacgacactgattttcgaagggtaaatacttaagtctttaaataaaaaggctaaaagaaaaagagagtaaagtgggacacaaagaaaatgaactattaacagcaaaggccacagagagaattcaattagtcctctttagcctggctcttaccacctttaattttgctacctagattttaagttaggaccccgaagttaacattctaaaggaaaggtacccattaacatacctggatattggttaaggaaaagtactctctggtggaacttatttgaaatgctactactcctttcatttgcatatgtaatcactccttagaaataaaggagtttgatcattaatcctattttatctcttcagagtggcagtcattagctgaagtcatgttcaaggagttaataattgagtgcaaataactgagttgcagaaaattatgtacttgtattaacagaataaacaatttcttataatattattagctcaggcaattcctttttacagcattattctagatgtgctctaaatatgctatactacaaaaccaaagcaaggaagcacctcagtttgtgcctcttgtctatgaaacctagcacttagtatatggctctaacaaacaaaattaactacatttttgcccaggagatacatccattgaatgacaatatttagagaaggttttgacttttcatttcctatatctgaatgaagaatgaatactcagaaaattcagaccattcaggtacttataaagaacagctaaatattttctaattagcagtctctttactttttacatgtcaggggagaaaaaataattccttgatcactttaatttcctccttccgataaaatctatatttgtagctgcccattaagagttcattagttgtgataactgggagagagtcaatcttataagctcttgcttaaatataaaatgtggaacaccacrtagatgaaagctgtaatataattagaaacactgtatgtagtacttgcacgttttatgccttatctagctcatatttggattgtatgctctataatacaaatcatgccacatactctatctcatttgttccttacaacagccccatgagrtaccaatcaagtattttttttctctcctgaagctcagagaacttgagtagcatgccctcatttacataactaattaatgcgctaccatgattactctagtgtcttgatttccaggctactaggctatccactatgatttagctagtgttgataaacctcccattgcaagattttaatgccattagagtttggtgttttgggttataaaatcatatatgacgtgactagtctaggaaactcatttctccaataggctccatctaaaatattataattaatcttccctatatgttagataacatgataaaaaaaaaggatgacatgttgaaaagtatagaataaattacttcctggatgattttttattttggtctggttggtttaataacagctttggctactaagtgacaaaaagacccaaggaagaatctcactccacttttgtaaacatggttccttttgcagtagaatgctggccctgaggatctggtatggaacccaatatccaggactacaataggtactccatcaatggaagctgaacaaatataagtgagagaaaatcagaactacttattagcaggttttaatagtgcagaaaatttactctgggactccttgctctattactattcaataatttgcctggtgcttgtgtcagacaacccaaaaatggcaatctggtgtatctgctttaacattagctgactaggtgcaaactgcttgagcacacacataaaattatatctatttatgatgctgttagctggaatctaaaaagttgtgccttatatccggtacctaagtagccaacaacacattgtatgcagttaacaatttttgaaggtctgaaagcaaatatcacagagctactttattgcagtgattcatggattacaaatcagtaatttatattccattctaaaaataattttttaaaagaaccagaaaaataggatgaagttgaaaactttcgccttaatagcatttacaccagaaggaagctggaaggaatactgtccacaagaagcacctaccaaagacactacatgcaatatgtctcccttaacagtattagaggacacgtgtgtacacggaaggaaaatgtgtataagatttatgctgctgggtaactagaagggtgactgaccatcacatgctatctttttccatcatgtaatacaaaaatcctaatattacaactcaaaataaccttgggattctggtcccagcttatttctcatataagaaaactgaggcttaaagaaggtcaatttgtgtattaacttgyaccacacagttaatctgtgacagagagtgaatagagctcaggcttcagaagcctattctccttctggaaggtcaatctcaagtctggaagtaaacttcacattcttctgccttctttgagtcctctttttggtcttactttatgttcccaacaaaagcacatgtcaagggctaactttgcaaacttgcagaagcatatagcatcagaggaaacaaaaacccccaacactgagggattttttttggctttacatatatccaagaataaaattcttacaaagaaaaatagctgtcagttttgtggatggcagtgtggcaggggaaatccaactggctcagtgtttctaagttatgtgctgctagatgtaaaggcttaagtggccatttctctcactgtcattcgttctctacagatattttagtcaataatattacactgctttcataagcccaagacctcagttctttcttttcctcgtttctccagtgtgccttgttctgttgtccataagggtcagcggaaaatttccttttcctcctctgctttcttatcttccatttttctcagaccctccagtctctgaaatagcctacctctgacgcaatgcagctagaaatacagaacaggagaagactgaggtgaatcaataaatacagacagataaatacacagaagatatgaagtagctaatgacagagcagttttgagtgagagagactccacctctatacctgcattttaagactattttcaatactgctacaaattggatcctttaaaagaatttaatggatttgatgattttagcagctgttatgaaaaatgctctawgaaattaggatgctatatatcatattacacagagaccagttccctacagtaatactgtgagtcatacagtttttttcactagattgacgttatttttgacgtaagtggaatgctgcccacagatcagatacaggcagcgagggaactaggggaatggagcagcataacaatggggtctgctccgcagttacgtgcactaacccactcagaaacagccatacttcatgccatcacactgcctcgcctgtgctattaccaatggaggtgctgagcatcatgaggcacttggtggcattttaaaacttgaacagtatctgcatatcatttgcagccactgcaagttcataaaaggtgggcccactggggtttgggttaatagataattgccttcaggaggtaagtttatgtatctcagagaggcagtgtaaaacagttaccatgagagtagacctggagttgttccttgaatagaattcagaacaagcggctgtcccattaaattgggcaatttatctaacctctgtccctcaggatcctcaattgcaaaacagtcatgataacaaaacataataactgtattgctatgaagattatatatgcattaatagatataaaagtgcttagaagagtggtatgtaataagcactcaataaatatctttataaagagattagcaagatgttaagtgggtaaagcaagttgcagaataacatgtacactcatttaaaatatttagaaaacattaacacaaaatacattttctagtggtaaacatatgcatatagttgcatagaaaaactggaaagaggccgggtacagtggctcatgccatgcctgtaatctcagcactytgggaggccgaggtgggcagatcatgaggtcaggagttcaacaacatggtgaaaccctgtctctactaaaaatacaaaaattagccaggtgtgatggcgtgcacctgtaatcccagctactcaggcaggtgaatcacttgaactcaggaggcaggttgcagtgagccaagatcgggccactgcactccagcatgggtgacagagcaagactccgtctcaaaacaacaacaacaacaacaacagcaacaacaacaacaaactggaaagatatacttcctactgatatagtgcttacttacaaagaaggtattagattaggagatgttggtcaaagggtactttaatcttatttgcaatgtttaaaaatttggtattatattttgtattatgtaattgtttacatttatgtattacttgcgtagttaaaatgaataaaaatagagaaaaacatatatttagtatattttctcttaaaggcaccttaattctattttaatttaattagatctggtgtcctaggactcagtatctccacatgttgatataagcccagggaactttgtcaaaatctgcatgactatcagtcttccccatgagagaaggctgctctttcattacatctgtggtgattgtctgcctggcttgctaccttactaactgccagataatttggcctaaggtctatggcttagctttcagttattacttcattttagtattgtatggggaagatgtactgaattagacacggttatggaggaagggtatctttcaacagttccagaacaagcagaagattattgctattttctaatcttctaactaggtctgaacttttgttgtatgagctatacatttaatttgctaatcattgaaagaatattaagaaatccctttttcagtttttttgtcaatacatgcaatctcaaaactatctgtatagccttcaaaatgtaagttggttatttgttagtgtagtgcttctctggtgcaatctgatatctaatatacccttcttcagtttatgatcagcctacactcctgttctcagtggacagagaggcttaaattctgttatccatatctcagaaacaactcttcagtaataccgctagactacctggaaaggcagtgactaccagtcagaaaaaactataggaaatgtcctaactgctatcaaatatcatttgaaacacttgtaagagttgcttgattctagactatgaaaggatatggaatttagatttagaccacagggaaaggcatttaaatatctcagggttctttcagtgtcagatgtctttagattctgatggaaaagagatctgcataacctaaaagccagggaaatacaaaaatgtaatcaaatgacaaactagttggggactgcaggcatctatgagtagaactatgacatcatgtggataagctgggtcatgggagctaggatatgtgaatgtctttttcttgacattgatattgtagtgtctttgacatggcaacaataagcaagattctgtgttttcactcagggttgcctacaagaatctaatcagtttctcaatcaaaatctatggatattaggtaaccccaagcatgctaagtagacaccctcccattacatattgtgatacaatagcatccttgattagtacaggaagaattcagattgtaggcctcttacagaaagtaaactcagttacctgagatgatagttatttccctaaaaaggaaagcatctttcaatcatgggaagattttgttatgtaaagcattagaaaatgtaagaaaactgaaggttcacaatccttggaagtgtaatataatagatgtataagaattttttaagtacttgcaaagactgtcagtctcctagtaatagtacttaatagtactttaatagaaaatggaatatatcaaatttgtaaatgtatcgttaaatttttataggtgtttcattagttaagcttggaaatagtttgtaataaagtttgtaaataaataataaaaatccctcaacagtgactttcaacaaattaaaagatttaaagaattaggtttttgataatgtcacttgagtaaatcaaacattaacttaaaaccaaaaattaatacctgaatgaccttttcaatgttcaaaaaaaaacccttagtgtcatcaaaaactcacaagcaacagtgttttttggtatacctatgttctaatgtttctttagtttccttgtaagtggatttattccttataggtcttagacatgattactgtatagtattaaaacagaattatttcatgtctacttaaaggaactcagtcataacctgatggacctgatactctaattgctgaaataatatggttggcacaattttcagaaccatacacagagcagaattttctggtactaaataactgttcatctgttcagttttaactttacagatgcttcaacctctgtgactggtcatgtttccctcttggctattagatatcttacgtgaacactgtgacccaccttgaaaacaatgtaggagcccagggcaacacttcatatacaaaccacactgggtagcatcttctccttcatacttttagatccctctaccctgatatcctagcctagtcaattttatcttagcatagctatatggttattatttaatctataattagaatttcatggtgaaccaggtgaaccagaccataatatgtatatatcatggtgaatcagaccatatatcaatataagaaataatttggaatacagtagtcttctgaagtttccttgaaaagaaattactcacatttgggttaaaatgatctttacttataaaagatcataatgtatcttgttctattaaaagcaagtaaaattcaaaagccaaaacaaagtagcccacttttcctaaaatgaacagaaaattactaagttaaagctcattctgacaaagtaacattgtgtttcctcttgaagcaacttttttttttttttttttgagtcagagtcttgctctgtcccaggctggagtgtaggggcactatcttggttcactgcaacctccgcctcccgggttcaggtgattctcccatctcagcctcccgagtagctgggattacaggtgcccaccaccaggcccagctaatttttgtatttttagtagagacagggtttccccatgttggccaggctggtcttgaactcctgacctcaggtgatccacccgccttggcctcccaaagtgctgggaagacaggcatgagccaccgtgcctggcctagatatctcccagtactattttataactcagtatgactgaagggtctggtggattctacgaacttatgaagatgcagtgagaaatatgaatgaagcagagctgtcaatttgcaactgaatacctcctttagaatgtctcactgatttggcaacaaaagttttaatagtttacaagtagtcagattcaaaacttgcacaaaactagacaggcaatttaggtgctttgctttttaagtaagaggacagattttggccttaatgatacaccagaaaataatcaataaatattgatttctcattcacttggcttgttcattaaaatttcccatagtgatttaccaggaatgttcaccctttaattattagtgcaattcaatatttcatggtcaaaattatttattggggattaaacaaaattgaaaataagttttcaggaaaaatgaaaattgtgaaagtttacattatatctgtatgcaaaaaatatatatatatttttaaaaaggctgaatctactctagaattccctaggctccaatttagaactaaacagtgtgacagcatgaaataattacctcattgctctgtatctaatgctcttgtatgagactctcctgataatgcagtgcaagcattcacttttcttttaatgactttccatctaataaattctggctttaatcatgcctttaaccttattttaaaattctaggttcctatgctaaaagagaatgcttaatgtactctcaaactctatcaggaaataaatcagatatggtggtaggggtctggcctggcctcaaacccacaggtatctgaaaagagctgctgattttgagggctcaagagaaaggcaaaaaggacaaaggaaatgatttcttggaggagtccaatgaccttaggagcacccttatggatataaatgtctggctgatgctatccttttttattttcttactaaaccttaaactaatatatattttttagcttaaaaactcttttgtggttttcttattcttaccttttaattattttaaagtttctagtctaaaacatttatataaaaatgtataccatatatgtaactcatatgaagaaagaaaaaaaaaaagacaaccaygtacctccatcaagcctaaactataaaattattacttttgaagccctctctgttctctatttctagttgtaacccctgtattttcttctagttattccataaatttatccctaaagaatatattgattagtctttcttgcttttaaacttcagatgcgtggtagtgaattgtatataatattctgcaaattgttttttagttagctggtttgtttaacattatgttgaaaggtgtaactaaaattaattaactttttactgcagctatacaaacaatgctacatggaatgtttttgaatatgccttttggtatacactgacaagagtttctggaggatatatatacacatcgaagtaaatttgtcgggccataggattttcacatcttctattttaatggataatgccaaattattttaatgaaacagttttrtgaattttcctgtttttccatgtgctggctatcacattttactgtgacactttatctttgccaattgtttgatttttgccagtgaagttgaatgtctatgtttactaatgtttaggttcctgcttttgtgaacttcttatgcgttttgcccatttttctactatgttggttgtgtttttcttatgatttatgtgagttcttaatttattgtggacaacaatatttttttcttagttatacgtgctacaaataccctcttcaactttcggtttctctttccatttactttataatgtcttttaatgatcagattttcttaatattactgtggtcaaattcatccaacctttttacgatttggaatttttgtgaacaggcaacctacagaatggaagaaaatttttgcaatctactcatctgacaaagggctaatatccagaatctacaatgaactcaaacaaatttacaagaaaaaaacaaacaacctcatcaaaaagtgggcgaaggatatgaacagacacttctcaaaagaagacatttatgcagccaaaagacacatgaaaaaatgctcatcatcactggccatcagagaaatgcaaatcaaaaccacaatgaggtaccatctcacaccagttagaatggtgatcattaaaaagtcaggaaacaacaggtgctggagaggatgtggagaaataggaacacttttacactgttggtgggactgtaaactagttcaaccattgtggaagtcagtgtggcgattcctcagggatctagaactagaaataccatttgacccagccatcccattactgggtatatacccaaaggattataaatcatgctgctattaagacacatgcacacatatgtttattgcagcactattcacaatagcaaagacttggaaccaacccaaatgtccaacaatgatagagtggattaagaaaatgtggcacatatacaccagggaatactatgcagccataaaaaatgatgagttcatgtcctttgcagggacatggatgaagctggaaaccatcattctcagcaaactatggcaaggacaaaaaaccaaacaccgcatgttctcactcataggtgagaattgaacagtgagaacacatggacacaggaaggggaacatcacacataggggcctgttgtggggtggggggagcagggagggatagcattaggagatatacctaatgttaaatgacgagttaatgggtgcagcacaccaacatggcacatgtatacatatgtaacaaacctgcacattgtgcacatgtaccctaaaacttaaagcataataataaaaaaaaaaagaaatcatatgaaatcccacattttcttctaagagtgttaagtatcgtctttcaaatttgagactgtaatccatttggaacttatttcatgaataatgtgaggtagaatccaattcattttttccatatggatggtcaattttcctagcaccatttattagtccatcctttacccacagaactgcagtgtctgctctgtattattctcaaactgacataaatgtgtcagtctgcttctggactctgtattctgcatattagaccacttgacaattgctgggactatatcacgtggtcttaatcacttttacttcataatgaatctcagtatctagaagaacaagttcctcaccttgttcttcctcaggagaacctggccctattctgggccaagcaattcaccttggccctattctgggccaagcaattcatccatatatattttagaaacaacttaccaaattctaaagaagttaaaagccttgtttgaattctaattaaaactgcatgggatatatagattaattttgcataaaaagcatttttataatattgaggcttcctttctctttcaatttatgtaagtcttctttcatgtctttccatgggtcttgagatcttttgttaaattcatcactgactaccttatacatagtttttgctatttttatggcatattttagaaaattacattttgtttgttggaaatgattgatgtctgatgcttcttaaatccatctaccctgttaattcttataacatctaataatcagaagactcgagttttttaatgtattcaattttattatgagtgaataatgaaaattttgattattttcactccttaaatttttgatttcttttgcttatctggtagtacttactaggacctctaggacaacactgaatagaagcagtagtaatacacttagtgatgaaatattaaaagcattcttaattttaaaggaaattcttggagtataacatttttccacttcatataatgtgtgacagagacttttgttagcctcacaatatcaagttatggaagttcctccatatttttagtttgataaaacttttaaacttgaaaaggtattaaacttcattaaatgtttgtcttcattcattgaaataattatatgtatttttcctctagttaatgtgttgattttatatgagtaggttttctaatgttaaaacaattttgtgttgtttacatagactcaagttagtcatatatattttaattacatttctggattcaggttgctaatattaacaggatatttaatagctttcaatgtcactttttttttttttgagacaggatcttgctctatcactcaggctggagtatatttttttcttgctcagttctcattagagctaaggaacagtaagtaactaagggaacaaagtataaaatgccttatataaccctccttgttcacacttttgggaagataacatgcagtattacctaactggtggtccactcactgagtaggtaggygtgaraatgaaatgaagcagcacttggtagcaatattcaaatttcacagaaatccttgaatcacatttacaaacctacaagtgactaagttcctgttatgcttcaaaactgtgaatgggtcacaatgcttacaagattatgtacaaacccttctgcagtcaaagcccacttctactccaagaacacactatgtcatttcaaatggctctaccttttcaacataaagaccatgaatcagaaaaaaaattatgctaatgttattcaattttctcttctttgaattccctctcatcttttgagatgcttacatagtgccttaaattctatttatttgtctcctaccaaacttttcctctttcattcttgatcccacaaatcatataccttgcagtataatcggcaggacctagtactttctttctgcctagtagccactttctcttacaagtcagtgtaccacctaaggcctgcctggaagcaggttttcggtgttcaaaataattttttaaatgatatcacacttactcctgatctctcacggtagaatagtcagaaatatgccttcataggtaacttccacctactggccctagtctttctttcagtatctctatgggatatgcacaatcctttagcaaaccagccttcaaaatatttgaagcagcaaatggtatcaacataaggatcctggaatatctagaagctcagaatgtattgcttctgtgacttttctaggaaatccaataaaactaatattacaagcttttagcctaccaagatcactctaacatacctattctctgtttttatcctaatcctggcattatttaggcactaagaaatgacaagcatgaaacatagcagcagggcataattatcatttttcctttcctggaacacaaggaaaatacttgaccagcacattgatataaactagaatggatttggggtctgttatggctcttggtggaaaaaaatttgttacgtctgctttatgtaatcatgataagaaaaaagtgttacaatatattaaataacaaatttgtactgatgattgttatcaaaattttaataatacttgagttggcttaggttttagtgagaaacatacaaatggtggtcaaacgtaattttaaatttgtgctaaatttctgtatggtttggaaaaaggttttactcctcaaaaatttataattcaatattaagagtcacatcattttggaagagcatgagtacacatgaagaaacggctgctcagaggctcttcctttcttcctccttagcttgccttcccttccttttactatttcattctgaccattttcattgacctacacttgatcattcttttgcttcatgagctacctcaatgcctaaaaacatgctaaaccactcatcctaccactccagtgcctgaaaagcaaatcagaattggacagtcagtagaaggtcgggaggataacacttgcatctaggaactttgggaactactggaagtgctatacctctcctggtacaaaacgttggtggtggatttttaaatgtggaatggcctatgttaggtctgcagccttactttcctttctaaacctctagtatttcagcattccctagcaacagaagcaagggatcaatttagaaaagtgctttccagagcattcctatctagctactgaccacgccattttagtttatgtgatcaagcaactgaaattcaaagagatttatcactgactgtcctcacagcaaaactggaagagcacttgatatgtatgctactaatgtctgagatgactgattctacctctactgcacaagcatggattggcttcagtaagaattagtagtctccacatctcactgtgaaccaacagtgttgctagggaaactgataattatgtggcaaaatggagggtgtagaatagaaaaagggttcagatgaaatgtaaggttttgatccaaatcagcatgttaatagtatagtgtgttgatcttctgtagtcatataatttaataaacaccattaattatatgtttgaaaagatacagatttctaaactgaaagaaatgaatagaaatgaaaagctactagatactgctcatactttgagtatgccacagcaggaatatgtatttattatatataaactataattttttaaaaattaaaatattcaaaaaggtaaaaaatttggtttgattcctgatgtttttctttagatatcaatcttatagtgttccaggtataaaaattataattccataagagctcaaataaattacttttttggcttcaaagactaaaccatatagtttcaaaacaggccttaaagtggtgaagaaggaaatactacttttaaaataatatgcacagtaatatcaacccagagaagctaaatactcttcctgaagtcacacagctcctcacttagtcgtaatgctaatgctaaatcctcctctttcagctgcctaagaggcactatttataaattacatcctatttagggaaaacccattagaaggatataaacccagtgaatggattcaaatctctagatatcattttaattttaaatgaagatttctaatcctttccatttttaatggctaagagcttagttctaaaagttcatgataggatataaacacttgcttatcaggaaaacttcactggagacagtttaatatgtgagaaagatcacgaaaaaactaaaaagcccattataacagggttttactgcacgtcaaagtgttgcctctgagttgtcggtcctgtcatgacaaccctgctgcaccacattcttttattttcattttccagggactactatgtatatatttaaaaagatgaagccacacattcctgtgtatttatctttataattattatgtgttttctaatttgcaaatataccacagatattaaaacagtcattcatgttcatacacgtgcaatctaagaatgttgtgtgtgtaagaacataagtaatttatttatggttggtgtatgaatgaagataatcatttataataccaaatgtttccagtgttttggtcttacttggtctttgacatgaaagacctaagaagtatacacagtacaccatggtaaaagcacaaaactatatggacttcgttaactacatgaatctcaagtgctgaaagcagcagtctgccttctgatattatgaaaaagatctttattctagtgacttaaacattctaaagcttggctgggcgcggtggctcatgcctgtaatcctagcactctaggaagccaaggcaggtggatcacctgaggtcaggagttcgagaccagcctggccaacaaggcaaaagcccacctctactaaaaatacaaaaattagccagacgtggtagcacatgcctatagtcacagctactggggaggctgaggcatgagaatcgcttgaacctgggaggcgaaggttgtagtgagctgagattgcaccactgtactccagcctggatgacagagtgagactctcaaaaaaaaaaaaaaaaaaaaaatctaaaccttagtcattaacacataagtagtgtagttcatcctagataggatgaactacaatttgtaaggcagtttattaaatctgtcaattgtatgatgattttaaaatagtatttggcttatctttagttgtgatttgttaatgctacatattaaagtatttatttttgataagacgagagctaaaatgattgactcctattttgataagccttttcttctttcccatagtaggaaggtatttccaacttttaaatctctgggtcagaaaaagaaaaataaaaggccaaattacacagtcatcaaaaatgatttttgtggttgggttaaacaaaccttgacttaggccatcttggcaagatgtctgcttgccatccaagttctccatggtatcccctttagagacttcaccaagagatgttcttctctcaaagatgttgttattattgttaacttgagtcccattttgcttcagtagcctgaatacctcagcttccaaatctctaatctaggaaaaacaaatccatttataaaactctaaactagcgctcccctccaagtacagcaaaaccatcttattatttagtgtcttagggaacacaacttacccgcacttggaggscttgcacttccacaagatgagctttttccaaatcttctattttctttctttctgcttcctgtcttttgatgaaatcaagctctcttaagaagaaaataatagttctgattatatcatacactcaataaatgaaagttcttatctgaaacaataaactgcatagtaggataagcaactgaacagttatttaaatggacaacattcaatcagttagaggaaaaagtatagtaatgaaagaaactaaaacatctttaatgggtcacaaggcaaagaaaaatgattcgattctgcttactataattttctttcgtagctcctgattctagaacacccatacatatttagataggaaagactgcactaatgacccacattgggtaatttagtggagataattacttgtcaggtagaaataattccatttttccaatgtcataagcatagtatagtaaactgatgtaactagataagagttcgaaaaagataattgtaagatttctatgaataacagtgaagagggggctgggtgggtcagaaacatcgagaggggcactcacttatagacctaaggataatatggggagaagagaaacagttccattttgaaaacctggaatagaatatgcaaatttagcaaaatttactataaaattatttcatgaaaaagagtttggcaaatagttaaaacagtgatgtattgaatttatagtcacagagaataattactccccttttaacaagaaacttttgatagcaaaactcttttaaatattaaaaacattcttccacataataggaaataacagaaatatggttaatcttacatatatgcttagcttctgaggcttggcatggaagaccagaaaaggtactggtactacttatttgttctaactagccagaagtaactgatgaaaaaaatctagtaaaaatctccgtggtcagtctccgtgacattacaccgagatccaagagatggaagcaaaggagcagtagctcagaaacagctgttgaaaatcaaaagcagaatgtggtaatggtctctctccctgcagtgaaaggaggccctcctgattctctcaacagctgagaaatgcagagtggcagggcagggggccttgctagtcgatatgtgcactgtctgtagtgggaaattctgtagttactgatctaagaatagagaggagcagcctgattcaggccccagctgtggcttgcgtgctccacatccaatagtcagtcattctacatgactttccgctgggcttcttgtttctaaatcatagaggtgtttcaaaaagaataaagaaattcagatgttttaacagttayaaacaacgattaattatcaaaaatagcaaagaggccctggcagccaaaaactataaaatatacaaaacataatctcatgaaaaagtgatagaagtgacttccaaaacttaatgtgtatttatgctgtaactatgctcctggataggaaagatatctctaaggtcatcttttctgttccactagatattacaaaattattggacataaaccttctttagacaaacataactattctttagttattagaagcggcttacttttgttgaaaatccttgatcaacttctttgccttgttgtatttcttttccaaggcctgatactggctttgagtctctttgagatgctcattcactgtgtggcataatgtttgggcctcaatccagtagctttccaacttcaacattctttccttattctcttctatgttttgttggagttgggttttttctagttcccacctcactttctcattttctgctgcctgcagctggagaaagcaaacgtcaaggcaaagataatttggccacttttgtggcaaaaatctctcatttttatagcatgttgtagatcaagttctattatcataaacaatcactgaaaccacttgagatgagaaaagcaggtattatttttataattccacagatgataaaatggaagccttgaaaagtgaaatgatttgtccaaggtcacacatttgataagtgataaaacatggattggattccacctcacatgatatttccatcacaccaggtgatctgaaattctgtgagcagtaaaagatgtttcagagtttgatatatccaacgaatgtcaacatgttttgagagtttttaaaaaatatataattatatataaaaaattaactaaaaagggagtggagagggccagggaggagagaggagttagaagcacagtatggcttaatggttaagaggggatctctggagtcattcagcatggatttgaatcccagttctgtcattattggccattaaaccttggacatgtaattgaagttctccaagactcaattacatcatccatacaacagaattgtgatataacacatcagaatgcttgaaatagctccttgggcataagaatcatctgataaacattaaccactttcactctgcttttaacccttttggtgatcttatttcattctttatttcaaggaacatgaacatattctatagctcattattttacatgtagtgtaatgaatttctcaagctttataaacctcaattcccataaaaatataaaagatagtgtaagtaaaagtataaatttttgcttggttaatttaattccctcccacggaacagaaagccataaccagctttttgtttttctgcttctagggactcttaggaatagatagtaaactagtctaataccctcatttctacagaaatccaatactgatcatttaggtgagggctcaaaagtcattcccaataactctctggccttcaaactggtactttatctactttatatgccttctttaaagttcaaaaggatgcaaagtcattataaactatcaatgttcaaaatcatatagcacttagcaaaagtaaacatgtatttatatacacacacatctatgtttttgcaaatatttttaactaaacacatttgcaaaacagtttacaaagttagaaagcatccaaaacaatgtcaagattaggaattctattatcaaaatgaataataaagaatcataataaagtgctaatctgtggatattacatgccaatataatgatgaaaaaatataaaatgctaatttatagtattttctaagttaaatgtctatagtctaatacataagcgccattaaaacacaatcacagggaaaaagagatctttttaaaacaacaatttaaaaaatcttcaattctttctatgtcaagagacaatgacaatttaaaacaggaataggttatttactgcatcttttattaagcaatgttttgtatcaagttgtttatttagcaaccgccactaatttaaaattattattcacggagctggactaacaccgtgaatgatgtatagtcgtattttgactaaagagctgcagagtgaattagctgagaatagcatttaaccaaaatagccttgctaattcatctccatttaaaacacacggagaaaccaaaacaagtgttcaatgtgaacaacaaaagagatcattagtggtagtggtggtggtgattgggggcgggggagggtaattatgttttaatttttaaaagaccattgaaacaataaagaatattgctttaaaagtaatttaaaatatatttttattgggaggccgaggcgggcggatcatgaggtcaggagatcgagaccatcctggctaacacggtgaaaccccgtctctactacaaatacaaaaaattagccgggcgtagtggcgggcgcctgtagtcccagctactcgggaggctgaggcaggagaatggcgtgaacccgggaggcggagnnnnnnnnnnnnnnnnnnnnactgcatcttttattaagcaatgttttgtatcaagttgtttatttagcaaccgccactaatttaaaattattattcacggagctggactaacaccgtgaatgatgtatagtcgtattttgactaaagagctgcagagtgaattagctgagaatagcatttaaccaaaatagccttgctaattcatctccatttaaaacacacggagaaaccaaaacaagtgttcaatgtgaacaacaaaagagatcattagtggtagtggtggtggtgattgggggcgggggagggtaattatgttttaatttttaaaagaccattgaaacaataaagaatattgctttaaaagtaatttaaaatatatttttaaatctttgaaattgtatatttgataaaactaaacaaaattgctagaattgtgtctcatacgagtgccttaaagtttgtcaatgaaaatatatagactaataatacatactcccttttatcaagaccttttctcccccacaaatttaaattatgtgaaccaaacaactaaaaatttccagtagtacctggcacttaaattatgcatgtattaagtttataagatttaattattagaaattagaaatggtttataaaacattgatgtgctatactaaatttgttcctacaaatgattaaatctatttataataaggtaagtgaagaggagatatagtagctttgcttaaggaattagtaatcaaaacatactttgcatacttgaaccattaaaaatattactttttaaggaaatctcagaggccacatatgtgcaaatacataaatatatatatctaaaatattgtgttatttgcactgagggggatgtgggtgtttgctctcactggcaggtttgtctacgtacctgacagtgaaaatgaatctatcacatttgcattctttcaaatatacagggacaaaacctttagtcctaggattggatttattcatagtatctgaagtttaaaaagtaaaattcaaacaccatgtttcggtgcttaccttggtcttcaatttttgaatctctgcttctgtaactgcatgtttgatttgcaactgaaaattgaaaagaaagaaaaaatctgaactaagaaagtgtatctatatttgtraagcctcagcagctacaagaatgccttattacatagtaaaaggcctagaaaagtgctgcagtgcagcaagttgtaaattaaagtgtctactgtgtgaaatgacactgggtgcaaactaattaaacacagtttatggtctatactccctaacatcagattaggttaccartttaattgctcagggaccaagagaagaaaacactttttattgccctctttgcagctcttcctttatgatttgagcgtcaaggaactgtttccttgctaagtctagctaactgaacggcatacacaggcaagtgagctgatagtgtgatttaattccaaacctggacgtgtgaagatttattccaaatctgcaagaaaggtggcgctatggtcctgtgagttgcaagcacattctgatcagcagctccactgcaaagggagagaggaggaggactgcagttgcacggggaaatctctgatacatatttttttcttttaattgcaggaaaggtacagatccagatttctgtcctccaaaagatctgctccttttgaagactcagacccccaacagcttctgccacagcttattagcaataagagtcacagtttacatttgttttgcttgtccctccccccgctttgttttctttgtaagggaagaagaaggaactgaacgaatcattcgtttccttaggggatcaataaatactcccaaatttaagaaaaacaacttatgggttcacaatttcttgtctgaaatccttggggccagatgtttttggaagtcagcattcttccaacttcagaaaagtagttacgatgtatcttctacaaattgcttattatccacagcagggtctttggaggcactctatagtcaaaaacacatgaattatttttgccaccaaacatgaatattcccactaagcgaggtacatgaagactgtaaatagcatcctgttaggtcaggttgtaccactaaattagtttgacacaaaattacaaaaaagactgggagcgttttggatttaagactgtacatgagggaccataaacttttactattactgtaatcaagtaaggctaagaggttttcttatcagaagtgagtgagtctgacagaaggacagaaatgtggagttttcagactagcaatgtgaacctgtggagaccacagcacctcataaacctcarccctctcttgggtttgcaacctgtattcccttgggtttttaccaagttcatggggacacatgggaaggatgataaagggaagatggaagaaccaaggacaggtctattcgacccccttggatgcctgtggctaactgcccagaacctgagggttcctaagttccttgtaaagtgctcctcctgttatgcaaaaggcatgaggtctgcactgccacagctcttgttactgctcttggtgctgagagtgattttgaaacttttcagtttgattctgccgcactcacactgcttacattcttcctgacctggtcactctggccatcttgctggtgtggctattgctccttgcaccctcaccggctcctaggggcttctatgcttgaacagtttctagagtaggaccctatgtggaaatgttatttttataagacacaaaatctggctcttttagtttcttaccacagcacaagtggtacaattcttacttacctgcctttagcagatgctcagagtattagtgcacctggcaaggaacctaatcacaagttttctcaatgactagattggaagaaggtgtaaagacacaacagtgctgctcagaagtccctgcaattcctaccccttcactgatgaggtctatactcatcctaagtcctagtctggatggatcttttggaatcctgacacaccaggctagccagtcagataggcttgaatgcccagtggacgctccaactgtaggctcttctgaactcattttagacacgggaagactaaagattggagaagacagccaacctggtcttttcctcacagtgratcaccattaaaaccagaactaaaacctggatcttctcgttctgatccattgccactttccttagaaaataaggatgaattcaataggcattcgttgaagagttgctatgtgcaggatgctgtaaaaatgactttttctccctctaataaatattagggctaatctcccccaccagtataaactaataacgtaaaaaagggcaaaagtacttagacattagacacattatttatatataaatctacaaaaacaaataatgtatatgcacacaaacatacatggctatgtgctaaggcatccagaaaatccatacacttaggtgattttakaggatttgcaatcgctattgacaagatatacttcttgttctttcaaccatgtgccaagcatgaagagtagttaacttagactgcttgaattcatctctggtctaccatgtactctatggagcattagaaaattacttaacctctttcatttcactttccttgcctgtaaaattcagttccttataagtcataaccttccttattggatgattaagtgataaaacccatataaagcacttagcacagtggctagcatatagtatgtcctcaataaactcagctaggaccaagaaagaatgatctgaataactcaaatatgattaccccagcttcacctctcagttaaatgtgctaactgctgtaaaatgtcacacctgaagtaaaatgaacacctctgattcaatttaaagagaaacaagaaatcaaaagggcagattccacagtgaacactgcactatgggcaagtgacagattttattaactcctcgtagggtaaccaaatacgtggcatgcagcttgttggcattttggactttcttttctcagatcactgtgtcttctataagttgcttctctgggcctcagtttcccatatgaaaaatgctagatgtgaggaactccaagggccctttcacatacaacaggtgtgacatttatgaaacaaagaacctgaaggtagttgtcaaggttgcagagcttagaaattcttgtcctgagccaatattttccttcttgtgaataaatacactagattaatccacaaattgtgggacaaacccaggtaaaactgtgaaacagcccatgttgatctattctaccctttccatctcaccaaaaatggataacaggagggaactgaactaattagcagtgaggtgagaacaactgcgcaaagtttggagtgttactaagtatagctaaattctttacatataggaaagcagaatgaattgtgtaaattcacattattcagaatggacaagattttcttagtacacatgaggcctaaaattaaaaatatgcgattattttaattctgtatgtayattaagagaatttctacaaatccatcacttttgacaagaaaagcatcaaaatacactaactgaaccctttttgttttatatagtatggacctgtgtctagtgagcttaccttggaaggctattaggtgccaaagcmaggttttagaaatcccagcccatggttctttccactaatactaaatttcttacatttgtaggcccctttatttttaatcatctccctttatcattgcaaatgactgggggaggcagggcaggtgttgtgaacctcatggttcagatgaggaaagaggctcagggaagtcacacaccttttcaagttcccactagaaacaggtgatggagcggaaacaaaaccagatttgactcttcctacctctgttcctcccttaaccatgtatctaactgaaccagttgctttgggatatatttttcatttaatcttcccccaaaccccaagccatatgtcatcatcataacctctcagatgagaagttattactccaactggaaaccatggatcacttctggtagtctctgagcattctgacagtgaatgcaaaatggtgctcaatcagctgctgttattattaatgaagcttagaaagcagacctccacctcccttaataatcaattggcctttagtgactgagactacgtgctaggtactatgctaatcactgaggatacatgaacatgacatagaatctactttcaagatacttcagggagattaataaaaacaccttgtaagaattctccagatcaccctgtgagaaaggtcagaggcaacctgctgctggatggcttgtttagtcttttgttcctatagccagatcagatgtcatgtgtctttggcctgtttgtccagacgtggaccctactttccaagcaaagtgagcaagatggacccaagttatctccatttcatgaggaaaagaaaattgcttttcacaggggtgaaggacctcgacaaatgaagcatagttggtaaaaggttgagttttcttattctagagcagttccctttccacatgtttaagagatttatgtcaagaatcaataaccttttcaaagtacaggtccaagagtttgcaagaatggtcaggcacgctgactgcagggatagaaggttaacagggctggttaatagaaatagagcctgagatgcctgttggagtttttgggcttcagagaagctaggtttggagaaaagagttgggattaggagggcataaataaaaagaaaaggttaaggactgcaggtaaaagtcttttaacttacaagaccatcattttcatctcttcagtcatctttaatatgaaagccatagatatgcacctcaggatttcagcacaaataaacatacacattcctatgagaacaggagctttcatttaacattctgaaggtgtacctgctgtgtataatttttttttcaaaaagatgaatacagaacatgcactcatattaccggatcgatataatccaaatataactgtgctagaaatagaaacatcctttacacagaaacttaaatagtgagactgaacttttgccctctctctacttatcctgtgagagcatggaaacatttttctttaaaaagtgaaaaatatcttygcaggaaatgttttaagagagctctagttctagaaatattacaatcagataagggcaacattttctgctgttgctttacaaaagcaaatcaataactaatatttgcatagaactttataaagtgctttctagattgggatctaaatttttagttatctttgtgagtatttgagtgatgtatgtcttacctacaacaatatagcttcacaaaagaaatcaaagctgtttttaactacattttggtgttaagatgaagctttgccatatttctttgtaatttctgctgaaaagtttacatatggtatctatccagtattaacgaaagtgttttacttagggaatcatgtatgcaaaatgaactaaaactggctgactgaacaatatcacaatctaatctgaatggtaacactaatggcagcatatgtagcattgggtgagattctctaacaaggtcactccctaagtaggtactcataaacttgttattaatgatgctgctgctggatgtagttgatggcctgtaattacagctcttttttaaataagtaactgtttgctattaagtaggcagcaatttatagcttccctacatggtagtggaaamttccataaagataacttaatgttattatcccatgcattttataacttttctagattctttttcatagaattaaataaataaaataaaccaacttttagactccattttttcttcaagagaaatgtcgaatttttttaattgttgcaattgctgtgactcctgaggaggaatggcaagggagaaattggacagtcactttaaatggtacctggctaacagttcctgagccagcctcgccgtaccttccattaaactgccagtgtaatcacattaaaaacaaaaaaactcacaatcaaaaatgaacaccacaactaaaaacaacagttcatagaatataaaagagtcatgaagttgaattaagaaaaatctatccaagatcccctctgacatcagggagacactttgtaccaccctcactgatggcttgagatccattctgtcccaagcaaaaagtggacaacccctactgtcttgcccaggaatggggcctcaaactgggctctctaacttcctcagtattccatatttgctcagaaagcaactgttagggggaaatgcaggaaggtggctgatgcatggcacactgcatactttcagctgcagacctatatagacatgggtggcttcagtaagtgccttgctagcagtgaagactggaaattaccttttttatctctttaacttagagaactgtgtggcaatacttgggagtatctgaccttagtacagagaattgccctagatgtcagactgctagaaaatagcaactgggctggacacgaggcacctaaatatccctcctgatctaagtctagaaatgagattcataatcaaaaagtgaataattactgactaaccaattactaaaagatttttgtttcatttcaagataaggaaagaaaaaacaggtcaccttaggtctattaacaaatactgcaaatcaaggtaaagaaaatatcaacttgaacacacaaataagtaaacttgtgaaaatgatgtatcccataagtaaaaaaatattttaagatcactttttgaaattctaggctgaagagaaagtaaagaaaagcgagaaagaatgaagagtaagaagactaaacatttaataagagaattaagtcatgttagaagtgctaaaaagcataaatgaatttgaatttaaaagcatatttaattacaattaaactgtacacttaaaatggtaaagacagtaaactatacatgtatattttacccaataaaaaattaacaaaaagcataattaatgctataaaaaataaaatcactgatatgacaagacaaatttaagaaacaatctcagacacgaaaaaaagacaaaataaaaccataaaaaaacgtaatagatactgatgacagtatttctagaaaaaaaacagaaataggaaaaaactgaaggaaacattaatgaactaaaatgaaaacaaaacaaaaacagagcaatgaaagcaaattaaaaagacaaataatcaatgaaagaaggcctacttcaataaattgtgctaaagatttttaaagtacaaggtgaaaacaatacaagcatccaaatgcaagctttatgttagacttttcctttaaaacactcttaaaacaataaaacttgccctaccactttttcagggaaaaagttcataaatgaattagaatgtcattctcagtatgggaagctcatggaaactatatcctccacaaatacttaacaaattacttaaagatatactctgagaatgagaaaaaattcagaatataagaatgaagaaattattctttaaaaggaataatagtggatactgattaacctgagagtataactatctgttgtaaatatctttagaaaactaaccaaaaacataagtttttaaaaaatgtaacaattatattttaataatctcgcttagaacccaagagtgtatcaaaatcttccatatgaaacattcaaatgattatttgaattcaaattatattttgttcttaatttttaatttttaaattaaattttaatttcatttttaatattttaatttttattttgtccttaaatttttaaacacttttcaaaaacttaaagacaagccttagtgtgaaagccaataaacataaaagaaacatatagcataaaataaggtgggaacacctatatcttgcataattataattataaacttaaattggttaaattttcttgtaaaaaatacagattccaatattatatttttatttgtttatttattttgagacaaggtctcactctcttgcaaagattggggtgcaatggcacaatcaccactcaactgaagcctctacctcccaggctaacgtgatcctcccacctcagccctctgaatagctggaaccacaggtgattatattattttaaagctactataaaacaaagtgctacaattatgtttatgttaaaaataggtacacacttatacactggtgtttatccagcaactgcaaacaaaagtagcagtaagaatattaacatcaaagtatacttaaaggttgataaatcttgaagtcatattttatgtactttcaacatgccatcaacatagataaccaaagctgtaagacacaaaatacaacaatgaggtataatttcagtatatataattctcaatttcctagattaaggaaaaatgaatatggatccagaaggtctaaaacacatcgtgtcacttttaccaaaaacaccagtattagtctacaataaaagcaacacattcaaaaaaagaaaaacttgaaaagacactattatctggcctcaatgtaataaaacattaaatagattaaaaagttacaaattaaaaagtttccccaattgttcaagtcaaagagaaaatgaaagtaaaaataaaaaatatagactatttatgaagtgatgaaaatgagaagaatgcacgttgaaacgagatgtgsscaaaggcataataagagacaggttcataattttaactgctctcatatttaaacaatcaagtatgacaataaattcagcattggtttcaagaagttagaatatgagtaatcaaacattcctaagagaaacaggatgatggaataaataaaaatacaaagttagggagggggaaagtgccagtgcagtacaacatagcaaactaacatgagctattccctgtctctcttgaattcaacttcggagatgccaaaaaagaaaaatagactttgtatgggcttcagggtcttattcatcaattaataaaacagctgatgagaaactcatacagaacacaagtagttgcagatgtctttggaaaactaaggatctgaagcaggagagtacagtaaccaggaatgggggccagcaatttaatctttagtcttctccacataacctgagtaagcctgtatctggaggtacatcagggatagcctatttcaggccctgaagcttagacctcctagacactaacttattatcctttggtgcctttggtagaaacctttggtgtaatgtggtaggtaagctgcagcaccagagataatagtgaattaacactagggcagcaccagaatcccattacagttggacagaaagaagtataggtgagctggaactaattattttgtaaaaagtacacttacaaatatatgtaactaaaactcctgaaatacaaaaagttggcaacaagaggagaggtagaggatggtatgctatgggtattattttgttaaacgataaagacatagatattgatctgctttatatattgccaggaaaaaataacctaagactaagtcaaaataagtcaaggtaataaaatacaaatgtataactttaaagcagcagatgaaaatttgatgtacctaatggcaagtaggtagaaagacttaaaaaagaaataagaaaaaagaatggacattgtaaaatatgaaataaggtggcatacataagttggaaaaaatacatacataagatggaaaaaatagatgctgtgaaacaaatataaagcaaaagaaagccagagttaattttttattatgagacaaaatataatttgggacaaagtgcaccataaaggacaagagagatattataaataaagaagttgtaataatcctcaacatatatgcagttaacaacaaagatgtaaaatatctaaaactaccactggtaggattacaggaagaaataaatgatggtaactggtgattttaatatatgctttttcagatttggtagatcaaatagacaaaatataagccatagtacagaaaaaatgtgtatatgtgtttgtattattaatcttatttatatataaaaaaatatggctgggcatggtggctcatgcctgtaatcctagcactttggcaggccaaggtgggcagatcacctgaggtcaggagtttgagaacagcctggccaacatggcgaaaccacgtctctactaaaaatacaaaaattagctgggtgtggtggcgcatacttgtaatcccagctacttgggaggctgaagtaggagaatcacttgaacccaggaggcagaggttgcagtgaactgagacggcaccactgctctccagcctgggagacagagtgagactccatctcaaaaaaaaaacaaaaaaccataaaaaaaaatatatatatatatatatacacatacacacacataaacttcacatctaaatatggaacaagggtgctttttgcataaatgaggattattaaataaaaactgtttatgtatcaagctattaatataaaatatcttaaaaaattctacacaatagctattatatggaatatgttttctgatcagagtgcaataaagttgcaacccataacacaatatagcaaaataaagttctacatgtctggaaaatgaaaaaaaacactatatcattcttttgttaaaaagaaaattgcaagaaaaaatacatataaataacaatggcattctatctgtaaaaaattgtgacatgtagttaaagcaatattcagaaaaaaatcagtacaggtgtcagaatgtaagagttattaaaaataaataaactaagtgcaattaatcaaccaagaagaaaaaaagaagaaagaaaaaagaaatattggtctttgttttttttctttttttaatcaaagaagaaacaattaggaactaaaaagctagaatgacagataaaattctacaaaaaaacctaaaaaagtaaaaatattcaaataaagagaagaaagaatataaaagggataactacttataaatataaaatacttcaatacttaaaaattattttataaaaatataagttaataagtataatagcctaaaggaaatatctamatttcttgaraaatgcaaaataccaaaatcgtccccctgaaattgaaaacttgaacagagtaataattattatgaaaggtacttaaaatattcctccactaatgcacagatggtttatataaggttagtgcaaaagtaattgtggtttctgtcattacctttaatatgctgaattaaaagctgaataataacaaacttccaggaacggwactttctatcttatctacatcattaagtctcttttataaaagtaatttctgaaaataaaaaaatrcggaaaaacttcctaatttatattgaagcaaatataatctttgtggcagttaaaatttttttgttgttgttataataggtttttggggaacaggtggtgtttggttacattaaaaaattctttagtggtgatttctgaggttttggtaaacccatcacctgagcagtgtacactgtacccaatgtgtagtctttaacctcttgccaccccaccttttcacttgagtctccaaagtccaacgtatcactcatgcctttgtgtacccatagcttagctcccacatttaagtgagaacatacgatgtttggttttccattcctgagttacttcacttagaataatagtctccaattccatccaggttgctgtgaatgccattatttctttcctctttatggctgagtagtattccatggtacatataaaccacattttctttatccacttattgattgatgggcatttgggctggttccatatttttgcaaatgcaaattgtactgctataaaaatgtatgtgcaagtatcttttccatacaatgagttcttttccactggatcaaatgatagatctacttttagttctttaaggaatctccacactgttttccatagtggttgtactagtttacattcccaccaacagtgtaaaagttgttcccttttcaccatatccatgccaacatcagttattttttgattttttgattatggccattcttgcaggagtgaggtggtatcacattgtgattttgatttacatttccctgataattagtgatgttgagcatttttccatatgtttgttggacatttgtttatcttcttttgagaactgtctattcattcatgtccttagcccactttttgatgggattgtttgttttgtcttgctgatttgtttgagttctttgtggattctggatattcgttctttgtcagatgtatagatggcaaagactttctcccagtctgtggattgtctgtttactctgctgattgtttctttcactgaacagaagctttttagtttaattacgtcccatctatttacctttgtttttgttgcatttgcttttggattcttggtcatgaactctttgcctaagccagtgtctagaagagtttttctgatgttatcgtctagaatttttatggtttcagatcttagatttaagtctttgatccatcttgagttgatttttgtataagttgagagataagcatccagtttcagtcttctacacctggcttgccaattgtcccagcaccatttgttagtaatgtgtcctttccccactttatgtttttgtttgctttgtcgaacatcagttggctgtaaatatttgggtttatttctgggttctctattctgctccattggtctatgtgcttaattttataccagtaccatgctatatcggtgactgatagtatagtttgaagttgggtaatgtgatgcctccaaatttgttcttcttgcttagccttcctttggctatgtgggctcttttttggttccatatgaattttagtcctgaatggtactgtgaagaatgatggtggtatttttatgggaattgcaaggaatttgtagattgctttttgcaatatggtcattttcacaatattgattctacccatccatgagcatggaatgtgtttccatttgtttgtgtcgtctatgatttctttcagcagtgttttgtagttttccttatagaggtcttttaccttcttggttaggtatattcctaagtattttatttttctttgcagctattgtgaacggcgttgagttcttgattcgattctcagcttggtcgctgttggtgtatagcagagctactgatttgtgtacattaattttgtatcctgaaactgtgctgaattcatttaccagttctaggaactttttggatgagtctttatagttttttaggtatacaatcatatcaacagcaaacagtgacagtttggcttcctctttactgatttggatgccctttctttctttttcttgtttgctctggctaggacttccagtactatgttgaatgcaagtactgaaagtgggcatccttgtcttgttccagttttcacggggaatgctttcaacttatccccactcagtataatgttggttgtgggtctgtcatagatggcttttattaccttaaggtatgtctcttctatgcctattttgctgatggttttcatcataaagggatgctggattctgtcaaatgcttttttctgcatctattgagatgaccatgtgatttttaaattttaattctgtttatgtgatgtatcacatttattgacttgcatatgttaaatcattcctgcatccctggtatgaaatccacttgatcatggtaggttatctttttgatatactgttggattcagttcactagtaatttgttgagaatttctgcacccatgttcatcagggatgttggtctgtagttttctttttttgttatgtcccttcccggtttgggtattagggtgacaccagtttcagagagtgatttaggaaggattccctctttctctgtcttttggaaaagtgtcagtaggattggtaccaattcttctttgaatgtctgacagaatgcagctgtgaatgtgtatggtcctggactatttttgttggcaattttttacattatttttcttttttttattatactttaagttctgggatacatgtgcagaacatgcagttttgttacataggtatacatgtgccacggtaggctgctgcacccatcaacccatcatctacattaggtatttctaatgctatccctccccttgccccccaccccctgacaggccctggtgtgtgacattcccctccctgtgcccatatcttctcattgttcaactcccacttatgagtgagaacatgtggtgtttggttttctgttcctgtgttagtttgctgagaatgatggtttccagcttcatccatgtccctgcaaaggacattaagtcatccttttttatgactgcatagtattccatggtgtatatgtgccacattttctttatccagtctatcaatgatgggcatttgggttggttccaagtctttgctattgtgaatagtgctgcaataaacataggtgtgcatgtgtctttatagtagaatgatttataatcctttgggtatatacccagtaatgggattgctgggtcaaatggtatttctagttctagacccctgaggaatcaccacactgtcttccacaatggtcgaactaatttacactcccaccaacagtgtaaaagcattcctatttctccatatcctctccagcatctgttgtttcctgactttttaatgattgtcattctaactggtatgagatggtatctcattgtcrttttgattcacatttctccaatgaccagtgatgataagctttttttcatatgtttgttggccacataaatttcttgttttgaaaagtgtctgttcatatccttagcccactttttgatggggttgtttttttcttgtaaatttgtttaagttccttgtagattctggatattagccctttgtcagatggatagattgcaaaaattttctcccattctgtaggttgcctgttcactctgataatagtttcttttgctatgcagaagctctttagattagttagatcccatttgtcaactttggcttttgttgctattgctttttgtgttttagtcatgaagtctttgcctatgcttgtgtcctgaatggtattgcctaggttttcttctagggtttttatggttttagatgttrygtttaagtctttaatccatcttgaaataatttttgtataaggtgtaaggaaggggtccagtttcagttttctgcatatggctagccagttttcctaacactatttattaaacagggaatcctttcctcattgttggcaattttttttaattaccatttcaatctctctgcctgctattggtctgttcagagatttttatatcttcctggtttaatctagggtgattgtatatttccaggaatttaaacatctcctctagattttctagtttatgcrtgtaaaggttttcatagtagccttgaatgatcttttctatttctgtggtatcagctgtagtatctcccgtttcatttgtaactgagcttatctggatcttctctcttcttttcttggttaatctcgctagagatctatcaattttatttatcttttcaaagaaccagctttttatttcatttatcttttgcatttgtttgtttcaatttgatttagttttgctctgatcttcattatttcttttcttctgctgggtttgggtttggattgttcttgtttcttcagttctgtgaagtgggaccttagattgtcagtttgagccctttcagactttttgatgtagttatttaatgctataaactttcctcttagcaccgcttttgctgtatcccagaggttttgacaggttgtgtcactattatcatatagttcgaataacttttaaatttccatcttgattgttgacccaacaatcattcaggagcagggttatttaattaccatgtatttgcattgttttgagggtgcctttcagagttgatttccaattttatttcactgtggtcttagagaacttgagataatttcaattttcttaaatttactgagacttgttttgtggcctatcataaggtctatcttggagaagttccatgtgccgatgaatagaatgtatattctgcaattgttgggtagaatgttccacaaatatctgtgaagtccatttgttgtagggtatagtttaagcctattgtttctttgttgactttctgtcttgatgacccacctgtctagtgctgacagtagagtatgaaagtcccccactattattgtgttgccatctatctcatttcttaggtctaacagtaataaatttcggagctccagtgttagctgcaaatatagttagaattgtaatattttcttgttggactagtccttttatcattatataatttctctctttgtctttttttaactgctgttgctttagtttgttttgtctaagaatagctactcctacttgcttttggtgtccatttgcatacggtatctttttccacccctttaccttaagtttatgtgagtccttacgtgttaggtgagtttcctgaagacagcagaaacttgattggtgaattcttatccattctgccattctgtatcttttaggtggagtatttaggccatttacattcaatgttagtattgacatgtgaggtactattctactcattgtgctatttattgcttgaatacctttttttctattgtgctattgttataaaggtcctgtgagatttatgcttgaagaaggttctattttggtgtatttcgaggatttgtttctctttgttttggggaggttttcctcaattattccctcaaatatccgttttccaaacttttagatttctctccttcctcaggaacactaattatttttagtttggacatttaacatagtcccaaacttcttggaggctttactcattttttaaaattcttttttatttgtctttggtggactgggttaatttgaaagccttgtcttcaagttctttcttctgcttgtttgattctactgctgagaccttccagtgcattttgcatttgtgtgtgtccttgatttccagaagttgtgactgtttttttatttatgctatctatttcactgaaaaacttttttcatttcttgtattatgtttttgatgtctttaagttggacttcaccttcctctggtgcctccttgattagcttaataattgaccttctaaaatatttttctggcaattcagagatttcatcttggtttggatccattgctggctaactggtatgatcttttgggggtgttaaagaaccttgttttgtcatataccagaattgtttttctgattccttctcatttggatagactacatcagagggaagatctgggattcaagggctactgttcagattcttttgtcccacagtgtgctgccttgatttggtgttctctcccttaccctaggaatggggtttcctgagagctgaaatgtagtgattatttttgcttttctggatctagcacccagtggagctaccaggctctgcactggtacttgggagtatctgcaaagagtactgtgatgtgattcatcttcaggtcttgtagccatggataccagcacctgctttgatggaggtagcaagggagtgaagtggactctgcagggtccttggttgttatttttattgagtgtgctggtcttgtattggttggattccagccaggagttggcactttcaagagcacatgagctggggtcctatagggaggatgcaaatttgccctaggaacacctggtcaagtattcaggtttctcaggcagtcagcagggccacagagctcccaagagattataacctttgtcttcagctaccagggtgggtagagtaagaccaccaggttgggggagggacaggagtgtcttagctcagtctctcctttggtggggcttgctatggctgctgtgggggaggaggttgtggttcccagtccaatggagttatattcccagggggattatggctgcctctgatgagtcatatacgccaccagggaagtgggggaaagccggaagtcataggcctcactctgctcccacgcagcccagagtcctaaaggccagtctcactcccaccgtgccctccacaacagcaccaagtctatttccaggcagcttatgaccagggctgagaactcaccctaaatcacgagcttccctgttgagaaagcaagcagactcacacttttttggcattttagggagcctgcagcgstgatccagttccttcaaaaggtctgtggattctcttggctttcctggtattttcctgtggtagttcttggggcaaaagttcacaatgtgagtctccacatgctgttctgtccaaccaagcagaagctgcagcagttctccctcctacctgccatcttaatcctcccagtttttgtttatttgagatggggtcttgtgtggttctgtcactcaggctggagtgctgtggcaaccttcattgctcattgtaactttgaactcctgagctcaagccattttcccacctcagcctcccaaagaactaagattatagatgtgagccagcatgactggccatgtggcagcttttatttaacccactccagtaatatgtcctgttacttatagctcgatacttaggtaacttatgtatgtatgtgacttatataatgaataaagggcacgataaaattttagggaggatgagaaaaaaggcttgaattaaacaaatatattccatgaacttggattaaaagattcgatgtgatttttaaaatgccagttctctagaaatttactagtttaacataattacaacaaaaaatgcagcgtatttttcaagggtatttataaagtgattcaaatattttcttgaataagttgaaaaataaaggcatttttgaaaagttggaatgatgcgacttagctcatcaatattgacgtatattctaatagtattgcactgaagaaaaatgagaagatggagcagactatgaagccataagcagttcagaaggtaaaggcacaaattctttagataataatgttggccctcccaccaaagggaaattggtaaaggagcatttaataaaagggctagccaacttttgttggctatttggaaacattaaattgggtacatgtcttatatcatacaacaaattccagtatatgtttgacaccattcattccataaatatttcaccactaactatatgccaagaattgtacaaagactgaggacatgataataagcaaaaacatgcgagctttgagtttagcaggaagatagatacaaaacaggcccaaagtatgactgattgagataatgtcagtctaatgtattttgcccgagtagtaaaacacatacttttgcttaaaataattaagacaatcctgtaacatgaaactttgtaaagactctaatacaatatgatccttcacactcaccccaagttttgtggatgatcctgtgaaaagtgcccagtgctatatartatttggacatgtatattaatcacataaagaaatttaagactatgatagtgacagtgtacaagatacaaatgtcacaaaagagtgccacacaggtgatacacaggggcaatattctgaagaaatgaatatattaatgttaaatgtaaaacaaaagaggataaaagaattgttaagtggaacgatgtgatattgcctgttattgaggtgaggatgaaattccaattcttagaaaccaaaactaaaataaagttacagatctggttactcaagctaaaaataaatcagccacattacacagaatgaatcgagatcacacagcagtctacaccagggtcagtaacatttttcagtaaagggccagaaagcaaataatttaggatttgcaggccatacagtctctattgcaactactcaactttgctgttgtagtatgttatcagccacaaacaataaagagatgggcatgcttgtgttcaaataaaactttatttataaaaagtagcccagatttggacaatgtatcataatttgctaacccctggtctagatcactctacacaatggtgcatgcttaaaacaatatttatggaactttgagtccttagctcaattttgaaaatggaagatataactttccatatattatctgtgccctgtaggctcttcacctcccataaaagaatgtggacccttcttccagctcaattatctaccaaagactaggggtcatactcaactggtaaaatgaaagagctgtattataggctttcgccagggaatactattttgatctcactgccttcaatatttgttaaagttgggttgtgagttaaaatattcttagagaacaagtcatctacctacttttcttgataacttatattctttgrccaaataagggctgcagagaaacaggtaactagattacacctctttctcccactcagccactttctgcagaccttttctttttctgcattgctctttggtttgaagatatcagttaatttagaaagtctttagaagaaatgaacaagttgtaaataatgacacatttctcttcaatgatggaggatactcttccaaaacaatgaaggatagataaactgctttgggacctattaatcactgtttctgttttacatgtgtcatggttctgagaagctactttggaagagttatccacatttcctctcccaaggttctattcttggcccttctctgagagcacattgcctcaggagtctgatctcttcaaactctgagactgcatcaccatactcccttgcctgggtttggaagcatcagcagaaaaggaaagcagagtcagggtgtattcttacccttgccccaaggatgcagcttttaccagtggctgtgcatcttataaagctgcagatgttgatggtaacagcctcctgctgttgccagtccctgtgcacttcaccaccccttgttagtactattaactctgttcaaagtctgtgtattaaactctcttcaagtaaaccctttgggtatgccatctgatgcttattagaaacctatttcatgaacagaaagacaaaaagagactttttaggaagtctctgccttgagagaaaagcttatcactagttaccaaaacttctgtaaaactgaaaaaatataacttaaacatcataaaactgcacatttaagttactgcttgaaattatgggctacaggtatgtcactatgacaaataagcgtttaaatcaatgaccgtggaacgagatctacttaaattctacttgaaattcaatgagactcaagacaacctgttattaaaaagctttgatttgcaaactgattattcttaatatattatttgaacagaaatatatacttaatgaaatggacaggcataaagaaatattttgcagcttagtggcatacctctttgaacttgtgactgagcttgcttgtgtccagttctgatggggaaaacatgtcctcattctcaggcagctcaaagacttcaatggccatgtcgctgccaggaaggacaggtcctacctcatcttcttcttcatctgtggcatattctcctgtctgaaaggaaggggatttcagaaatccagctgtccttaccccaggtggaggtgagttatttgaaaatattttataaaagacaagtaagacatgtacccaaatggtaaaagtgtaagtaggtttttcagccaagcatgcctcatgcagccaatgttataaacaaatgttagtttaaagatccaaagtgacaaacctatgccatatacaagtgcgtttctaaaaatctactagtrtcagtggcatctttaatacagaaacaagagttgttttttctgagyatttgattattttaccaaataaaattatgttgctgagggaaataagtcatttctttaaattctctttgtgaatacgccacccaatactgagagcaatgaaaagggaaggggagtttaatgaatcacagagttggaagggaccttaattaagccttgcaaaggtttagctgattaattctcctaagcgttagagttcaaacagttctgttttgtttgcttgttaattattgtggtgaactagtgagctaaagaataaaccaaaggtttctaacttgcagcctgcaccaagtgtattgttttgcctgcctagcacatttacaaatctgagtattctgtcaatgtgagaaaaatgtttcacataaagttctagatttccagctttccttgagaaagccaagcatccgttaatattaggcatattgggacatgataacaattggccagttagtagtggttgccccttttagaagagttatatgctttctaataccccacaatttttctaatgtcatatagttctatattgttagcttcactcctttgtaatacccacctgtccctgtaggtatctgagttcctgacccctggaataaacattcctctttgccactaacttccttaactttattagaaagtagatcctctcctggcagcatcaagctatgatactgtaattcaaaataattgtttgaaatctataccttatgatataatttaaagataaatcactgacagggttaaaaaaacaaagttcattgaactcatccctgttccttcaggtagcacgttatctaacacataaaacagagacaggaattcatattgcctttaaaaaacttccatgaacggtgtactgaatgatctattcctttgagtaaataggctcagcatctgattgctgtttttttttcttttgattctgtattatattcttcctgccaaagcaggagcccctcacttcccctttccccccacctatgtttgcacgtgaaggaaatctggtccttaatcccaatctaataattcccaatgtctgaaagaccattattaaattgccttcagatttctctttttcaaataaaataattctagttgcctccaaggtaatttgctgtaattgtctttgtggttgtgctctgatttctctccaacttttccacatttctctaaattgcagagcctgaaagtagacacagtttctagtaaggaatttgaaggtcatcaaccatgatgaacacactgccacagcatccttcacactctacctccccacacagaggctattatcatggagaacttgacattggtggcatctgtgtacagaagtaagctcagaatattccatgtggagcaatgattttccaaactggttacaggttagttggaacctttactttccccaaatataatcacaggtgatttgactgaaaggaaaagaggttggtggcctccagttggatcctatgtatctcctgagtacctggaactctagatctctgtagaaatcagtctgaaaatgtctaaactataaataccaattcaagtgtctttgccactggcaggtgaaggtagctgaagaatgggagctggttggtcagatagcttgtacttatttattagcacaatgagatcctacaaatcttaaaaaactctaattccagatttggcttttttttttcttttgtattcttgaatcaattcatctcctgttcatacccatttctagaaccaacaaatacttggtaaattccagtgaagttaattaataggaatgcagcaagactggcaagtaaataatctcaagataccttgctgaaaaattttcatatagaggtataaaactgtgtacttgtttttaaccctatcattacaaatggcagcaaaacccaagcctttattatgaaggcttaaaccaggtatatagaactcactatatacagcattgaatgactcaagaaactcttatgctaaatttaaagtatgactaagccctaacaatgtggcacgttttaaacatgagttgaaatgaacaatttgatttccttttgctagcttgaaaataaatacttgttcactacatgtgagagaattaatataaatatgtgcctaggatgggacctgacatataacaggatctcagcaaatatttttaaaagaataaatccaagaatgccaatgcattaacttggtaatagacagaacttcctaaggagattttcaatatcaagaaaatgaactgtggtcacttgttaagaaggcagtagtatattatactaacaaccttactgtgaataacaggattagggtatgcataacatatgcaattcttaccttttagctgcactttgtcatccatatatactttcattatgaaaattatcttaataaacatacgttgttaagcgttcttcttgattcttttgtggactttgccagtatcctctccttcccaatacccaaattacctgcagtactgttaaaattcttatcactcatttcatcttttcatttactaatgccttctttctccaattagccttataagcatcctgaggacaaatatgtcttttgctgtcttgattctacttattacttattataggctaaggatggcatgtttaaaacattatgttataactctctcttgctgatcatttgccattccaaccttaaataggctttaggatgatacatttactacagaatctcataaatacctggaaataaaaaagttacacttagtggactaagaaaaataggttcttctaatattttatctttattgaaaatggaaattatttttgtggttacactgcaaataaaataagtaacatggaatgtgtcagcagaatgttgtaaaccgcaaaattagattggattaaatctgccatttacaaaggaagatgaacaatgttgtaccaaaaaaacccaaaaccaacaaaacccaaaattactataacaaagtatttccattggtatctagctctatttctgttcaaattaaaaatctttcaagtaaccagagactcttgaaattctttgtcctaacacgcaaatccacttcaaatgtggcagtaacagttttttgggtaaaaaactgacagagatagtaaattttccctttcatgtctttacctacctttctgattaatatatgatatttttagtagccccacacaaaggggtaaaaaatgaagagcaatacttttgcaacttactgtgtgcccagcattggacattcctcaacaactatgggatatgggtgttaccatactatcttaatttgaggaaactgagactcagagaccatacctaaggtcaattaattaagttgttgaagctgcattcaacatattttaaagcccatgctccttcttttatgctatgatgcttccagtctacagaaactaaagttctgcagaaaaaaaaattgggaatatattttttaatgatcccatccccaaacctgggtggataatcctgttgtattgaaattcaccttccacggctttaaacattatcactgaattcactttgaagacttgcacctctgtatagtgggctccaaagttcttgtcctcttctcttctctcataatatgcttaccctggacaagaatatagaattcccctttgaaagaatcgggagcagtacttgtgggttaattgcaatacagagaggaatcgctgacaaacaaacgaacacacacacatatgcataccattttatgttaacttaaatcacagaagtattcatttatttgctcatcttttaattgcagggccaagtcttcctcttggcttatgggtctgctgactgacattttatgcactcttgtataaactacaaccataacatatagtgtatgaaattactgtagcatctttaaaacagatgaaaaagatccttccaaggcaaaatgaatgcaaaatttctatagaattttatggttttcccctcttttatatttccttctcatacctaattttcttgagctgccagtctttattaaatcttcccaaagcactgtatttagttttcatagatacaacaacttcatttacacacatattacatcacttaatattttataaaataacataattatagtaacaagtacaaccaacaggttgtgtctcttggtaaacatataacttttgactagtgggagacgtatgtagacatactagagcctgggacactcatgagagctatagatatcagtctaggttttgcagaaggaacagagagtatctgttatattggggagttggttaagtggggatcaatgaaaggattttggttttgaagtcacgtagaactgtgttcaagtcctggtcctgagacattgggaattagcgtctatatctaagctttaatcttttcatctataaagtaaggacaaaacagttccttagcataagaaagctgtcataagattaagttagatggtgcctatgtatttaacacaaggkctggcacatggtaggtgctcaaaacgagtgaccgctattgttgctgctgctggtgtcaaaatactgcaatagcaaaatgctaacgattttctcatctgtatcttgtaaccacatttgctaaactttggtctcataaatgtaagttcctagaagacctcaacacatgaatcttttataagcaaattggtcatttctgaagtaaaacttttcctttcctctatatatacctgttcctctacttatattcccagkttggggtaggcaccagcttctacccaagcccaagaaaacttccatgcctctgtcctcctcatttactggccccaacctgccccaaggattcaagatgaataaccgtgtacatgagaacatcctgtgaagctgctgcccttaagactctcctaattcactcctttatgctcccactgtatagctgacatcactcataatgctttgatgtttctatatctgccttctctcatcaacttctttcatctgaacattcctagagagtgccaggtacaatttatccctgcaatcccggtgtggctagtacattgcttggcatatagtgggcactgaacaaatgtttgctgaataaattcagatagttgtagccacatctgcatagcacagtagagcctgattttcctgttaatctcagctttccaggatgaaatatagtgaaacacagctgcagctggggcctaaatgacccttctggggattttctcttgttgttaggttcaaccattagcagtaatttttgctgtagcaatgtttgctctggtaaattcagggaaactaaatggcgctaatcacaaaaatagccttaattatgcagtttttgatggaatttgtttaccggatttgaatttggtgctatgtattttcagacgcacttctgtgagagaataaaggagagctgcttcttccctggaggaggaaaacgtcaaactcacattttaatgtttaaaattcctaaatctgcaccaaccatccagaggcctttcggcaaaaacatccctctctctgccgaagcatctctctttccatttttttgtcagtgactcctgtgtgtcctaattttataatgttagtacacttagtctctttgaatgttgtttcctcatctataaaatggaaataacagcaccttcttcatttaaagaggttgctatgagaattcattgtagtgatatgaaagagttaaccacagtgcctagaatatgctaactgactgcatgacgttatgattatgatkgttttcaccatcccttatttctccaggacaacaccataaactaatgcaacaaaaaaagcatttggggttggagagatgagggccagaagagagaaaaatcctaatgtcccagttgcataacagtaagtaagtcatttagtttgtatcttttgtggtctcttctataaaatggtgtaaaagataccaatctcataggatattgagaggattcgaagaaatgaaatatgcaaaatatccaaaatgatgcctggcccagcatatatatttatttttttctcccacttatcaactcattcaaaattttcttttcaatcttttgttatcagaatatttcctgattttatctgaaagtgacagggagaatggaaccaagttggaaaacactctgtaggatattatccaggaaaacttccccaatctagcaaggcaggccaacattcaaattcaggaaatacagagaackccacaaagatactccttgagaagagcaactccaagacacataattgtcaaattcaccaaagttgaaatgaaggaaaaaatgttaagggcagccagagagaaacatcgggttacccacaaagggcaacccaccagactaacagcggatctctcagcagaaactctacaagccagaagagagtgggggccaatattcagcattcttaaagaaaagaattttaaacccagaatttcatatccagccaaactaagcttcataagtgaaggagaaataaaatcctttacagamaagcaaatgctgagagattctgtcaccaccagacctgccctacaagagctcctgaaggaagcattaaacatggaaaggaacaaccagtaccacccactgcaaaagcatgacaaattgtaaagaccatcgaggctaagaagaaactgcatcaactaacgagcaaaataaccagctaacatcataatgacaggatcaaattcacacataacaatattaaccttaaatgtaaatgggctaaatgctccaattaaaagacacagactggcaaattggataaagagtcaagacccatcagtgtgctgtattcaggaaacccatctcatgtgcagagacacacataggctcaaaacaaagggatggaggaagatccactaagcaaaaggaaaacaaaaaaaggcaggggttgcaatcctagtctctgataaaacagactttaaaccagcaaagatcaaaagagacaaagaaggccattacataatggtaaagggatcaattcaacaagaagagctaactatcctaaatatatatgcacccaatacaggagcacccagattcataaagcaagtccttagagatctacaaagagacttagactcccacacaataataatgggagactttaacaccccactgtcaacattagacagatcaacgagacagaaagttaacaaggatatccaggaattgaactcagctctgcaccaagagaacctaatagacatctacagaactctccaccccaaatcaacagaatatacattcttctcagcaccacatcgcacttattccaaaattgaccacatagttggaagtaaagccctcctgagcaaatggaaaagaacagaaattataacaaactgtctctcagaccacactgcaatcaaactagcactcaggattaagaaactcactcaaaatcgctcaactacatggaaactgaacaagctgctcctgaatgactactgggtacgtaaggaagtgaaggcagaaataatgatgttctttgaaaccaatgagaacaaagacactacataccagaatctctgggacacatttgcagtgtgtagaaggaaatttatagcactaaatgcccacaagagaaagcaggaaagatagaaaattgacacyctaacatcacaattaaaagaactagagaagcaagagcaaacacattcaaaagctagcagaagacaagaaatcactaagatcagagtggaactgaaggagatagagacacaaaaaacccttcaaaaaatccgtgaatccaggagctggttgtttgaaaagatcaacaaaattgatagactgatagcaagactaataacaaaagagagaagaatcaaatagatgcaattagaaatgataaaggggatatcaccactgatcccacagaaatacaaactaccatcacagaatactataaacacatctacgcaaataaactagaaaatctagaagaaatggataaattcccagacacatacactctcctaagactaaaccaggaagaagttgaatccctgaatataccaataacaggctctgaaattgaggcaataattaagagcctaccaaccaaaaaaagtccaggaccagacggattcacagctgaattctaccagaggtacaaggaggagctggtaccattccttctgaaactattccaatcaatagaaaaagagggaatcctccctaactcattttatgaggccagcatcatcctgatgccaaagcctggcagagacacaacaaaaaaaaagagaattttagaccaatatccctgatgaacattgatgtgaatatcctcaataaaatattggcaaaccaaatccagcagcacatcaaaaagcttatccaccatgatcaagtgggcttcatcactgggatgcaaggctggttcctcacacgcaaatcaataaacgtaatccagcatgtaaacagaaccaaagacaaaaaccacatgattatctcaatagatgcagaaaaggcctttgacaaaattcaacagcgcttcatgctaaaaactctcaatgaattaggtattgttgggacatatctcaaaataataagagctatttatgacaaacccacagccaatatcatactgaatggcccaaawctggaagccttccctttgaaaactggcacaagacagggatgccctctctcaccactcctattcaacatagtgttggaagttctggccagggcaatcaggcaggagaaagaaataaagggtattcaatgaggaaaagaggaagtcaaattgtccctgtttgcagatgacattattgtatatttagaaaaccccatcgtctcagcccaaaatctccttaagctgataaacaacttcagcaaagtctcaggatacaaaaccaatgtgcaaaaatcacaagcattcttatacaccaataacagacaaacagagagccaaatcatgagtgaactccctttcacaattggttcaaagagaataaaatacctaggaatcccaacttacaagggatgtgaaggacctccccaaggagaactacaaaccactgctcaacgaaataaaagaggatacaaacaaatggaagaacattccatgctcatggataggtagaatcaatatcgtgaaaatggccatactgcccaaggtaatttatagattcaatgccatccccatcaagctatcaatgactttcttcacagaactggaaaaaactactctaaagttcatacggaaccaaaaaagagcctgcattgccaagacaatcctaagccaaaagaagaaagctggaggcatcatgctacctgacttcaaactatactacaaggctacagtaaccaaaacagcatggtactggtgccaaaacagacatatagaccaatggaacagaacagagccctcagaaataataccacacatctacaaccatctgatctttgataaacctgacaaaaacaagcaatggggaaaggattccctatttaataaatggaaaactggctagccatatgtagaaagctgaaactggatcctttccttataccttatacaaaaattaattcaagatggattaaagacttaaatgttagacctaaaaccataaaaaccctagaggaaaacctaggcaataccattcagaacataggcatgggcaaggacttcatgtctaatacaccaaaagcaatggcaacaaaagccaaaattgacaaatgggatctaattaaattaaagggcttcttcacagcaaaagaaactaccatcagagtgaacaggcaacctacagaatgggagaaaatttttgcaatctactcatctgacaaagggctaatatccagaatctacaaagaactgaaacaaatttacaagaaaaaaacaaacaaccccatcaaaaagtgggcgaaggatatgaacatacacttctcaaaagtagacatttatgcagccaacagacatatgaaaaaatgctcatcatcactggccatcagagaaatgcaaatcaaaaccacaatgagataccatctcatgccagttagaatggcgatcattaaaaagtcaggaaacaaaaggtgctggagaggatgtggagaaataggaacacttttacactgttggtgggactgtaaactagttcaaccattgtggaagacagtgtggcgattcctcaaggatctagaactagaaataccatttgacccagcaatcccattactgggtatatacccaaaggattataaatcatgctgctataaagacacatgcacacgtatgtttattgtggcactattcacaatagcaaggacttggaaccaacccaaatgtccaacaatgatagagtggattaagaaaatgtggcacatatacaccatggaatactatgcagccataaaaaaggatgagctcatgtcctttgttgggacatggatgaagctggaaaccatcattctcagtaaactgttgcaagaacaaaaaaaacaaacaccgcatgttctcattcataggtgggaattgaacaatgagaacacttggacacaggaaggggaacatcacacaccggggcctgttgtgggtggggggaggggggagggaaagcattaggagatatacccaatataaatgacgagttaatgggtgcagcataccaacatggcacatgtatacatatgtaacaaacctgcacattgtgcacatgtaccctagaacttaaagtttatatatattaaaaaaaaagaatatttcctgatttttcactccattctcattgtctagtcacccactcaagaaacatctaaaatccttctctagattactcatatggcgtctgtgttccttaccttcaggctctcaccttgtcaggtcattggtaatattgctgaaaaattattcttcctaaaattttgaccaaaaaaatcattatttgccaataaaatattttccgacaactcaaatccattctttagtttttatccccttccttttagaaagtatactccagaagctgggactctatttcctactataggaggcagactccaaaatgaccccaatgaccttgctttctgggtgttcatgcccttgtataatcccttcccactgagtgagggctgaatgacagatttccaacaaccagaatacaacaaaagtaatggaatgccacttctcagattagttgaaaaaaaaagactgtgatttgtgcctcttttgtcctcttgctctctctctctcagccctcactattgggaagcaagttgccatcttatgagcagggagaggcccacatcccaaggagctgatgtttctggccaacagccagtgaggacctgaggcctgccaggtcacatgagggagcctggaagtgggtcttctcagtcctgccaacagctgtgagtgagcatggacgcagatcctctcccagtggagcatttggatgaccacggctctggctaacacctcacttacagccttgggagagattctgagtcagaggcatccagctaaattgacccacagacacggtaatgtacaaatatttcttcttttaagttgctaagttttggtggtagtttgtaatgcagcaaattgaagagggatgctgccaaaacaaatacagaaaaaaacagggaagtggcttggaaacaggcagtgggcgaaggctaggattccgaagagtgtattggagcaagactaaattgcactgcacagattgtgagtggaaactggaagggagcgtgcttattatgtagtgacacaaagcttagcaacattatcaccttctctaacgagaaagtaggaagtgttccttgtgaacagggtgatctggctaagtagacttctaaacacagtggtgaaggtgcagcctgatttcttcttgctgcttgtagtaaaatgtaaaaagaatagagttcagytgagagtactattaaacagaaaggaattctttctgtttaaacagaaacttgatggttttcaaagtcttaaaattaagtctacagttaagaaatggcttccaaacagagttcaaatccatggaactgccagaagaatgcggtttaaaaatgaagcagaatgtataaccaggctgggcgtggaggctcacacctgtaatcccaacactttggaaggctgaggtgggtggatcacttgaggtcaggagtttgagaccagcctggccaacatggtgaaaccttgtttctactaaaacaaaatacaaaattagctgggaatggtggcactggcctgtaatcccagctacttgggaggctgaggcatgagaaacgcttgaacccgtaaggcagagattgcagtcagccaagattgcatcaatgtgctgtagtctaggcaacagagcaaaactctgtctccaaaaaaaaaaaaaaaaagaaagagaaagaaagatagtacaaccaataaaatcttaagaattctgcccttaggaaattcaaatttttgaataatgagtgataaacaaacctgtcactgcctaaagggacatactgtctcccaatgataccaacatcattggaaagataatctgaaacataggctgctggtgctgctgctgctcaaaaaacaagcagagaagggagaacccatggaggaattgtctccaaacaacgtccaccctcatttctacacagtcttggcttgaggtgaattttctccgagtatggcattcccttggccacactgatcaatgtaaccaagagtggctaggaccaaagccattcagtctatctcagagcatatgattaatactactatcaataggattccaagcagcagaattagtctaactttcggcattgataacaactatattctctaggctcccagacccaactggttaaagaaatcccataaaccatcaggatataccttagaaacccaggactttctccttaagcttctgtattgacctttccacttggcctaaggtattgaaccaggtacagcaggatcaataattacatagactcaaaccttggcatacaaggaggaagtctaggggttagagcaattctactgtccagaaaaaccctggccaaaaggttgaggctracmtgactgccttccaggactgaggtggtaccaataaccacattacctaaaatcaggaaccattttcataagatcttatctgattaaatgactttaatcataaggacaattgcctgtagggctcatacaaataataaattagttatccctcaggaaagctccctttagtaactaagagtagcctcattttggagggatctctataatcatctgaaggctacatgatctaatggtggtctttctttaaatacatatatatattttaaaattctttaaaatatcctaaagaaaagatttcattttttctttatttttaagaaaagacttcttacaaaggtctttctttggtgatggatatcccaagtaaacggatttgatctttacaaattaaatgaatatattaaattgtcacatgtaccctgaaatgatgtatatcttatgcatcaataaaaatatttttaaaagaatcacctggagatcctattaaactgcagattctgattctatttttaaaagcctttctttaaatacatttaaatatataaaaattcctctaaggtgcagctacataagcagttcaaagaatgtgaccagttgccacaatttgcttccactgtttgccatcccaaacttttttttaattgattgattagagacagggactcattctgtcacccaggctggaatgtaatggcacaatcatagctcactgcagcttcaaactcctgggctcaagtgatcttcccacctcagcttcccatgcagttgggactataggcatgcagcaatgccatgccgggcttttacaaaattatttttttagagacacgtcttgctatgttgtccaggctggtcttgaactcctggcctcaagttattctcccacctcaacctcccaaagtattgaaattccaggtgtgagccaccactcctaaccctatctatcccaaacttttatatgtcagtctgtaattttaggagtgacagacccaacaagtcagtcgtaatagacccagagttagtaaaaatataacatgcttcatcaaggggagtattggccagtgatataaatgggcttgagtgctgcctattgagcagagtggccatgtccattctggtgtctgcataactagtgctgagattgaaaaaccagaagacaacattgaacaacttggcagaactatcagtgaaccaataccagggatttaaagaaaacctatgaattgaagacatcatcaagccaaactccctgtttcaggaggcagagagacaaagttttaatcaaacagaaggctaccacttgtagccaggttggcagctttctggaatctgtcatttctatttgacaaacaatgtttgttgaacccttccaatcctgttggtcatgagttcaagttgacccatctcaaactgagagtatcaggccaaaggtattgtctgtccatgggtcagacattcaatttctttttattattatttttaatgttttttttttttatactttaagttctgggatacatgtgcagaacatgcaggtttgttacataggtatgcatgtgccatggtggtttgctgcacccatcaaccggtcatctacattaggtatttctcctaatgctatccctcccctagccctccaccctctgacgggccccagtgtgtgatattctcctccctgtgtccgtgtgttctcattgatccactcacacttatgagtgagaacatgcggtgtttggttttctgttcctgtgttaatttgctaagaatgatggtttccagcttcaaccatgtccttgcaaaggacattaactcatccttttttatgactgcatagtactgcatggtgtatatgtgccacattttctttatccagtctatcattggtgggcatttgggttggttccaagtctttgctattgtgaatagtgctgcaataaacatacgtgtgcatgtgtctttacagtagaatgatttataatcctttgggtatatacccagcaattggattgctgggtcaaatggtggcatgtgcctgtagtcccagctagtgaggaggctgaggcaggagaatcgcttgaaccggggaggcggaggttgcagtgagctgagatcatgccactgcactccagcctgagcgacagagcaagactctgtctcaaaaaaaaaaaattttttttgaacacacccttcattgccacagctgcttgtgctacagaaaataaacaaaaacaacaaaaatatcctttcaaataaaaatagaaaccagaaatatcaaattaatttttattttttatgccttaaaattgtgatgattcttttacactatcgttattggatcttttgacaggttgccttgaaaaggatttaaattttttaccatacatatttactgtttccacagcaaaataagctgcttgtgagcataaaatatattcaccatgtcttaatattcttaattcaattccatttaatacatttacctacttataaagagagaaatgctattgtctttaagtccctgataaatatattctatatgagaagggaaccagtgatcttttttcccactgagatcctgaactaaacggtcgacagaccaaagtggacctctataattcaaatgtcacactgcaaattcaaactggcagtcttccttgagtttcattttacttgccaagagaacaatgaagtacttattctgatgccagtagaactgtgggaagaaactaagagatttgtatttccctgaattttcctctatagaagagggcagctatgagtgactgaagagacatgttatcattattttagtaattctataattgtacaagtaattgaatgttgaaaaatatggtgtttatataaaaattgattcgtgtaattgcaaaaatgctatcagatcatcagatagaaccagaaattacagttacagaatttaaagtacaaaaaaaagtaaaaccaacacaaatgtcattggtggtattacatggattatggtattacatagattaatgataaacatagtctcaatcttacaatctccttctagggagaataattctagtcctttcctcacatggctgacttgtggtttgtggcagccattccttcttgcaaagtgcttgcaataccaggactcaaagatctttactgcaagattcctggcatctttacactggaccactccaatactgattgcatgtaaccgcttcccacaaacacccgcaggtgacacccttgcaagccatattcagatttggtaggtctgaggctgggtgggtaaatctgtacttttaaagaagtaccatgatattctcatactgaagcaagttgaagacacagagttttaagccattttgtaagtcctcagagagcaggaactatgtcatattcattttatatccacataatcacataactgcaaagtacattatacacagcagattttaaattatattaaatactgagttgacataaagcctattcaataaataaatttaaaacataatgaataattatataaccaccaccaataaactaacaacttatttaaggaaaaggaacagaaccactcattttcattgaagtcctctgtgtgtgcctccttgattccatttcagttgcttactcttctggagtaattctgctgaattttatcagagttttttttttttttttttttttttagttttgctatatttttatatccaaactatgtgtcattttgacatgattttatgctttatataaatggaataatattgtgtgtattttttaaacattttactccagcgtatggtttatcttttcactgtcttaaaagtattctttcgatgaacagaagttaagttttaatgtagtcagttttcttagtggctcatttaggaaacatttatttttatttatttattttttttttgagacagagtctcgctctgtggcccaggatggagtgccgtggtgtgatctcggctcactgcaagctctgcctcccaggttcatgccattctcctgcctcagcctcccaagtagctgggactacaggcacccaccaccatgcccggctaattttttgcatttttagtaaagacgggatttcacygtgttagccaggatggtctcaatctcctgacctcgtgatccacctgcctcagcctcccaaagtcctgggattacaggcataagccaccacacccagctgtaagaaacattgctaaaaactgaggtcataaaggcattcttctatgctatcttccaaattttatatttttgcttttcacatttacgtagtcagtccacttgagatggaattttgggtatggattatatgggggctcaacttcactatattctctttattgaagagccaaacatttctcaactcttctagagtgtaatctatgtcataaatcaggtttctgtatatctacagtgctgtttctgggctccctgaccaacttgcccattcttttgccccaaagtataaatttattaaagtttaataataattatttccattttaaagcatgtgaaatgccatggttatttctcatgtattgccctttcatgtatattttagcaatagcttatcaaattccatttaaaaatcttttgaaattatttttactagaattgcaccaaatcaacagttactgaatcttccaatccatgaacaaggtttctttgtcctattttatacactttctttggtatatctcaatacaattttgtttttctctatgaagctcttccctatcatttatgtcttgaagtcttgtaaatggtaacttataaattatgttttctcctggtttgcagacatattgaaatagatgttttattttacattaattatgtattcagcaaagttgctataactttatattatttctaataacttatctataggtactttttgagattttttaaatagacaatctcatcatatgtgaataacagtttcatttctttacaatttatttctttaatttcttttacttgccttccagtacartgtcaaatataaaaagtgacagattttccaatgttaaaccatacttgcattcctggctaaacccaacstagctatgatatattatctcttttatatgttgcttcatatggtttgctaatattttgtttaggacctttttgcattgtttttatgaatgggatggacctataagttttctttctcatcattgttagcttttggtaccaaagttatgttttattacttcatacatctcacactgtcaaagttttactgcattcctggtatcaaagttgtactacttttgtttttctgtcttctggaataagttatatgcaattggagatatttgttctagtttggtataattgataataaaatgattttgaccttatatttattttctttcttctcttttttttcttttcctccctccctttcttctattttctgctgttttttactcatggtgctttattttcctgcgaactttgtaccttgaaaccgtcaactcatatttctcgaaactttaactttttttctttgagtaaagatgaacgcccaaggaaagatatgcttttttttttcttctgaaaagtaacataaattaaggctacttgtgatcataatttgttagaaaaaatttttttggcttttccactcagcacccaaggtttgacactggcaattttccatgcagtccctggggtgatagatttattttcaccttacagaaaggtgtagtccatggggttccagctttatgatgaagtttcctaattaggcatcccatatcaggtggaccctgggttttgtctactataactcaaagcaataccaattacagtatcatcataacatttaagcattaacgataattatgacattatgatgagtgaaagaagcagttcaagaaaagtatgttctgcttttattgtaattatattctagaattaagtatgttgtgcttttattctaattacattctagaattggagaaattaacttatagtttcaaaaagcagactgaatagttgtctcaggctgagagtgactacaaagttccctaaggtaactatttgaggtaataaaaatgtcttgtatcttgattatggtggtggttactcatcaaaccattaacttaaatacacttaaaattagtgcatttattgtatgtaaattattactcattaaagttaatatttaaatggagctatgtaatgataatatataaaattatatctttaagatctgtgcatttcactctatgtcaaatttatctcaataaatccattaaaaaaatccctttaggaactgaaacttcagaaatcaattagagtttttaacatcttttatcaagcctggcaaaactccatgataaagcagctttaccatctcagtccttggccacatcaccattcagtttttattgcaaatggaaatgtgtttctgtgatagaaaatatgtttctatgatttaaggctatttctaagtgaatacattgggaaggagataaggacatatatgcagtattgtaatttaggccattttgactattctgtttcaactgcaggtttattcagttatgactaaaaagaaggcatgttactgtgagtcaccaagttgctattttgatattcccaaaggttttcaagggctaaaatatgcacgtttgtttttttttctggttttacatgaagaagattgtggtttagtgtgatagagatagggtcttcttgcaaattcatggactctcaagacaattaaaatgctgtagcaagcaaaagcccattgaaacctgtcattgaagagattacaggctaatggggggaatttatggataaataatgacagaaagagatacacacagtgctactgacacacttttaaaagaccactagcccagcaatgctttgtgaaggagatgaaacttaaatggaaccctgaaaggtgcacaggattaagctgacatacaagggcaacagagtcagtgtactagacaccataaaaggtataggaaacaaaaggcatagaaaatccaggggatcccgatggcccctgggaaagtaagtctgtttcccaggcatccgtctctcactatgtcttttagcattttagaatgttttggtaaattattcaactaataaaatatatgtttttaaagtcagaaaaatactgtcatttgtggtagtttctatgacatctctttaacactgcaaactctgtgtttcatcattgtaatattgaattgttctagcattgtttctagggagtacaaagtctacactttcagagaaatttaattacatggaagaatttgataaagtttatttggtatttcgtatctagctcatgagtaaataatatcacaatgtggcagtgggaaggaaaatatattcaaatcatttgcatcataatttttttaaatcaaagaaaatgatctgcaaaaagatgacattgtttagatgaaggttcctatcctaacctgtatctcccctttacccatctttctgtctgtacacagtgtattaaaaaataacatctccatatatgaagaatatttctagagagaatctttcaagtacaggaggatgtctaccccgtgggatcagagtgagtgtgtgtgtgtgtggcgtgtgtgtggtgtgtatggtgtgtgcgtctgtggtgtgtgtgggtatgtgtggtgtgtgcgtgtcgtgtgtgggtatgtggtgtgtgtatggtgtgggggcgtgaggtgtgtatgtatttgtggtgtgtgtggtgtgtgagggtggtgtttgtcgtgtgtgtggtgtgtgtgtggttgtgagggtatgtgtggtgtgtgtgatgtgtgtgtgggcatgtgtggtgtgtgtgtggtgtgtgtgtgtggtgtttgtgggtatgtgtggtgggtgtgtgtgggtatgtgtggtgtgagtgtggtgtgtgtgtgtggtgtgtgtgggtatgtgtggtgtgtgtgtggtgtgtgtgtggatatgtgtggtgtgtgtgcatgggtatgtgtggtgtgagtgtggtgtgtgtgtggtgtgtgtgtgtgttaagcatgtgtatacactacttaggccagtgcacatatggatagggtcttaaacggaatgttttccaagcaccttgtgattcttggctttggtgacaatgactgttgctatagatttggggatcataaaacaaaggatataattaaatttaatgattttagagattagaccaaattggagtctgtgaacaggctgttaaatatatttcctttattcttcagtttcctctaattgccataaatcagcctgccttttacatacactcaacctccatttttaagcactgctatctatattaacagcaactaaacataacgagaattattttattatttaaagtatagtatcattttagatattttgatattttagatattttgatatgtctaccatataaatcatgcaactaaatactactataatttaaagatatatttagtgttttgagaaatcaagaattttgtatcaaaagattattttctaaaaaagtactggatttacagacagtataaatcactatgtgcattattactgtgtaaacatcatacagacctgctgttggacatttgctttttccctttaatttgaatcacaagatatttaaagtgttaggggttaaaaatatccatggctaaatattaagaaatgagtctaaattgcagaacctatacctaaaatatatgctatgtttcagaattgttttttgaatgattattttcaaactattattcaatgcacaaaacacatcactctagagaagttcttcagaacatacagatagttaataagacacaaagaatatttaattttacatatgaagcaggaaagtacaggtaagcattactttaaaccaaaaaacaaaccttaagaaaatagttgttattgttattgcagttgccagacattccttgcaattcagccacagtgttctaaaatggttgacaaaaaatattaaagaaggcttaacccccaccgcagagagcagcctgataaaggattgaaaaacactgagtcccagtgcttactgtaatacacactgttaagtactaagacaatattgcggcatgttggtaaaaaatgcccacactcttggtttctcagtattatagatacagtataaagtctatttacattattatattcacattattaaaaggccaaccataataattgcattctcttgtttacacacacaagctgtttccaactaggaatggcaaacagtatgagtcaaacttaatgttatccctctaacactttttataacataaatattatattattgtataccttttaatacttatgcaaaccaaagcttccattatatttttgcctctaattatgacatgctaacacaagcaataaaaaaccatacccatgagggcagctactctaaactgtattcaatactttaaaagattctaaaaaaaaagttgctataatattgttataatgatattaatttccagtaatgaaaacaaattatgaaagaaagattaaattatattttaggggcttcagtatagaaggggcttcagtttctggagtgatgattaaccttcttatgaactactgcctaaggagactttgaaatgctatctatagctaagactttacaatgtaacaaatactatatcttaaaagaatatttaaggaagccaaataatcataatttttaaagtgtaatactttattttaatttcaatgaccatacctattttctaactcaaaaatggaatatagcactagttcatactgtatttccagtctaagcctgcagcatttcaaacggcataatgctcttaaataaaaaatactcataatatatacacactacacaaaatatataccataattacatcatctcactactaaaaggctacaaactgatagtggtggagtatgacaagagattaaatgttactaaaaagttaaattctagttgaaaaatttatcataccccccgagtgtcatgaaatagtgctgattgtctgagagatttattgaaatcctccatggcaacctttcagattattaaaaaaaagaaaagagaaagaaagaaaaaaaaaaacaagtgatcaatacttcgattaaacagaaattaaatcatgaatcacagatatattcagatatacatttaaaatttttcaattgttcaaatattcatctccctcttcttaaataggatcctcctttttattctacagcttttaggcagagccattttaacatttttttttaatcagaatgtttaacagagagtaaacaaaaacagggatgcaaattaaaataaaattggctgtttgcttattttaaacccttctaaagatgtagaggaagaaaaaaacagaaaaagcagaaatttaaatagtttgaaaattatctacatagcttaaattctactagagtatgacttataatttcctaaagcattgaaacagatatgtctaagcataagcaatatattgtaaggtaatctttctcaatatagtttttagagctccactgtaggtttataatttcaggatctatttctcccattgtgatgttttccatgtagtgaatgcaagcaagcaaataccctctgtcaatgtgacaagttccaagttacaatcaactttggatgatttgatcaaaaacagaagctatctatccttcagcagaaaatgctgactaagagctggctctggaaatcagttggatgaacttggttgttctgtatctaaatggaggttttcctggctggtgcagggaatgtcacaggagatactgtcaaataaaaataactctaactttgaaatcacaagatgattctataaatcataaaagtaaaaaaaccaagtgactgattaacaaagatatattaatcaataaattgttcaattatatatgaaattaactcaattattcaaggagcatttatccattagctatccaatatttgttcttctcatttcctttatgcctcttggacattttattcttcattcacaaagaaagacagagagtaaatagaaaatagggaaaaagcactcaaatcaatccatttaataattttttcagcattagaaaaaagaatttgaatcaagtgacaatttgaagttttaacattggagtggattttcactatttgtacagctttcatctctcctatgcactgaaaattaacagttggttttatctgggcatgttttgttgaggcagtgtgtaacatacaagaaagggaaaaaacccaagtcacagaggatgagagacagatacaaaggagaagtctccttgacttttttccataaagtgagttacttggagtaacatagcaagcacctcgtttttacttctacaacttgcagaaagaaaaacagtttaacttaaagctaaactaattaaaaaaaatttgagtactcaattattcttctctttaaactctataaagatgattcttatggactgttgcatagagaaaataattatccaaagacttgatttccctattattagaaatacagaacaaagaatcatagaacctaaactccatcaccgcaaacagtaattctcttaacatcttttgttacccagttattctgtgtctgcaggagtgttcttacatgctactcaaaaacagcacagtgtgttgcaaagagtccaggctttggagccagcaagactttattccaatttcaactctgccagctactggatgtaccactagaaaaaaacctcagttgctgcatttctagggaaaaaaagaaaatctcttctggctgcattaaagattaaatgagatcatgtaagaaagacaccttgcaaagtgcttgccactgaatatttacttaatttccttgcccctgaaaatatctgctcaggtgacaactctgattactttacaaaaacaggcaaacaaaaaaaatctataaacaatcttccatttaagatgtgatacattcctaagtataaatgtcaagtaaaaactattctttttccatctattccaattatcaagttaaagaaaaatctgggccaggtagggtggctcacacctgtaatcccagcactttggaaggctgaggcaggaggactgcttgaggccaggagttcaagacaggcctggacaacatagtgagacctcatctataaaaaaaaaatttttttttttttaattagcaggatgtggttctgtgtgcctgttgccccagctactcaggaggctgaggcaaggcaggaggttggcttgagcccaggagctcaaggatatagtgagctatgcttgcaccactgcactccagcctgggtggcagagcaagaccctgtgtcgtaaaaaaaaaaaaagagcaaaattttatatcaacttttggggatgaatgtgatcagcgcctcaaaatacctgcagaaaatgtgtggtctgtgatctaaatgttttacttggagtgccttaaaaatgtgactatcttctttctttgccccctctgcttgttagacttgatgtcttatttcatattcatggaacattagaagctggaaggaattttgtgatctagcccaatccctgtgctttcatgccaaagacaccaaggcacacagactagaaagcctggccatgtccccttccaccacttgatgtcactgtactcccctgaacctaagaccaaaaatcctagcacagtgaggacgcaaaaatcaaacctgcagaaaatgattctacaatctcagaataagcttgcagcaaaagcaaatcagtgtctctgataaaatacaaaatactaatgtaaagaattgaaaaccaggtaagatacaagttcaaaatatttgaggaaatcccttttttagtttgaaaattcaagagaacatttttcatacaaaatatctcagtgtaatgaaaatatacttgccatttcaaatggactcaccaagtaagaaaataaattaaatcaagttctaagagtctaattcattcatttaaaggatttctaatatattattctttgatcaaaagttaacggatataccacctctaattttctgctataagtggagaatatatcctcattataccacatattcatgagatcttaatatacattgggattaaaacatctcagattaaaaatatgtgaaaatatttgaatgtctgtttattaatatctatatcctggctagaaagcaaaattctgaaaaattatatattcagataagaaggggttgaatacatgaagtttcactgtggttatattagctggaatgaagaatatttgttttacctgaatatgtactagtttatggagtataaaatactacaattaaattgttgatggatcttttgacacaccaatatgaaacayatgaatgtttaaacgtgtttataataaagcatgttgtcccattatatcaatgtacatttcaaagacattagaaatagaccagcatctgtattatattacagcacacaagggttctggagagctgttttcacttgggggttagcttctattcatttacttgatcttttacagaaagcaggatgtaaaattattccaatatgtatctgctctatggaacatgtgctagtggaaagctttgttctgcattatgttagcacaaatcatagtaagcagatccaaagaactttttcttcctgggggaaaaagacactggaaacactcagcaatctttagtacttttctatgtatatttgtttgtgtatgggtgtgtttactgattttttggaaaagcattacatactattgtagaacatttggaaaagattgaaaaaatataaagcagagagagaaaatcacccaattccaccaataaagatgacattattcacatttttgtgtttttatccttttctgtttctatgacttcctttataatagtgcaaaagataagacttatttgtgtccacagtcttcatactgtaaacaggataccatgacttgattcttaagcgtatatcagatgcgagtagtatttcttttctaaggtagaattttagttcaatgtggacacaccttcctcaagaaactgcataaaacctgtcatactgttatacagtagagagagtttcatgaattagaaaatgtgggaaaaagaatctttgcaagcactactgacctcgtcatcgtcggcatcatactgggcatagtgctgttccagcagctctctctggcgcctctcctgttccagtgtctggcttatcaactgggcaacctcgctcacttgtcctggtttttcccgcccaataacaaatctgtggaaaggttaacaaagactaatatttaagactctccaacaaaaaggagttttaagaaaagtaaacaggtttgatctcagcagggtccatcaagcctcaagaaagtaatatcacctacgtacttcaaaatggttttcttgggtgagaagaaagcttagatgtgcaattaaagtgatttttagggacacagctcataaaggaaaagaagggggaaaaaagtaaaggaccataaaaattatcattttaagagaagatgtaatatacgtaacccattctgcagtactttacacatttttgatgccatacaaaatagaagcaagctcataatttcctgtaccattgaactaaagaagcatttgtgtaactataacaaaaattacttcaaaaacattttgagggctgggctcagtggctcaagcctataatcccaacactttgggaggcaaaggtgggtggatcacctgaggtccggagttcgagagcagcctggccaagaaggcaaaatcccgtctctactaaaaatacaaaaawtagccgggcgtggtggcgcgcacctgtagtcccagctactctggaggctgaggcaggagaatcgtttgaatccgagaggcggaggttgcagtgagccaagaccgcgccactgcactccagcctgggtgacagagactctgtctcaaaccaacaacaacaacaacaacaaacattttgacgcatagcataactcaggtggctaaatatataactttgaaataagagaaaaggaaaacttaagtgtttyttgtttttaaaatgaaaaactgtaataacaagaggtagtgaattaattcacttcctttggggggaaagatagtatgagaaggggtgtggttcaataaataagggaggaaaggaaatatttgttattaatgcctataaaaaaagcctaaagagaaaaacaagtaagatatttccttattgcaagctacagtcacttatggtatattgttgccaacataatgtgttgtgctcaacaatttaatattcattttttaacatcttttcacactaatatgtttctgtttttctaaaaatacgaataatgtgtctctaggatgcagtttctaagtattacttatcattattttaatatgaatctttgtttaaatcttgtttctacatttaattgatgctttcctctgattaatgtatgttgctgtctttgatcaattttaaatgaaatataccacaatttttctgcacaatacactaaaggtcaaaattttcacacttggatgttagtaattaattgccttttaataaatacttttatatagtttcaagcaagatttactttgaaattatctttaagtgttcacttatcttttgtgttattttcctttggaaatcaattattaatagaatttataaatactacctttttcatctttattcaggtacaatttacacacaataaaatacatgaattttaaatgtacagttcaataactgtgatacatatgtaaacgtgtaattaccacaccaatgaagatacagaacatttccatcaacccaaactatttccttataatcctttccagtaagtcatcttcatcctgggcctatattaatcttttctagaattctataaaaatggaattttagagtatctagcttgttttgctcaccacaatgatttggaggtttatccatgttgctgtaagtatcagttatttgctcttttttatcactaaatagttttccattgtattcaatataccacatttggattatctatttttctactgataggcatttgggttgatattataaagaaagttactataaacatttgtgaacaagtctttatgtgaacataagttttcatttcctttagacaaataatggaattgataagtcatatggtaaatgtataattaacttataaagaaattgtcaaattgtttttcaaagtaatagtatcatttcatattcccactagcaatgcataaaagctgtagttgctttgcatcctcatcaacacttagtactgtctttaaaaattttggccattctagtaggtatcttgtggtatttcataatgtttttaatttccattgccctgatgactgatgatattatcttttcatgcacttactgaccattcacatatcttctgcagtgaaatatcttttcaactgttttacccattactgaaaattgggttgtctttctattattgagttataattgttctttatagacaaaaatacacatacacacacacacacacacacacacgtatgtgtgtattttatttttaaaacagagtcttgctctgtcacccatgctggagtgcagtggcatgatcacagctcattgtatcctagaactcctgggctcaagcaattctcctgcctcagccttctgagtagctaacaagcatgtgccccatgcctggcaaagctcattttataatttttcgtagagatgacatctcattgttttgcccaggctgttcttgaactcttggcctcaagtgatcctctcactttggccccccaaagtgctgggattacaggcatgagccactgcacctggccctttatatattcttgacacatatccttgtccatgtatgttcaatatacatatacaaacatacacaatatacatgtaggtgtttatgcatttaatttatttattaactcgtcctagtctgtggcttgctttttcattttttaaattgtatctctcaaggaagtctaatttatcactttgttataaatattcatgctggacacggtggctcatgcctgtaaccccagcacttcgggaggccaaggtgggaagaatgtttgagcccaggagttcaagatcagcctaagtaacacaatgagacccgtcccttaaaaaaaaaaaaaaaagccaggtgtggtggcatgcacctgtagttttagctacttgagaggctgaagtggggagactgcttgaccccaggaggtcaaggctgcagtgagccatgattgcaccaatgccctccagactgggtgacaaagcaagaccctgtctcaagaaaaaaaaaaaaaaactgatggcttttgcttcctatctaaaaagcctctgcctgatttaagattgctaagattttctcctatttttctccttaaagtgtttatgttttgcttttatattaggtctatgatatcttgtaaattgatttccatgtatgatgtgtggtaagggtggagtttccttttgtatttctaaatggataatgaattgtttcaacatcatatgctaataacacacttctctgattactatataataaatatttaggtggtgtgagttttctaactctgtatcaattgtttttcctctgcaattccatataaattttaaaatcagcttgtcaatttctaaaataaagcccattgggtttaatttagaattgctttgaattctaaattaatttgtggagaactgacatcttagcaaaattgacttatctgatccctgaacatggtgtatctctatattcattcagatttttactttctctcaataatatactatggttttcagtatataggtcttaaaaaatgtttgttaaatttacctctaagtatttcattttttttttttttttggtattgtaagtgatactggcttttaaatttctgtttctggttatttgtttttaaagtatagacatataattgatctttgaatactggccttgtattctgcgaccttgctaaagtcatttattaatcctagtacctttgcagatttcctagaatcatttgatatataatatcacatctactatgaagaaatacatattttacttcttcctttcctatctgtctatttatttgtctatgtatttactgccttaatgccctggctaaaacttccaacatatattaaaaagaaggggtaagagtagacatcctcactttgttcactgctgatctagaattctagaatatgagttctagactgcctagagatacacagaataattttatttagcaatattatgttttttatggttaaagatacataaagtctttaacatgcttaaagaatccatagacatataatgactaccttgaattcattacatttttggtaaatttttaaatgtcagaaattacgtctaatgatacaaatacaaagcaattcagaagcttatatcctagaatggtaactttagaaaagcctagattgaccttttatctttatttaaatgcatcatagagtagcatttgacagagtatcacttactacaaagttgacaggarattgagggtagcagttaatgtataaaatgcatataaattgaaaacagcagccaagctcaaggtaaaaggtaaattagaattcagattaatttaagccataaattctttaaacttattcaagaatgttgttgtcagatcttttagtttaacagtttttctaataggaataaagttcattttctctgaaagacaagtgctactcaaactacaattcggggagaaagaaaaatgattttagaaattatctgctagccaaagattagaaactactgctgctatttccagaggtgaatgaaagtgtcttaagaaagaccctgtgagagattttaaagcagaaaattatttttaaatagttcagattataacaggttatataataaattagtcaattatcacaataaatcaaaactcaaatataatttgcaaatttcttcctatcctcaaaaaaagatccctaattccaaaccagaattatctgtgaagctaaaattaaaaagaataaatgcatttataatagaagtttgagaggaaataagaattgttccatactgcataagaaagttgcattttaaatcatgaaggcacagttgctcaaaatcacagcttcgctttctcaatttgccctacaatttaacataatttgctatttgtccaatattgctttgtattcaaaatcactctacagtcttatgaaatagaaatgatttataattgcgcataagacagacaattcatctcatgaaatatactcacttttaaaagtgtaatgttaaagtacatatatctcttcattcaggcagctattttgagcagtgttatagcacccagatccacacatctttaaagctttgtaatccaataaatttaaagcacagatttgcaataatagaatgtcatcctgataagtacgatccagatggaaagcacacagaagtggaaccaaacaacagtcccctgcctcattttcctcatgtggagatcagtatataacctcatgtgtctgaaggagtgataaaagaataagatgtggtacatacatgaaagaatttgaatgcactattgttattatgatgaaactgataaaatctcccatattgaaaaatctgtaacattcaaattaccttcctatacgttcttaagtgtctggtctattttaagctgtctttataaatatgtcctgtaagattatatatgcaactagcataaagagaattcagcagaaaatgtaaaatttaaagtaaggttattatttcagttatgaattcagagtatgggtatgctatgatagtacaacttaggagttaaaatggtaagtaaaagggaaaaccaactttgatgggacaaatccaccaaactataaataccacctactgattctgtgaccttggatgtattaatatttctaagcctttgtttccacagttgtaaaatgagtatactaaccagaacaaatattatataatccttaaaaaaactaagtatctggtgcttagtgagtgtttaataaatgtaagctgttgttttaatctagacaaggccaaatgcatttaaaagtacctcctatagactgttctgaaactttggtggcaacatcaatagatcatgtatcatcttttcactagtaagcaaagaacattaaattgaaaagaaaatagagatgccatttcctatctatccagttaataataaaataataaattaaaataataaaatttaatagtgctgaggccatggtgaaactgcatatttatacattacttattgattacaacgcacactgttacaatatctttgctgggcaatctgagagcaggtaataaacacgatgaaatgatgaaaaaaaagtacttactctacacactgtcccaattcccttttatttgatcacagtattgaaaatagagttgattttttatgagtcaaccataggaaaaggataaaatctttaatctcagatgtgctctgaaaaccaaaatttctgttgccactgaaatattaaagtataaatctatataatcactttaattgaatttttaaaaccttcaaaaatataacaatagtcagcaataatcagtcctaaatatgtgtgaccaaatcaattgatatttctgcacaactatgattcatatcttatacattgtctgaaactgaactgacaacatgtgttgaatcagcctgttttaaaacttaaattttctttaagattaataatattttctcttgtcacattctaaatttttttctttgcttcaacaaacaaaaataatgtgtgatagtaaaatagtgtgatctttttatcttttagctataaagaataaattaacagaaacaaaatctaatgaattaaattaaaaattaagtattttttctaagcttatcatcgccaaataatacaataccaaaactaaaatctacaattaaggtttatgtttttagcatggttttttattgtgttaaacaaaattaccttggacaaaattaccactatatagaaggaataaatactagtgttctataccgttgtgggatgactctagttaacaataatatattacagagtttcaaatagctaggaggacattgaatgttcccaacataaagaaatgataatgtttgagatcatagatatgctaattaccatgatatgatcactatacattataaatcaaaacataattatgtaccacttcaatatatgcaatcattatgtcaattaaaattttttatcttgttttaatgtgcattatttcactaagaactgccctctctccccttcatgttgagatacaataagtcaaggcagatacatcagttattcctttcttttcatttattatcaggccaagaaatatccatgtactgttctttggagtgtaggtatctagattacgtgggattcatttcattagtttatttggtaagctgtcaaatacaagttaaacaacaattaaactgtatttacaatttactaaattgaagtcataaagattctacatgttccatgtaaatgacgagaggttataaaaatgataatttatgaattccttatttttcagatgtagttgttttaataaaatttatatactagtcaaaaatggcacttattcaatgctgaaatttaaaaactctcaatgtggaattaagtttcagtaaaaatgaaaaagctgattgtggagtcaagatggcagacaggagacagggctgacatgcagctcccacttggacagacagaacaatgtgtggggactcacaatgtggacttttaatccaggaaccaccacaggaatgtaccaggaaaactaaaagaattcacagatgctttgaaagaagtggcaagccactgcaagttctgaaagacaggccaaaaactctggggctctcttgaaagcgccacctcctggatggaggccgaccaacttaggacattacagcaactcatgacagaacaatcctgttccaaggagggagaagacaacagctaatttcactgcctgcaaaatcccagcaaaccagtggttctcagtgtgtccacgtgacaactttactgctggcataaccagcattcaagaaagccagcatcctcaacgtgtctaaaaccaaggactctcacacagtctatttcacagccctgccaactccaccagagcaggtactggtatccatggctgggagacctgaagaaggatcacatcacaggattctttacagacatttcccagcactaacacagagcctagtaaccctgctaggtgtctaaacccagaggagcaataacagtcactgaagtctggcttgcaggaagtcccatccctagggaaagaagaaatgtaccacatcaagggatcacccatgggacaaaagaatctgaacagcagcccttgagttccatatttttccactgaaacaggttgctcaaatgagaaggaatcggaaaagtaattctggtaatgtggcaaaacaagattctataacatgcgcaagggatccaaaccaagaagaaatctctgatttgccagataaagaattcagaaggttgattactaaactactcaagtagataccagagaaagatgaaaaccagcttaaagaaattaaggaaaaaatacagtrtatggatgaaaaatgctccagaaaaacagataccataaagaaaaacaattacaacttctggaaatgaagtacacacttagagaaataaaaaaaggcactggaaaatttcgacaataaaattgaatgagtagaagaaagaacttcagagctcaaagtcaaggtctttaacccaatcagaaaaagacaaataatttttaaagaataaacaaacccggccgggcgcggtggctcacgcctgtaatcccagcactttgggaggccgaggcaggcggatcacgaggtcaggagatcgagaccatcccggctaaaatggtgaaaccccgtctctactaaaaatacaaaaaattagccgggcgtagtggcgggcgcctgtagtcccagctacttgggaggctgaggcaggagaatggcgtgaacccgggaggcggagcttgcagtgagccgagatcccgccactgcactccagcctgggcgacagagcgagactccgtctcaaaaaaaaaaaaaaaaaaaaagaataaacaaaccctccaaaaaatttaggattatgttaaacagccaaacctaagaataactggtgttcctgaggaggaagaggatccaaatacaatgaggctcaaagaacacctgggaaataaatcacaaaaagatgaccaccagcaaaaagatcatcacccaggcacgtagccatcaggttatctaaggaaagaatcttaagagctgcgaggcaaaagcaagcggtaacctaaaggaacataaagtggtaacataaaggaaaacctaccagattaacagcagatttctcagcagaaaccctacaagccaaaagggattagggtcctaactttagcatcctcaaacaaaatacttacaaaccaagaactctgtatccagcaaaactaagcttcaaaatggagagataaaggatttttcaaagaaataaatgctgagagaattcatcaccaccacaccagcactacaagaatcttgaaacaaacccttgaaatgcaccaaaattgaacctccttgaagcataaatctcatggggcctataaaacaataacacaatgaagaaaaaacaaagtattctttgggaggctgaggcagatggatcactatgtcaggaattcaagaccagcctggccaagatggtaaaaccctatctctactaaaactacaaaaattatccaggtgcagtggcaggtgcctgtaatcccagctactcaggaggctgaggaagtagaatcacttgaacccaggaggcagaggttacagtgagccgagattgcaccactgcactccagcctaggcaacagagtgagattctgtctcaaaaaaaaaaaaaaamcaaaacacaacacagacacacacacacacacaaacaaaaacaaacaaacaaacaaagtattcaggcaataactagtgtgatgaataaaatagtacctcacatcccaatactaacactgagtgtaaatgacctaaaggctccacttaaaagatacagaatggtagaatggattaaaaatccaccaaccaagtatatgctatcttcaagagacttacctaaggcataaggattcacataaacttaaggtaaaggggtggaaaaagatatttcatgtaaatggaaacgaaaagcaatcaggaatagccattcttatatcagacaaaacagactttaaagcaacaacagttaaaaaagacaaagagggaaatcatacaatgatgaaaggactagtccaacaggaaaatatcacaatcctaaatatgtatgtacctaacgcagcactcctaaatttataaaacaattattactagatataagaaatgagatagatggcaacccaataataggggacttcaatactcacctgacagcactagacaggtcattaagagagaaagtcaacaaaataatggacttcaaatggacttaacagatatttagagaacattctacccaacaactgcagagtatacatttttttcatcagcacatggaaaattctcgaagatagaccaataaattaataaattaaacaagtctcaataaattaaggaaaatcaaaattatatccagtgccctctcagaccacaggggaataaaactggaaatcgactcaaaaaaaaccctcaaaactaaacaaatacaggcaaataaaataatctggtcctgaatgatctttgggtcaacaatgaaatcaagatagaaatttaaacattctttgaactaaacaataatagtgacacaacatattaaaacttctaggacacagcaaaagcagtgctaggaggaaagttcatagcattaactgcctacatcaaaaagtccaacagagcacaaacagacaatctaaggacacaactcaaggaactagagaaagaacaaaatccaaacccagcagaagaaaagaaccaacattagagcagaactaaatgaaattgaaacaaacaacaaaaaatacaaaaaatcaatgaaataaaaagctgggtttttgaaaagatgaacaaaattgatagaccattagtgcaactaaccaagaagagaaaatatccgaataagctcaattagaaatgaaatgggagatactgcaaccaataccacagaaatacaaaagatcattcaaggctactataaacacctttatgcatgaatctagaaaatctagaggaaatggataaattcctgaaaatatacaaccctcctagattaaatcaggaagaaatgaaaactctgatcagatcaataatgagtaataagattgaaatagtaattttaaaaactgccaacaactacaacaaaagtccaggaccagaaggattcacagatgaattctgtcaggtgtttaaagaataattggtaccaacctttctgaaactagtccaaaagacagagaagaagggaatcctccctaaatcatcatataaagccagtatcaccctaataccagaaccaggaaaggacagaacaaaaaaagaaaactacagaccaacattcctgatgaacatagatgcaaaaatcctcaataaaatactagtaaaccaaatccaacagcatatcaaaaagataatccaccatgatcaagtgagcttcaaatcagagatgcagggatgatttaatatatacaagtcaataaatgagacacaccacataaacagaattaaaaacaaaatcatataatcaacagatgcaggaaaagcactgacaaaatccagcatccctttacaattaaaaccctcagcaaaattggcataaaagagccataccttaaggtaataaaagccatctatgacaaacccacagacaacattacactgaatggggaaaagttgaaagcattcctcctgagaactagaacaagaaaaagatgcccactttgaccacttctattcaacatagtactgaaaagttctagccatagcaatcagacaaaagaaataaataaagggtatccaaattggtaaagaggaagtcaaactgtcgctgtttgcagatgatatgatcgtttacctagaaaacactaaatactcattcaaaaagctcctggatctgacaaataagttcagtaagatttcaggatgcaaaatgaatgtacacaaatcagtagcactgctgtacaccaatatcgaccaagctgagaatcaaatcaagaactcaaccttttttacaacagctcctcaccctcctaaaaaaatatttagggagtttcgaaagatctctacaaggaaaactacaaaacgttgctgaaggaaatcatagatggcacaaatgaatggaaacatatcccatgctcacggattggtagaatcaatattgtgaaaatgaccacactgccaaaagcaatctacaaattcaatgcaattcctatcaaaacactatcatcattcttcacagaactagaaaaaaaaaatcctaaaaatttctatggaacaaaaaaagagcctgcatagccaaagcaagaataagcaaaaagaacaaatctggaggcatcacattacctgacttcaaattatactacatggctataccaaaacagcatggtactggtataaaaataggcatgtagaaaaaaggaacagaatagagaacccagaaataaasccaaatatttacagccaactgatgtttgacaaagcaaacaaaaacatgaagtggggaaaggataccctattcaacaaaaggtgttggggtaattggaaagccacatgtagaagaatgaaactgcatcctcacctctcaccttatacaaaaatcaattcaagatggatcaaagacttaaatctaagatctgaaaccataaaaattctagataacactggaaaaaactcttctagacattggcttaggcaaagagttcatgaccaagaatccaaaagcaaatgcaacaaaaacaaaggtaaatagatgggacctaattaaactaaaaagcttctgcacagcaaagaatgttttcagcagagtaaacagaaaaccccaagagtgggagaaaatctttgccatctatacatccgacacaggactaatacccagaatctatagagaatgccaatcagtaagacaaaaaaaaaatcccataaaaaagtgggctagggacatgaatagacagttctcaaagaagatatatataagtggctaacaaatgtatgaaaaaatgctcaacatcactaatgatcagggaaatgcaaaccgaaaccacagtgtgataccaccttactcctgaaagaatggccataattaaaagacaaaaaacatagatgttggcatggatgtggtgaaaagggaacacttttacacggctggtgggaatgtaatctagtataaccacaatggaaaacagtatggagtaactaacctgcacaatgtgcacatgtaccctaaaacttaaagtataataaaaataaataaattaaaaaaaaaaaaacttaaaagtagaactactatttgacctagcaatttaactaccaggtagctacacagacaaaagaaagtcattatatgaaaaagacacccacacactcacgtttattgcagcagaattctcaactgcaaaaagatagaacaccctaaatgccatctatcaatgagtggataaagaaaagctggtacatatatatacagcatggaatactactgagctataaaaaggaagaaaataatgacatttgcagcaacctggatggagttggacaccattattctaagtaaagtaactcagtaatgaaaaaccaaacatcatatgttctcacttatatgtgggagctaagctatgaagatgcaaaggcataaaaacgttataagggactatggggacttgggaggaaaggtgggagtgggatgagggataacagactacacattgggaacagtgtacactgcttgggtgatgggtgcaccaaaatctcagaaatcactactaaagaactttttcatgcaaccaaacaccacctgttcccccaaaactactgacataaataaataaataaaatgaaataatttttttaaatgaaaaagctacaccaggatatagttaccagttcttatataacaaataatttcattcaaacaaatatttattgtatgtacatttaatacctgaaacatatatctctaaaaaataaaaacagatgcacacaacttatacttgaatattggaataccctcgtgaactatgggtcacaagatcctagagtgttttagaaaagcacagtgcctaattgtttctgtttgattatattaaatggcttttctctgaatttgatagctttttaatatttaacttgatttcgatgagcatgtagtggtaaatttaactccagccactttcactagtttgctgacagtagttaagagttaaaagtcctagacaaccaarctcttgctccttatttgtaactgcatattcttacatatttttcctttctatattgagagctagattaatataccttactacatacttaacattaaaaaatttaaaaattcatctatgaagatgattgcttttgaaagctggatctggccactgcactccagcctgggtgacatggtgagactccatttaaaaataaaataaaatagaataaaataaaaaatttttaaaataaagaaagctggatctgaaatatttaaatttaattataggcattagttctttgaaatgaatttcctatctaacccaatactaattataagaatatttttggctgggcgctgtggctcacgcctgtaatctcagcactttgggagcccgaggcgggtggaccacgaagtcaagagatcgagaccatcctggccaacatggtgaaaccccgtctctactaaaaatacaaaaaagccatgtgtggtggtgggcgcctatagtcccacctactcgggaggctgaggcaggagaatcacttgaacccgggaggcagaggttgcagtgagccaagattgtgccactgcactccagcctgggcaacagagcaagactctgtctcaaaaaaaaaaaaaaaaaaaagaatatttttgccaggaagggtgactcatgcctgtaatcccagcactttgggaggccaaggtgggcagatcacctgaggccaggagtttgagaccagcctggcaaacatggtgaaaccccatctttactaaaaatacaaaaaaattagccaggcgtggtggtgagtgcctgtaatcccagctacttgggagggtgacgcaggagaatcacttgaacctgggaggcagaggctgcagtaagccgagattgcaccactgcactctagcctgggtaacagagagagaccctgtctcaaaaaaaaaagaaagagtatttttctatgctatatttcattgtaaacaaaaagttgaattcttaaaaaaaaaaattgcctaacacatgctacttcaagaactacacactatttaacaggcataaacttaagatattttccaaaaatactacatcccttccaggaayaacatttctctgcttagtagttagccttgatgtcttaggtttaaatattaatgtatatgaacattaaaaaggtagtttgcaaaatgttaatctgtatatagtgacaccagaaaatgcctcatcaaggcaaaatcacatttaattagtttttttgaaatccttgctggttttactctttctctcaacagtggttgttggccattctgatatattcaacattaaggagatctaacatccatgatccaaaatccatagtagttgcttctctcatcttagggcaagcggtagtcttaggaataagtacaaaatccacaatggtggatgatttccatgaatatgaagattccctcactgccctccactgcatataacactttattattcaaaatcacaaaactaaaagctctaataaaaagtgaaattctcaattgccccttgtactatagtggcaacaaaaacaatgaaatgatataaataaagtaaaaacattttgaggtttattgcatttcaaatggaaatgatcttaagtaaatataaaagaaacaaaagcttccatgtatagaaattacacatccaggtgtatatccaaatataaacgtgcatatctattaaaaaactcatgtgtcattcatttatattttattttattttgagacagggtctcattctgttgcccaggctggagtgcagtggtgccatcattgctcactgcagccttgaactcctgtctcaagcaaccctcttgccttggctcccaagtgttgggattacaggtgtgagtcactgcacctagcctatatatacatttttatttttttatttttcagtttattggggtacaggtggtgtttggttacatgagtaagtcctttagtgatttgtgagattttggtgcacccatcacccagcagtatacactgcaccctatttgtagtcttttatcccttgccaccccaaccttcccaagtccccagagtccattgtatcattcttatgcctttacatcctcatagcttagcccccacatatcagtgagaacatacaatgtttggtttttctgtttctgagttacttcacttagtataatagtctccaatctcatcgaggttgccgtgaatgccattaattcattcctttatatggttgagtagtattctatcatatatgtatatatatatgatggaatatatatatattctatatatatgtgacggaatatatatatattctatatatatgtgacggaatatatatatattctatatatatgtgacggaatatatatatattctatatatatgtgacggaatatatatatattctatatatatgtgacggaatatatatattctatatatatgtgatggaatatatatgtgtgacagaatatatatattctatatatatgtgatggaatatatatatattctatatatattctctctctatattctatatatatatgatggaatatatatattctctatatatattctatatatatgatggaatatatatattctctatatatattctatatatatgatggaatatatatattctctatattctatatatatgatggaatatatatattctctctattctctctatatattccatacatattctatatatactatatatattctatatattctatatatatattctatatatattctctctattctatatatatgatggaatatatattctccctatatattctatatatattctctatatactatatatattctatatattttctctatatattctatatatattctatatatatagatagatatatctatatatatatcacagtttctatatcgactctttgattgatgggcatttgcgttggctccatgatgttgcagttgtgaactgtgttgctataaaagtgtgtgtgcaagtatctttatcatgtaatgacttcttttcctctgggtagatatccagtagtgggattgctggatcacatggtagttctacttttaggcctttaagaactctccacactgttttccatagtggttgtactagtttacattcccaccagcagtgtagaagtgttccatgatcactgcatccatgtcagtcaacatcagtttttttattttttgattatgcccaattcttgcaggagtaaggtggtatcacactgtggttttgatttgcatttccccgattattagtgatgttgagcattttttcatgttttttggccatttgtatatcttcttttgttttgagaactgtgtatgtccttagcccactttttgatgggattttttttcttgctgatttgtttgagattgtcgtagattctggatattagtcctatgtcagatgtgtagatggcaaagattttctcccactctgtgggttgtctgtttactctgctgactgtgactttggctgtgcaaaatctctttagtttaattaagtcacagctatttatcttcgtttttattgcatttgcttttgggttcttggtcatgaaacccaaaactgcctaagccaatgtctagaagggtttttccaatgttattttctagaattcttatacttttggctcttaaagtccttaatccatcttgagttgatttttatataaggtgagagatgaggatccagtttcattctcctacaggtagctagccaatctgtatcccagcaccatttgttaaaaagggtgtccattccccattttatggttttgtttgctttgtcgaaaatcagtaggctgtaagtatttgggtttattcctgggttctctattctgttccattggtctatatgcctatttttataccagtaccatgctgttttggtgactatggccttatagtatagtttgaagtcaggtaatgtgatggctccagatttgttctttttgcttagtcttgctttggctatacaggcttttttggttccatatgaattttagaattgttttttcctaattctgtgaagaatgatggtggtattttgatgggaattgcattgcatttggagattgcttttgtcagtatggtcattttcacaatattgattctacctatcaatgagcacgggacgtgtttccatttgtttgtgtcatctatgatttctttcagcaggttttgtagttttccttgtagaggtctttccccttcttggttaggtatattcctacgtattttttttttttttttttgcagctattgtaaaaggggttgagttcttgatttgatactccactttgttgctactggtatatagaagagatagtgatttgtgtatattaattttgtatccagaaactttgctgaattcttttatcagttctaggagttttctggaggagtctttagggtttttgaagtaaatgatcatatcatcagcaaacagtgacacttctgacttcctctttatggatttggatgccctttatttctcctctctgattgccctggctaggacttccagtactatgttgaaggggagtggtgagagtgggcatccttgtcttgttccagttctcagagggaatgctttcaacttttcaccattgagtattatgatggctgtgggtttgtcatagatggcttttactacattgaggtatgtcccttgcatgccaatgttactgtgagttttaattataaaggaatgctgaagtctgttgaatgctttttctgcatctattgagatgatcttgtaatttttgtttttaattctgtttatgtagtgtatcacatctattcacttatgtatgttaagccatccctgcatccctagtatgaaacccacttgatcatggtggattggctttttgatatgctgttggatttggataactagtattttgttaaggattttggcatctgtgttcattagagatattggtcttcagtttcttttttggttatgtccttttctggtcttgatattagggtgatgccggcttcatagaatgatttagggagggttccctctttctctatctggaattgtgtcaataggattggtaccaattcttctttgaatgtctgatagaattctgctgtgaatctctctggtcctggacatttctttgttggtaatttttaaattaccatttcaatctcactacttgttattggagtgttcagggtatctaattcttcctgatttaagctaggagggttgtatcttacaaagaatttatccatctcttctaggttttctagtgtatgcacataaagttattcatagtagccttgaatgatcttttgtatttctgtggtgtcagttataatagctcccgttttgtttcttattgaggttatttggattttctctcttcttttcttggttaatgttgctaatggtctatcaattttatttatcttttcaaaaaaccaacttttcatttatcttttgtattttttttctttcaatttcatttagttctgctctgatcttggttatttcccttctttttctgggtttgggtttggtttgttcttgtttctctagttccctgaggtgtgaccttagatgatcagtttgtgctctttcagtctttttgatgtaggtgtttagggccatgaactttcctcttagcaccacatttgctgtatccctgaggttttgataagttgtgtcactgctgtcattcagtttgaagaatttttaagttttcatcttgatttcatttttgacccaatgatcattcaggagcaggttatttaatttccatgtatttgcatggttttgaaggtttatattggagttgatttccagctttattacactgtggtcagaaagagtgcttgacataatttcaattttcttaaatttattgaggctcattttgtggtctatcacatggtctatcttggagaaagttccatgcactgttgaatagaatgtatattctgtggctttggatggaatgttctgtatatatctgttaagtctatttgttccaaggtatagtttaaatccattgtttctttgttgactttcagtcttgatgacctgtctagtgctgtcagtggagtactgaagtcccccactattactgtgttgttgtctatctcatttcttaggtctagcagtaattgttttataaatttgggagctcctcttttaggtgtgcagctcccaaatatgtttaggattgtgatattttcctgttggacaaagccttttaccattatataatgtccctctttgtcttttttttaattgctgttgctttaaagttttgtcttttrtaagaatagctactcctcrcttttggtgtccatttgcatgaaatgcctttttctgcttctttaagtttatgtgagtctttatgtgttaggtgagtctcttgaaggcagcagatagttggttggtgaattcttacccattctgctgttctgtttctttaaagtggagcatttaggccatttacattcaatgttagtattgagatgtgtgaggtaccattccatacgtcatgctatttgttgcctgtgtaccctggtttttgtttgtttgttaacttgtatttttgttttgttggtcctgtgagatttatgctttaatgacattttgttttgatgcgtttccatgatttgtttcaagatttagagcttcttttagcagttcttgtagtggtggcttgttagtggtgaattctcttggcatttgtttgtctgaaaaagactgtatctttccttcatatttgatgcttagtttcactagatacaaaattcttgggtgatcattgttttgtttgaggaggctcaagattgggccccaatcccttctagcttgtagggtttctgctgagaagtctgccattaatctgataggttttgccttacaggttacctggtacttttgtctcacagctcttaagattctttccttcatcttaactttagttaacctgatgacaatgcgcctgggtgataatctttttgcaatgaatttcccaggtgttctttctgtttcttgtattttgatgtctaggtctctagcaaggcctgggaagttttcctcaattatttccccaaatatgttgtccaaacgtttagatttgtcttcttcctcaggaacgctgattattcttaggtttggtggattaacataatcccagacttcttggaggctttgttcatattttcatattcttttttctttgtctttgttggattgggttaattcgaagatcttatcttcaagctctgaatttcttctacttgttcaattctattgctgagatttcccagagcattttgcatttctataagtgtgtccagtgttttgtgaagttttggggtttttttatttatactatctatttcattgaatgtttctcccttcacttcgtgtattgttttttttttggatttccttgcattaggctttgcctttctctggtgccttcctgattagcttaataactaatatgaattcttttgcaggtaaatcagggatttcttcttggtttggatccactgttggtgagctactgtgattttttttctgggggggaggggcggtgttaaacagccttgttttgtcatattaccagagttggttttctggttccttctcatttgggtagcctctgtcagaggaaaggtctaaggctgaaggctgttgttcagattcttttgtgccatgggtgctcccttgatgtagtactctcccccttttcctgtggatatggcttcctaacagtgaagttgtagttactgttatctctcttctggatctagccacccagcaaatccaccaggctccgggctggtactgggggttgtgtgcacagagtcctgtgatgtgaaccatctatgggtctctcagccatggatactagcaaaatatttggggtgtctcctgggtcctgcaggagaaatctgcttctttcagagggtctgtgggtcctctcgggttttctgattattcctgcagtcgttatggagctaaaattcatgatgagagcctacacatcctgctctgtctgtccaagtcagagctgcaatctagtcctgcctcctgtcggccatgatcccagcctatattttcttttatgtattttaaccttttccaaaaaagataaatatttaagaccctcagattaattattttctattgttataattcctagaaaattatgaccatcagaagttatatggttccctgtcaaagttattaaacccatatgctagggataaaagtgaaatgaatgcatagttattgatcatgggtagcagatagtttcttgaaagcatttaaagtttaatgtgaatgacactgaagagcaaacatataaatcattgaaaatttcttcaaattgaaacaaaatctctgtcttatatcaaattttgccaaattgctgacagtactagaatgattgtctggagttaaaaaaaaatctaatcctttttccagagttcactttttcaaatgctttataattattaccatgtcttttaagtttttttttttttaaaggcaaagggttatagaatattttaacttttatatatagaaggaaaatagttatacctctcaccatcctggtcaatctttcctaaatagtctcaagtttttcaggattaagttgggtatgcaacataaattaaattatattgtggtatagcattaatctatttgcccatcatctgtctgcctgactgaccatccctccacatccatccatccatccatccatccatccatccatccatccaactagttattgatccgtactatgataggctgcctctaacatagacccaagtgatccttgactccttttatttaagtctgaatgtaattatctatccttgcatgtaggctggacatattaactcacttttatcaaataaaatacagagctgacgggatgtcatttcagattttaggttacaaaaagatggcagattgcatcttgggcactctcttgtatgactttttggagaagccagttttcatgttgtgagaggcctggcagaggggcccaaatgagttcgctgggaagcggatcacagaaaccatgaggtaataaaagttagttgtttcaggtcactgaattttatagtaatatgttacacaacaataggtacaccaactatgccagtggtcaacaagacaggcaaggtcctgtttatagctgtagactcaagaaacatgagttttcaaaaattatgttgcaaattcatgtttgataaaaaaattagatgcaagaaattgtacagaaaatattttctggtaaaaagtcaataataatattttaaaagtaaaagtacacagaaccataaaatctagagattgctaatgaaattcacattgattacatctgcctttgttaaagagacacagtccttttcacatcactatcactatcaacaataatcaattcgtatggtgctttttaagttaacgatagctattatctcacattttaaaattcagttttactgagttcaatctatatacattaaaattgatcaaatttaagttgtataatctgaggagtttcgataaatgtatacatagttgtgtaagaaatacagtaatcacaatatagaacattttcatcacctcagaaatggtccttccttcttgtttgcagacaattccctcccttcgtgattctgagcaatcatagatctgctattagcacagttttgtattttccagaattttatacaaatgtattcaaacagtacacaggctattggcatctggcttcttttactcagtataatggttttgagagtcatacatggtattgaaaggattggtagtttgttccttcatatcactgggaaatatttcattatatgggatataatacaatttgtatatccatttatcagttaaagaacacttgagttgtttccagtttttagttattatgaaaaagctgctatgaatatgcaaatatgagtctttatataaatatatgtttttattgttcttgagtaaataccgaggtgcggaattgctagctggtataagtgtatgcctaactttggaaaaccctaccagactgttctgcaaagtggttgtgctattttgcattccgatcagcaaataaatgtgaacctcagtccatatgcttatcaatgcatagtggtatcagtctttttaatttcagcctttttagcaggtgtacagtagaacctcattgtggatttaatttacctgcccctaataactaataatgttaagcagcatttcatgtttaatggtatatctactttgatgaactgtctctttaagtgatttgtacattttaataggacttgcacatttaaaaactccattatatagttgttataataatcttattgaattacaagagttctttatcagaaaattgttttacagatattcattctgtggcttgtttttccattttcttaagtggcttgtttttccattttcttaagggtattttgtaacaaatgttttaaattttgacgcagtttatcattatttcctcttacactttttgcttttgtgccctaaaaaaatttttaaattgttatattgcattaaaaattttttttcattcatttagagggtatatatgcagatttgttacatggatatattgcrtagtagtggggtttgagcttctagcatactcatcaccttaacaatgaacattgtgcccaacagataatttttcaacattcatcctcctccagttctcctcttttagagtccccagtgtatattacctacagcgtttccctctgtatgtccatggatacccatgtctagctccaatttatatatgagaatataaggtatttgattttctattcctgagttatttcactaaatctaaaattacagatttttgcctgttttctagaaatcttagtgttctagctgctgcaattagggttgtgatcagttctaagttaatttttatatatactgtgagatgaaggtcaaggcattttttggtttgtattttgttttcaatgagactatttaattttttcagccccattttttgagttaactataatttcctccacggaattaccttggtacctttataaaaaaaaatcaattcttcatatctgcgcaggtctgcactgcaaagttctattctgatccattaatctatattactattcttatacctcaaccagattgccttgattagtgatgctttcaggcagggaaagtcctccgaaattttttttaacaataacatctacaaaataatcttctaaaatttttactagggttatgtttaatctacagactaatttagggaaagttgaaatcttaacaatattgaatattataatacattgaacatggtctacttcttccctcatttaaattgtctttgtgttctgtcagcaatattttgttgttttaagtgtggaagtctgcaatatattgttagatttacctttaagtatttaatattttggatgctgtcatcaatgttattttcaatctgaattttcaattattaatgttgatagtatatacactctgatttctgcacatcaacttcatcttctgtaacatgattggacaacttcatcttctataacatgattggactcagttatcagttcaagtagcatcttttgtagatactttaggattttcttcatggtcatctgtgtataaatgaccatattgcctgtgaataaagagttttacttcctccttttcattctatgggctttcaattagttattactgtctcagtgaattagctatggcctctggtacaatcttgaatggaagtggtgagggtagagatatttgcattgttcttaataccaagagaaaagcattaggtctttcaccattaagaatgttattagttgcaggcttcactaagatcctatttatctcattgaggaaattcccttctatttcaagtttcctgagagcttttttaaaaaaatctacatctattgagaagaacaaatgacttttaccttaatcctatcagtaagaaaaattccatgggttgattcataaacattaaatcaaccatacattcaaacaataaatgtcacctggctattggatttataatccaatttggacttctgtatttacattcatgaggaatattggtttgtgatagtttgtattttaatgccttttaaaaattatactatcatagcaacattggcttcataaaagtagttgagaagtataccatcttctatgttctgaaagagtatatgttgagttggtattatttctccatctaatgctaagattcaccagtgaaacaaacaattttctttttaagaggatcttaaatctaaactcatcttcatgtatacacataaacaattttttcttgagtgaactttggtaatttttcatagcactgtcttccataaaatttaaccatttagtctaacttgttgtattcactggcataaagttcttcataatattggttaatccttaaagtatctgtggaatatgtaattacaccttctcattctaacttgtgtctttgttctttttatatcaaacaagtctgactaaagatttactaactttatgttttcaaaactgacttttaaaatttattttgtctaatatcaatataaccacactagtgctcttttgattaatgctagcgtgacacattttttctatcctgttacttttaacctatttgagacttactttctaaaaatataatatgacaatctctgcctttaaattggtcattagaccatttacatttaagaaattcctgataagtttgggtttaaagctaccattgtgctgttagttttctatacatctcttcattttttgttcccctgtgctctttttcttttttgcattttttggataaagtacttttataattatgttttatccttgttgtataactctttattggtataactctttgctggggtttcttcagtgtttatttatgtcttatagcatacctcttcaatttatttcagtctgtctccaagtaatatactactacttcatgcacagcataatcaccttacaaaagtatacttccatgttgtcataaaaaccgacatgctattgttctaaattttacttctcgatattataaatctcaaacaacacagtcatgtcctttgttttaaaaagttaataatcctttaaataattttttaaaaaatgaagtagcctatatttacccacataatttctatttctcttcatttccttstgtaggtctagaatttcgttttatattatttacattattaaagacttcccctgacatttcttataatagtattctccaggtaatgaattcttttagcttctgtatagaaggtcttcatttcatcttcaattttgaaagctatttccttgagtataaaattccaatttttctttcaaaacttttaaattattattcactttccttggtgatgtattatttctactgcaaagtctactgtattctcatctttggttcactgtacacaatatgcctttcttctcagaatgcttttataattttcttctttactactgatttcaagtattttgattatgatgtctcttcatgtagttttcatcatattccttctatttgggatttcttgaatgtcttggatctgtgatattataaatcttaaaaatttcatcaaatttgaaaaattttcagccattatctcttcagttatcttttctagcacctctctcattctaaccttctgagattccaaaagcgtatattagtagcttataattatgccacagcctcttgaagttctgttcatcctttcctgtcttttatttctgtgtttaaattttgatactttctattgtagtatgtcttaaaattaactaattttttcttctgcatatttgaatctgttatcccatccaatgtacatttcataacacatatgtttcattttagaagttggagtagaaccttctttttatcttttctgtatctacttatcatactcagcccttttgctaccttattgtatttttgaaatctaattataacaactattttaatgttttcatctactgcttttatttctaacattgctggatctgtttcaattaatttttccactgattgtggctcatattttcctcattctttgcatgcccagaaattgttgactgcatgccagatataaagatattttttgtaatacaataagtattcttgagtattcctctgggacaattaaagtactaaaaaacaaatctttctgaggcttgcttttaaggcttttgaatgtgggatcagagctacatttagtttgagggtaagttctattaatttttaaattttttaattgatataaacatttgtacatatttatgggataaaagtgacattttcttacatgctatactgtataatgaccaaatcagggtatctggagtcttcattacctctactatttatcatttctacgtgctgggaacatttcaagtgctctgttctagctattttgtaatatacatacattgttattaactttctgctactgaacattaaatcttatttcttctagggactgtatttttgtacattttaagcaacctctcttcatccgcccacccacacccctacactcttcccagcctctggtaactatcattctactctctacctctataagatcaacatttttagctcctatataggactgaaaacatgtcatagttgtctctctgtgtctggcttatttcagttaacataatgacctccagttcccatccacgttgctacaaatgacatgattcaccttttttatggcaaaatagtatttcaccgtgtatatataccacttaaaaaaatccattcatcctttgatggacacttaggtaggttgattccatatcactgctattgtgaatagtgctgcaataaacactgagatgctgccatctctttgatatactgatttcttttctttaaataaacacttagtagcaggactgctggatcatttggtagttctatttttagttttttgagaagtctccttactgttttccctaatgactgtattaacttatatccccagcagtggtgtgtaagagttcctttttctccacatccttgtcagcgtctgttaccttttgtctctttaataacagccattctaattggggtaagyggatatcttagtacagttttattttgcatttctctgatgattactgatgttgagcatcttcacatatatcagtcatttctatgtcttattttgagaaatgtctattcatatcctttgccgactttttaatgagactatttttgcttttttactgttgctttgagttcctttaatattctagatattagaatcttgttgaacaaatagtttataaatattttctcccattcaacaggctgtctcttcactctgttgtttcctttgctgtgcagaagtcttttagattaatatagtcccacttatcctttttttttttcattgcctgtgcttctgaggtcttagccataaagtatttgcctagaccaatgtcctgaagtgtttcctctatgcttccttctagttgttttgcagatgtggggcttacatttcagtctttaatccatattgagttgatttttatatatagtgagggataagggtccagtttcattctcctgcaaatagataagcaattttcccagcatgatttattgaagagggtgccctttccccaatgtatgttcttggtgtctttgtcaaaaatcagttggccataaaggtgtgaatttgtttctgggtcctccattctgttttattggtctgtgtttctgtttttataccaatatcttgctgttctggttactaaagccttgtgatacattttgaagtcaggtaatgtgatgcctccaactttgttctttttgcacagaatcactttggtatttgagccgtacttggtttcttacacattttaggatcttttttctatttctgtgaaaaatgacattgatatttagacagggattgtactsaatcagtagactgctctggggagtgtggtcattttaacaacgttaattctcctaatccatgagcatgggctctttgttttgtttgtgtcctcttcaatttttttcatcagtgtttgtagttttccttgtgaaggtctttcatctccttggttaaacttattcctaggtattttttttttaactattgtaaatttggttgtcttcttgtgttctttctcagctagttcattatttttgtatagaaacagcacttattttctgtatgctgattttgtaacctgtgactaactttactgaatttgttttatcagatctaagagttttctcgtggagtcttcaaatttttctagctataagatcacatcatctgaaaagagggaccgtttgacattctcttttcttattcagatgccttttatttctttctcttgcctgattactctggctaggacttccagtactatgttgaataggaatggtgaaagtgggcattcttgtcttgttccagctcttagagaaaaggctttcagcttttccccactcaatacaatgttagctgtgagtttgtcatatgtggcctttattatgttgaggtattgatatggtttggctgtgtcccyacccaaatctcatcttcaattgttacgcccacaattcccacatgtcatgggaggaacctggtgggaagtgattgaattatggggacaggtctttcctgtgctgttcttgtgatagtgaatgggtctcacgagataagayggttttaaaaatgggagtttccctacataagcactctctctttgcctgctgtcatccatgtaagatgtaagatgtgacttgctcctccttgccttccaccatgattgtgaggcctcccccagccacatggaactgtaagttgactaaatctctttcttttgtaaaatgcccagtctcaggtatgtcttcagcagcagcatgaaaatggactaatacaggttttttccttctatgcgtgttttgttgagggttttcatcatgaagggatactgaattttatcaaatgttttttctgcatctactgagatgatcatatggtttttgtccttcattctgttgatgtgatgtagcatattttattgatttgcatatgttgagccattcttgtatccctgggataaatcccacttaatcatggtgtattatctttttaatgtactgttggacttggtttgctagtatttcgctgagaaattttgcctctgtgttcattgggaatattggyctgcagttttccttttggttctgtccttatctccttttggtatcagggtaatgcttgcctcatagaaagaatcagggagaagttcctctgcttcaattttttggaatagtttgaggagaactggtgttagttcttgtttgaaagtttgctagaatttggcatttaagccatccagtcctggacttttctttgttgggagaatttttattactgattcaatcttgttactcattattggtctgttccagttttctatttcttcctgattcaatcttggtaggctacatatatgtatccagaaatttatccagtttgtctaagttttctagtttgtttaacttgctttatttttaacagttcttcctttagcttatctatcttctcataaattttacttatacacagcaaaaagcagctagtgacactttcaacaatggctagaaatcttatgagttaaatgtcccagtcaatattctactttccatattactagaggtaagttttgttaaatgttctgttattacataatgaagatactctttcttctaattttctttcttttttttttttttttttgaaatggagtttcactcttgttgcccaggctggagtgcaatggtgcatctcggctcactgcaacctctgcctcccaggttcaagtgattctcctgcctcagcctcccaagtagctgggattacaggcatgtgccaccacacctggctaattttgtatatttttagtagagacggggttttactatgttggccaggctggtctcgaattcctgacctcagatgatccacctgcctcagcttcccaaaatgatgggattccaggcatgagccactgcgcctgacccaattttcaataacatttatagttttcttctttaagccctcaccagcttcctcctcacagaccatcagttttctcccagcaatcactgtaagatctctttggcttttactaatactctcctcatagtccttccagcctcactaacagtccagtcccaaagctactcccacattttcagtttttgttaaactggagcccacattcaggtaccaaaatatgtgtaagttgtagctgctgatacaaattaccccaaaacttataaacagttactatcttccatagtttctgtgagtcaagaattcaaggaaggcttgtctgttcaattgtggcttggtgattctcacaaaattcaaccagttgttagctgaagctgcaggtatctgaatgctttagtaaggctggaagatcttcaaaggtgcctccccacatgtctggttaagttagtgctggctgctggtaggcccaacgtcttccctgtgtgggcatcttcaaaagggtatttgaaagcctcctgatatggcagctacatttccctaaaactggtgatccaaaagagcaggatgaaagccacagtgccttttataacctagcctaaaaagtcacagatcattactttcatattcaaattatcatacagactagacaggaatcaatacagtagaaaacccaaaagaaagtcaataaccaggtggagaggatcagaagaggatcagtaaatgaatgctatgtagaaaacatggtaattgagatagagtgaatttgagtttggacaacataaatatgagaaaagctcattcattgaagaattgatatttgaactgagacttgataaggtagaagcagccaattgtatgtcatgtgacatggagttttttgggggaagggggcaaagcaggaaagtggggcagaagacagggaatggcacaaataaaggataatacttggagtatattaaatttgatgttccttttagaatgccatatgaagatgtcaagtaggaagctggatatactattcttaagctctaggaagagagaatggagctagaaataaaaacagaaaatagagaataaagcatggaacagttaaaataggccatgcctgaaaaaaaaaaaaaaaaaaaagaaaagaaaagaaaaaaaaccatggtaatctggaagagaaaattaaagaaactcttatactagcaaaaattcaaacagatggagatcctgagagaaaataagattctagaggatatgcccaggaaatctaagccccatttaatactggtttgagaagagaggccaaagacaatgcagaagaaataaagcaaataaccaaagcataatagaaactttctgaaatccaagtcttcagattgaatcccaagcagaatttcacaaaaccaaataaacaaacacagatctagttacagtctgataaaaattacaaaagcccaattataagagaaaaaaatccaaaagaggtaaaaaaagaaaatactataaaggattacaaatcatattaacatgaaacttttcattaccagttgtaaatattaatggacaatggaggtaaatggaaattaaagcaatcagattccactatacacctatttgaatggtcaaaatccaaaacactgacaacaaatgctggcaaggatgtggagcaataggaactctcactcattgctgataggaatacaaaatggtatagccagtttgaagatgggttggtggtttcttgcaaaactaaacatacacttaccacatgatatagcaattatgctccatgcttggtatttacccagtagaaaacttatgtccacacaaaaacctgcacatggggccaggcgcagtggctcacacctgtgatcctagcactttgggaggctaaggtgggtggattacctgaggtcaggagttcaagaccagcctggccaacagggcaaaaccctgtctctactaaaaatacaaaattagctggatgtggtggtggatgcctgtaatccagctacttgcgaggctgaggcaggagaactgcttgaacccaggaggcagagattgcaatgagttgagactgcgccactgcactccagcctgggtgacagagcaagactctgtctcaaaaaataacaactacaaaaaacaaaacaaaacaaaaaaaacccctgcacatggaagtttatacaggttgagcatcccacatcaaaatatctgaaatccaaaatgttcagaacactcagaactttttgagcactgacatgacacccaaaggaaatattcattagagcatttcagatttcgaattttcacattagggaggctcaactactaagtatataatgcaaatattttaatatgccaaaacaatctgaaatcggaaacacttctggttgcaagcatttaacataagggatactcaacctgtactagagttaagcagaataaggtcaatttctttttccatgatagcccttcatttacttaaaaactgtaattatgtccttccatgagagtaatgatgaacagagcagactgaggaagtgagaatgtgaaaacagacagaccagttaagaagacatttgaagacttttgaaatttgtacaaggctgaaaataataacacaagattacgcagtcaacagaggggaaaaaagggatggctatggtttcatgtaactacaaattcttttccaactgagaaatgttcttatgagttgaatgtatatcttacctatttcattttaaaatttactttaaagtctaatggacagcttcaaaaccaagttctatacagacatgggaaagtgctgtcttaagaacacatagtgatcttcaaaaagacaatcacatttactgaatgggcccacccacacaactcagagagcaccacacagttttgcaattattttacattcttttctcaggactgtggatattctagaaacatcaacatagcgcccacagaagtagtttaggtaatattccttaaggcatccctttagcattagaagatgatttacagttgaaaaagcctaaagtctaaaacttaaatcatgcttcagcaaaattagacatactgcaataatatcctaatgttactgcctgtatagcaatgttaactcattaatattttcagaatatttagcagtttcattttgataatgagaacacccaaccattttcatcattacacatactaaataatgtttccttaatgtttcttacacaagatgtatggaaaagtatatgatataagcaatactgaagataaataagtaacctataagcaaaaaaaagacctgatttcaaaccttgacttcaactagctctaaactgcttcttacttgttttccaatatacaatattcacaatcccaagtttgaatataaatttcaaggtccaaaaaaaatgcaccctaagtgcattaagttggaaaagttataattcatcaaacattggtcatggctgattccttaaaagaatgtatacatttaaaaaatatacttatctttattcaacctgattgtctaaaaaacacagaaaattgaatatatgtataatcatttcaagtattgtataactgttttccttaaaaagatttgggacctaattcatatttattgaggttttaactagaaattatatcttcctggaaaccatagtattttagaaagatatgaagacaagtgcttgtttttgtatctttctaaaatactatgatttgtaattttaaattctattttcatgaactaattawaataaaggtgaaaatatttaaaactaaaagcaaagttttactattcaggtaaaattgtcattgtaattacatttatttgcaggttaaactatagaaaattaaaattcaactaaagtaacaacatggtgtatattagaaggcacgtatttacctgacgttgcccttggtgtttctgagaactgttgctgcaaaattctgtgtcacacccaccaagctgattccatccacttccacaatctggtcattgacttgtattctttagaaagaggaaaaaattacccacataaattacataaaaaattaatttatgtaataatcatttccaacaaatcagttgacaaaatatgtgatttttaagatactctttttgatccaaaatctatcttttacatacagtcagttctgcttcctgttatcagtgggttccacatttgtggattcaaccaattgtggatataaaatattttgaaaaaataaaaaaagtaatacaataaaaagtacaaagtaaaaaacttaactacacagcatttgcattgtattacatattagaagtaatccagagacgatttaaactatttgaaagatgtgcacaggttatatgcaaatactatctctatactatactgtaagagacttgagcatcggcagattttggtatccactgaggtcttacaaagaatcacctgtggattcccagggatgactatagaagccccagatcttagtcaaacacttaatgttttaaaaagactatttccattaaaaactgggcaaaagacacaaacagacatttcccaaaagaagacatacaaatgaccaacaaacataaaacaatgctccacttcactaatcatcagagaaatgcaaatcaaaaccgcagtgagttaccatctcacaccagtcagaatggctattactaaaaagttaaaaaaaaaacaaacagatgctgggaagaatgtggagaagagggaatgcttatccactattgggaggaatataaattagttcagccactgtggaaagcagtttaaagatttctcaaagaacttaaaacagaactaccatgtgatccagtaatcccattactgggtatatattcaaaagaaaacaaacctttctaccaaaatgatacatgcatgttcactgcagcactgttcacaacagcaaagacatggaatcaacctaaatgtccacaaatggtggatgagataaagaaactgtggtagatatacactgtggaatactatgtagccataaaaaagaatgaaatcatgccctttacagcaacacggatgcatctggaggccattatcctaagcaaactaacacaggaacagaaaatcaaataccgcacattctcacttataagtgtaagttaaacattgggaactcatggacataaaggcggcaacaatagaaactggggactactagaggggaaaggaagagagggaagcaagggctgaaaaactaaatattgggtactatgcctggtacctaggcgacaggatcattcatatcccaaacctcagcctcacacaatatacccaggtaacaaatctgcacatgtaccccctgaatcaaaaatacaagttgaaaaaaaaaataaaaataaagactgttttaaaggatagaaacaagtaatactaaatggagacattcagtttaccaaacatacatattcctatcacaaaaattgataactgcaaatgatatatttacatatttatatcatttttgtccttaataactgtacataaaacataagagatccagatgaaatatgctttgggcctaatacctagtctcacaacacacctatcttccctaaggaaaaacttaaccaggaattacagggaatccttcccattcaaggtgtatacttcaaatatgtaatgctcattcatgtgcatctgtatacttacatatacatacaagtgtttttgtgtgtgttcatacttatgtttatgagcattgtatgtattgatactgtttattgtataatacttttacatttctatatatattttatatatatcatttttattcttcataatgaaatacttcaaacatgagaaatgtagtcaaacagataataaactttcatgtacccaatactcacctttataaaatcctagcattgtgctatatttgagtcacattttttctttctttctttctttcttttttttttttttgagacaatgtctccctctgtcacccaggctggagtgcagtggtgtgatcttggctcactacaacctccgcctcccgggttcaagagattctcctgcctcagcctcctgaatagctgggattacaggcatgcaccaccaagcccggctaatgtttttttgtatttttagtagagatggggtttcatcatgttggtcaggctggtcttgaactcctgaccttgtgatcttcccgcctcggcctcccaaaatgctgggattacaggtgtgagccaccacggtcggcccgagtcatattttttctaaagaagcacattacagaaaagttgaagcccatttattatttgtctctagttttattctcttcattgcttatacagaggtaatcaccacactaattaaatgatgggttgacaggtatagcaaacaaccgtggcacatgtatacctatgtaacaaacctgtacgttctgcacatgtaccccagaacttgaagtataatactaataataataataaaagaataaagtgtttgacctttctacggattttttgaaacaggatctatatatatgcatgaataggcataatttacatacaatcgtttattttcaaaaattatgatgtatacctctctttttgcaacttagtttgcttcattcagcattacatttgagatttaaccatgactattataactgtaattctacctaatttattttaacaactatatagtatcatcttttatcaatatgccaaaatgtatttattcattattttgcagctggacaattgtgttgttttccaatttaggtataataaaatattgctgtaatagtcaacttcatacatgcctccttatgcacatgaatgagttttctccaggatatatacccagaaataaaattcctgagtcaaagaaaagattataagcattttcaattttattagacattaacaaatctccatgccctcaggaatacttggtatgctcagatcctttaagtactgccaatcatacagctgtaaaaagatattacaatgtgatttcaattgcatttcactgattactagtgcrggtaaacattttttcatatgtttgtaagtcacctgtctacttccacaaattgtcaaatcatttcttttacccatttgttacactgttgttgttgggttgagtgacttttcttattaacttaaatgagatatctttatatatcttggatattaatatttccttaaacatattgcaaatactttcaccctatctgtagcttgtctttttatatatctttgaaacatggtggtttagaggaaaataattttctaaagtatatccacatttgtaagtaggtatttttttgtgttttgtttaagaagtacttttctgcccaaagtttataaaaagattctatattttcttccttttttggggaggtgggggatggggtctcactatgttgcctaggctgctctcaaactcctcgtctcaagtgatcctcctgccttggcatcccaaagtgctaggatcacagctgtgagccactgccttgggcctatgttttcttcaaaatgcattaacattctgattttctgtattyaggcagttatccacctggaaattttctaaaattataatatgtgttggcaatctaattttattttttttcaaatgtataaacaactggccaaacaacatttaatagagtccatttcccccccagagttaagtagtgcaatatatgtcaagttttcaaatgtgcatcatcatgtttgtaggttccctataggttctatttatctctttgtttatccttgcatcaatgctacattgtcttagctaataaagctttataactagtttttgcatttcatagggcaattctcctaaaatggttcattttcttcaaatttgtctgagtcattcttgatcctttgctcttcctaattagttttgggtttatttaccaagtaatatgaaaatatttgttggagttttaatgaaatcatattgattttaaagattcccttggggagaactgacaactttatcgtattgacttttcccttcaaagaaaatttgagtgttaccataagcacccctgggtaagagtggcataaatcacattttgatcccaaatgttaagaaaagttattcaaagcttggaaataaggtcaaaagtagggcaacatattctttcaatgtcatatgaatgcattaacagatccacataaggataattaagggaaatttacttatttgattcactgtttactactgattaaagatcctagttatagcagcagccactccagacggcctgccgctgccatcacgccgactgcagcagggaggtgctgccgaggatacatgctccatggagctccaggcagcaggggacaagcgtaagcccttctccttctgaggtggggtgggaactccccgggtgcagctgcagctgcccaaattgcagctgcagacctgggcctctgcctccttggaggaggcaggagcctaaccctcctgggaagggctgcaggtgcccgagctgtggctgcagaatggagcttccctttacttttgggggaccaggagctccacttccctagggtcaagggagcagcccatattgcggctgcagacccaggtatccctgcactctggggggggagagggggagctgagaaggcccccctgcccctgcaggctcagaagtgcctgctcccgctgcttggcttctccctgctgtgggcacctgctcccatcttggagcaaatcggggtcaagcccatgtgccatgaacagcagggggaggcagacagatacttgggcagaagagggcagatccctgagagaaggcctgaagcctggggacaggactggcagtgctgatttggagggcaaactcgtggtggtttttcctggatctgcccatggctgcccatggactgatcagcatgcacttcccctctaataggcctataaaagccccaggctcagccagagcagagcagatgatggatgaccagctgcagagaagagctaccctttctgctgacagcagaagatgtcccaacaaccagcagaagagagaagctatccattctagggcctcttctctgctgagagcttcagaaacctgcagagacatcgagactaccagctgcagagtggaacaatccactccagggccacctctctgctgagagctaagaagacaatgagatgacctgcctgctaggaggagcttccctctccagggtctcctttctgctaggagctgaactctcattggaacatcctggctgtggaaaggagctaccctctgcaggtctcctgtgtgctgttctattgatcaataaagctccccttcatctcgctcatcctccacttggctctgtacctcatgcttcctagttgcaggacaagaactcgggacctaccaaatggcagagctaaaagagctataacacaggactgaaacatgccccctgcttgccacattgagggcaaagagaaggagataagatctgtgccttctcaggcagcccagacctgggagctccctgagccagggctgtgactccctctttggggtcctgtggtgcctagtatctccaagcttccaggtgccactgcatttcccggtgccagctggggaagcttcctgcagtgcacctggtctggccacagcctcacagagagtcagtgcctgtgccagcacctgtaactgcccgccccattgcagcagccggcatgtccgattgcacactggctgaaccccatgctccctcacacaccccttgccactccatgcctgacttacccttggcaggtatgggatccaggccagtagtgtcagccaagtaaagcctgccaggccaggtaggcagaacaaacccagcgggcctaagcaagacttgggcaaagacatcaccagccagaaaaacaatatcccaagaatcttgtgacactaggcatagtgaagttctttattaatttgtagatttttaacctggaaaattctaatattttcaactattaaaaaagataatccccaaaataatgctttattgtcatgtaaaatattaaatagattgtatgtaacttagctatattattctaagataaaattcattaacttgtctttaagaaactagttcctaaaatgcactttgaactgtatttataatctcactagtcctctacttaattaggaagtggaataaaatatttgatatattttctttttatatttacaaaagtcaccatttaaattctttgaattttaacatgttatacttttggaggatccactgagacactaaagtgggttcataaagccaaccaaactgtgatagcacagaaatgtacttcaggagctgtttaggaggagagacttttctttctcctcaaagtgattctcaaatagcaatagagtcctggtgcagtggctcatgcctacaatcgagcactttgggaggccaaggtgggagaattgtttgagcccaggagttcaagatcagcataggcaacatagcgagacctcatctctacaaaaaatacagaaattagccaggtgtgccggcatgtgctgtgttttttgtccagctacttgggaggctgaagtggagggatttcttgaaactgggaggtcaagactgaagtaagccatgatcctgccactatactcctacatgggggaaagagcaagactctgtctcaaaaaaaaaaaaaaaaaaagaaaaaaagaaaaaaaaggcaatagaactgtacctttgctgtgatgctagtctactacaagttggcttttttctttaaattttgaatttttcattttcttttctagttcttcaccattttggttctggatatagtttccactagaagatgataatgatgataatgataatccccatgcatgcattaataattgggaatgtaattttataatctgaactttaaagacctctgttaagattaaagggatttcttgtccttcatatgagacatgacaaggaatgagagttgcattttttaaattctttgtttctctatttgtgtatccaaataatttcataaaacattttataactactagaagggaaaataatcctttgaaatcttgaacagtgtattttggtgtttccttgattacttaatctgttgcagagattgttataattaaagctacaattttctctgtgttgctataactcagaagtcattctctctcattctgtatgaagtattttcctaagaagagtattaataaataaaatttagaagtctctgaattttaaggagctaagatataattggtttacatagtataagaagttcatgaatctatagtaatatctaaagaaaacttcaaatgtactagtaatttagggaaaaaattcttcttaaaggatctgctagcagcttagaaagattttaatttacgaatctaaattcatgcaataaaagtgaatctttgtagactatgtgttaagccacaagacaagcctcaacaaatttttaaaaaatgaaatcacatcaactatcttctcagaccacaatggaatataactaaaaaccagtaacaagagaaactttttaaaaaatgtacaaatacaagaaaatttaaaactatgctcctgaacaaacactggatcaatgatgaaattaagcagcaaatataaaaatttattgaaacaaatgaaaatggaaacacaacttaccaaaacctatggtagatagcaaatgcagtgctaagaggaaagttgatacccataaactctacataaaaaaaaatacaaagaaaaaaaccacaactaaaaatgagtagaaggaaacatataataaaaactagaattaaacaaaatggacactaaaaaagcaaccaagaaaaggataagatcaaaataaacaaaatcagaaacagaaacagaaaacagacattacaactaatactacagaaatacaaaagttcatcaaagactattataagcaactaaatcttaatgaactggaaagttggaggaaatggataaatttctagatacacatatatagcctactgagagtgaatcaggaagaaataaaaaactggaacagatcaataataagtaatgagattgactcagtaataaagtctcccaacaaagaaatgtccaggactggatggcttcaatgccaaattctaccaaactttcaagcaagaactaacaacaattctcctcattcgatgcatgtaagaaaatatcacatgtaccacataaatatgtaccaatataaggtatcaattaaaaactgtttaaaaatttaaagctaaaaactgattctttggacaaatcagactgatttaaaaattttgtctgaaatacatagctgtgttttctccataattttgtagggatgttgmgtttctgttttcagaaaatactagttaacctgaacttcttaaaattctgataatagtgtattgatcagataagctaatgatatccatacctaaagcttaaaatgataaaaaagtaaaactgtttgactgaactgaatcatgattctaacaatgttttatatcaataattacattttttagtgtcctctgaaatgtgatttctaagattcttgtgtacttaacttcaagatcttgaatagcaagcatagcgcttacaatatacaactctacttcttaccttaaaatgttacgatgttaccatgattttatatcatgttaatgaatgtgctcattcttgtcacttgaagacataaatataatgtatgtgaggctgggcgcgcagtggctcatgcgtgtaatcccagcattttgggaggctgaggtgagtgaatcatttgaggtcaggagttcgagaccagcctggccaatatggtgaaactctacctctattaaaaataaaaaaattagccggatatggtggcaggtgcctgtagtctcagctacttgggaggctgaggcaggagaatcggtttgaacccaggaggtgaaggttgcagtgagctgagatagtgccactgcactccagcctggaggacagagtgagactgtctctgcctcaaagaaaaaaaaaaaaaaaaaaaagggtgtggctgtagagaatgatatttcctagtcacctaaattgcttgtgcatgataggcattattatcaagttcctatccaccagagaaggttaaatacaagttaattaacaatggtaatatgggtaactgagtctattttagcagggacagttttaagaaaaagtgtaactatgtaggtgatgtaataggataaatgtttatttttcaagaaaarggacagaattttagttctcagataaagtgaaaggttgctccagaattaaaaagaaacaaaatgaggacaaaaacttgagcgtacatagtgaggagaggaaggtttaaataagaatttttatttgccttgatttataacatatgggacaaaacggaagctgtaaatgggttaaaaatttgacacaattcactcaactttgaaagccttataatataaattagaaagaagaatgcatggatctttactgtaaaatattaacttaatgtaaacatagaatagattacatatcaaaataacaatttacctggaattatttagcattctcttattaagggattttaagagattatgcttctcatcagaatgattttcaggccaggcgcagtggctcacttctgtaatcccagcactgtggaaagccaaggcgggtggatcacgaggtcaagagatggagaccaycctggccaacatggtgaaaccccgtctctactaaaaatacaaaaattagccccacgtggtggcacgcacctgtagtcccagctactcaggaaggtgaggcaggagaattgcttgaacctgggaggtggaggttgcagtgagccaagattgtgctactgcattctagcctggtgacagagtgagacacagtctcaaaaaaaaaaaaaaaaaaaaaaaaaaaaagattctcagtactatgtgctgacattatcacttcctttattaatgtaaaaaataaaaacaaacttataaataagcaaagcttcctacagtaacattacccttctcctacctgttttggaaattaataaactttccttttgtagagtttttttatgttcagaacaaaattaagtgggaaatttggagagcttctctatagatcctgtctgcacacatgcacagtctccccccatcaacccatcaacatcttacatgatagtggttcacatattacagaaaaaaaaaaaaacctttaaagacacatcattattgttcaaagcccacagctgacataagcattcactcttggtattgcacattctaygggttttgacaaatgtatgatggatgacatgtatccaccattatagtatcatacagaatggtttcattgccctaaaaaaatcctctgtgctccacttagtcatccctccctcccaccaaatccccggcaaacaatgatctttttactgtctccatagttttgcatttgcaagaaagtcagataataggaattataaagtatgtaggcttttcacattagcttccttcatttactgatatgcattcttccatgtcttccatggcttgacagctcatttctttttagcactgaataatattccaatgtctggatctaccacactttttacattcacccagtgtaggacatcctggtggcttccaaactggagtagttataaataaaactgctataaacatctatgygtaagtttttgtgtggacaaaagttttcagctgggtcagatcatgagagtgtgtttattttcattaaagaactgtcagtctgtcccccagagtggctgtaccattttgcattcccactagcaatgaatgagacaccttattgctctacatccttgtcagcatttgttgtcagtgttttgaattttagctattgtaacaggtatatagtggtatctcattattgttttaaatagcaattctctcataacatgatattaaacaacttctcatatgcttacttgttttctgtatatcttctttggtgaaacgtatgatcaggtcttttgagcattttaaaatcaagttatagttttcttattatttaggttttaagagcttttcgtatactttaaataacagtcctttattagttttatctgttttaaatatttgtcctagtctatagcttctcttctcattccgttaacactacttatcacaaaacacaagtttttgatttaaaagaagtgcagcttatcaattatttctttcatagattatgcctttggtgttgtttctaaaaaatcattgccagccggacgcggtggctcatgcctgtaatcccagcactttgggggctcagacgggcagataacaaggtcaggagttcgagatcagcatggccaatacggtgaaactccgtctctactgaaaatacaaaaaaattagccaggcacggtggcacactcctataatcccagctactcaggaggctgaggcaggagaattgcttgaacttgggaggcacaggttgcagtgagccgagattgtgccacggcactccagcctgggcgacagagcaagactccgtctcaaaaataaaaaataaaaagtcattgccatacctaagcttacctagatattctgtgttgtcatttaggagttttgcttttgcattttacatttaggtctgcaattcattttgagttaattcttgtgaagggtgtaaggtacttcttcagatttttttttttttttttggcagggggatgtccagttattccagtactattgttgaaaagactgtattttctctaatgtattgcttttgctcctttgcaaggttcagttgagtatatttatgtgggtctatttctgggctttctgttctgttccactgatctctttgtctattcttttgccagtaccacacagtcttgattactgaagctttatagtaagtcttgaagtcaactaatgtcactcctccaactttgttatttcccttaaatattaagttggccattttgtgtcttttgtctttccatataaactttagaatcaatttgttgatatacacaaattaacttgctgaaatttggattgaaatttcattgaatctttagattaagtagggaagaactgacatcttcttatccatgaatgtagaatatcttaccatttattaattatttcaaaactttgatcacagttttgtagttttcctcatacagacttcagattttattaggtttatacctaagtatttcatttttaggggtgttaacagaaatgaattttaatatgtttttaatttccaattctacttgctcattgctgttatataggaaaatgaatgacttttgtataataagcttgtattctgaaaccttgctataattgcttatcaattttcagaggttttttactctatttttgaacagttatacatagacaaggatgtcattgtgatcaaagacttttacttcttccttccaaatctgtgtattgttcatttatttttcttatcctactgcattagctagaaaataactgtaagaaaggatatcattgtctagttcctaatcttagcaggaaagttttttagtttctcactattaaatataatgttagctctaggtgttttgtaggtattttttttcaagttgagaaaattctgctctactcctagtatacttagagtttttctcataaatggatgatttttgtcaaatgcttttttctgcatctactgatataatcatgttatttttcttctttagcctgcagatgtgatggactatattcattgacttttgaatgttgaaccagccttctatacctgggataaatcccacctggtctctgtatataattccttttatatgttgttggactcgatttgttaatattttactgatatatatttgtatatatcaatatacatattgatatatatttgtttttgcatttatgttcatgagagatattaatctatagtttacttttcttgtaacatttttgtctgattttggtgttagagttctggtggcctcatagaatggaacacgaagtatttattatctttgcttttatattctggaagagataggagaggattggtacactttcttccttaagtgttgggcagaattcaccagtaaatccacctggccctgtgttgttctctctttttgaaggttgttaattttttttttttttttttgtatttttagagaattggggttttaccatattggccaggctggcaataaactcctggcttcaagtgatctgcccatcttggcctcccaaagtgctgagtttacaggcatgagctgctgtgcccagctggttgttaaatattgattcaatttctctactagatataggcctattcagattgccgattcttgtaaagttttgacagatttacaccttggaaaaaattggtctatttcatcttggttgtcaaacttgtgggcacagaggggctcataatattcttttattgtccttttagtgcccatgccatccacagtgaattkttctctctcatttttaatattactaatttgtgtcatctctctttttttcttagcctggttagaggcttatcaaaaatatcgatctttgctaagaaccagcttttggtgttactgactttctctactgatttcctgttttcaatttcactgaattctgccctaatttttattatttcttttgttctccttactttggatttaatttcctctcctttttatagtttcctaatgaagatgcttagatagctgattttagatctttcttcttttctaatatatatgcattcaataatatgaatttccctcaaagcgctgcttttacagcatcccaaaatttttaacatgatctattttcattttcaatgaggtcaaaatattttctaaaaaatgactcttcacaacaaaaaaagaaaatttcaggccaatatccctgatgaacatcaatgcaaaaatcctcaataaaatactggcaaaccaaatccagcagcacatcaaaaaagttatccatcatgatcaagttggcttcatccctgggatgcaaggctggttcaacatatgcaaatcaataaacataatccatcacataagtagaaygaatgacaaaaaccacatgattatctcaatagatgtggaaaaggccttcgataaaattcaacamctcttcatgataaaaacactcaataaactaggtactgatggcacatctctcaaaataataagaactatttatgacaaacccatagccaatatcatatcgaatgggcaaaagctgcaagcattccctttaaaaaccgacacaagacaaggaagccctctctccccactcctattcaacacagtattggaagttctagccagggcaatcaggcaagagaaagaaataaagactattcaaataggaagagaggaagtcaaattgtctctgtttgcagatgacatgattgtatatttagaaaaccccatcatctcagtccaaaaactccttaagctggtaagcaacttcagcaaagtctcaggatacaaaatcaatgtgcaaaaatcacaagcattcctatacaccaataatagacaaacagagagccaaatcatgattgaactcccattcacaattgctacaaggagaataaaatatctaggaatacaacttacaagcgatgtggaggacctcttcaaggagaaaaacaaatgactgctcaaggaaataagagaggacacaaacaaatggaaaaacattccgtgttcatggataggaagaatcaatatcatgaaaatggccatactgtccaaagtaatttacagattcaatgtattcccatcaagctaccattgactttcttcatagaatttgaaaatctactttaaatttcatatgaaaccacaaaagagcccatatagccaagataatcctaagcaaaaacaacaaagctgaaggcatcatgttacctgacttcaaattatactacaaggctgcagtaaccaaaacagcaagatactggtaccaaaacagatatataagccaatggaacacaacagaggcctcagaaacaacaccacacatctacaaccatctgatctttgacaaacctcacaaaaacaaccaatggggaaaggatttcctatttaataaatggtgttgagaaaactagctagctatatgcagaaaactgaaactggacctcttccttacaccttatacaaaaattaactcaagatggattaaagatttaaatgtaagacctaaaaccataaaaacactagaagaaaacctaggcaatatgattcaggacataggcatgagcaaagacttcatgactaaaacaccaaaaacaatggcaacaaaagccaaaattcacaaatgggatctaattaaactaaagagcttctgcacagcaaaagaaactatcatcagggtgaacaggcaacctacagaatgggagaaaatttttgcaatctatccatctgacaaagggctaatatccagaatctacaaagaacttaaatttacaagaaaaaaacaaacaaccccatcaaaaagtgggcaaaggatatgaacgggcacttttcaaaagaaggcatttatgtggccaaaaaacttatgaaaacaagctcatcatcaccggtcattagagaaatgcaaatcaaaaccacaaagagataccatctcacgccagtaagaatggcaatcattaaaaagtcgggaaacaacagatgctggagcagatgtggagaaataggaatgcttttacactgccggtgggaatgtaaatttgtccaaccattgtgaaagacagtgtggagattcctcaaggatctagaactagaaatgccatttgacctagcaatcccattacttggtatatacccaaaggatataaatcattctactgtaaagacatatgcacacttatgtttactgcagcactattcacaacagcaaagacttggaaccaacccaaatgcccatcaatgatagactggataaagaaaatgtggaatatatacaccatggattactatgcagccatacaaaaggatgagttaatgtcctttgcagggacatggatgaagctgtaaaccatcattctcagcaaactaacacaggaacagaaaaccaaacaccacatgttctctctcgtaagtgggggttgaacaatgagaacataggggcacagggaggggaacatcacacaccagggcctgacagcagtgagattacaggtgtgagccgccatgcccagcaatttctgtcttttagtagatgcatgtaaaccactgacattcaaagtgattaactgatgtacttaaaccactgacattcaaaagtaacaaatattgactaatatctacaatatttgctactttttttctattttttgcctttgtactttcttccaacgtttgtcttcaattctttttctgccttttgtggttttaacttttaatgaatcttgaagactgaattttggggctggtttcccatgctcattctcatgcttatttgcatcccttaaactttaatatagtttggtcttcaccactaacaatatattcactgcagacagcatcagtgatgaaaaggtgagaaggtactcttttctgttttatcttagctcttctacttgtaaatattaggtgatctcctctaaagaagtggcattgtattatttccctgaatacttgaaatgtttattacatatttagatctgggatagctagtacggacatttctacaatattctaccaatccatgaacacgaggtatctttccatttatttgtgtcttcttcaatttctttcaccaatgtattacagttttcagtgtgcatatctttcacttcctcagttaaatatattacaaagtattttattctttttgatgttattggaaatgggattgttttcttaatttttcaggtagttcactgttagtgtgtaaaatacagctgatttttgtacgttgtccactcagtaaagttgatcctgcaagtttgctgaatttatttattagttctaacaaattttggtgcatgctttagcattttctttaatcaggtcatgtcatctacaacaggaatagtttaccttcttcccttcccgtctggatgccttttacttctttttcttgtctaattattaggctaggactccagtactatgttgataagtggcaagagtatctgtgtcttatccctgatcttaaaggtaatgttttcaatttttcaccgttagtatgatgttagctgtgggcttgtcatatgtggactttattgtgccgcggtacattccataatagaaaacaacatagaggttcctcaaaaattaaactagaactaccacatgatccagcaatctacttctgggaatatatccaaaggaaataaaatcactatgtggaatcagtattttccatgttcattgcagcattatacacaatagccaaaatatggaaaaaaaaacccagtgtctgttgatggataaatggataaagaaaatgtgattttacacacgcacacatgataaagtattattcagccttaaaaaaggaaatcttattatttgcaataacatggatgaatctggaagacattatgctaagtgaaataagtcagacacagacaaattctgcatgatctcatatatatgtggcatctcaaaaagtcaaacacacaaaaacagagtagaaggctggttatcagggactggggggagtggggcaaatggggagaggtttgtcaaagagtagaaactttctgttataagatgaataaattctggagaccaaatgtatagcatagtgagtatagttaacaataacatattgtgtacttataattcactagtagagtagaccttaaatgttctcatcacacacgaaattaactatgtgagctgatgaatatgttaattagcttgatgaatatgttaatgatacactcatttcacaatgtatatgcacatcaaaatatcacaatttttacttgttaattatacttcaataagcctgaaaaaaaaacaaattaaaaattaaaagacgatttgggacaggaagtagaactaggaaatgtcaaataaaatattagctaattcatgtgaccagacctgcgtctattatacttgctagataataatgcccaggaagtaccagcccaggtaataatgtattagctcttagcctcctactaagccaagattcctttctcacatgggcctctgccaggggtttcataaggaggaaaactgaatgttaggatttaggcactactgactcggtagggtaaataccaataaaatcacctctaatatccttgcaaccaaaataacaaattggcttagaaacactcgaaagcagagttcctctaaccatctatatcagaattacctgggggtacgtgtttaaaatacagtgggccccactctgagagcagatctcaccaatcagtataataagtctgagatctatggtcttatgatatctaagaggttttaagtagaaaaaaagaaaaaaattgtaatatttgtcttctagcaaggcagaatggcctggcagctatggaatgccaataaagactaaaccagaccaaaaacaagagatgatacctgaaaatcacaaatgacaccagaaagctaagcaactaataactaataggaagatacgacagttcattagaaattgattataaaaagccagagggtccagagctgtacattggaataatatgggcagctatataaaatacaagtaacttggtctaaccctaatgtgctaaatcaaattcaacaaagagggccaggactccaatcttcagagaattccttgggatattcaaggatatttcacagctgagaagacttacaggagactcctctgttcccaaattcatttcacacagtccagttagtatgaaataataacataatattaagtcattggataaaagagaaggaatgattataatggaaatataaataatatatataacacataatatacacaaaatgcatactgaagacataataattcagctttgtctctttacatgtatcacccaacaaacttcactggtttaggtccatacagtttcacaatggtacttcctctaactcatctcattatcattggctctatgtgttcctcaaattcattctgcatatcactcattaaaaaaattaatcttgtccatataataaacacttatatttatgatcaacagattttcaacaaggatgccaagatcattcaatggaaaaagactagtcttttcaaaaaatgatgctagaaaactaaatatccatatggaaaagaatgaagctatgaatatatcccttcctcacaccttatacaaaattaactaaaatggatcatagacctaaatataagaaagactaaaaactacaaaactcttagaggaagatgaacragtaaatctttatgatctcagaatatgtaaagtcttctaggatatgagatcaaagtataagtgacaaaaaaaactagatgaattgaacttcatcaaaattaaaatattttatgtttctaaggaaactatcaagaaagtgaaaaggcaactcataagttaaaagaaaatgtttacatattatgtatctgataagaaacttctgtccagaatatcataaaaaactctaactcaataataaaacaaccgaattttaaaatggggaaagaatctgaatattcatttatccaaagtagatataaaaatggccaataagcacatgaaaaaaatgttcaacatcattagccaccagggaaatgcaaaccaaaactaaaatgaaatacttcatacccactcaataatcaaagagataaaaacaagcgctcatgaggatgtaaagaaattggaaccctcatacattgctcgtgaataggtaatatgactcagctgcttatgaaaccactctagtagttgctcaaaaggctaaacatagttattatatgacccagaaactctaccactagatatattcccaagagaaatgaaaatatgtccacacaaaaactatcacatgaatgttcattgcagcattattcttaagagcccaaaagtgaaaacaacccaaatatccatcaactaatatcaaaatgaataaactaaatgtggtattatcaagtcaatggaatattattttgcaataaaaatgaattaagtactgataaatgctrcaacatgaatgaaccttgaaaacgtttctctagttaaaaaaaaaaaagccagtcacaaaagaccacatactgtattccatttacatgaaatggccaggagagccaaatgtatagagacagaaagtagatttgtgcctatggcagagaagggagaggagagctggggggaaaggaaagtgactgttaatggatttggggtttctttttgagtggtaaaaatattgggtggtaaaaattctaaaatgaattgtgatggttatataactcttgaatattcacaaaaccactgaattgtacactttaaatgagtaaactatatggtatgtgaattacatatcaataaaggtgtaaaaaaataaatcttagagaacaattttatctgaaacaccatcagcttcatcattccaataaaatatatttctaatcacttggcctagttttcaagtttcttcagcactgggtcttcacctaattctggtattttcatcctagattatcatttttgacatttaaatttttttattatctgtcccttatctgacttcacctcacccttatttcaccatgcataagactgaaatactttacccatagaaaataggaatgttagttaagttcaagaatattttattgtttattgtggtggtttcattaaaactaattaaggctgggagtagtggctcaagcctgtaatcctagcactttgggagggcagggcaggcggattgcttaagcccaggagttcgagaccagactgggcaacatggcgaagccccacttctttaaaaaaaataaataaataaattagccaggtgtggcagtgtgcaccagtggtcccagttactctggaggctgaggtgggaggattgcttgagctttggaggcagaggatttcagtgagccaagactgtgccactgcactccagcctgggtgatagagtgaaactctgtctcaaaaaaataaaaataaaaactaaaactactctcatctcctggccagttgtggtgggtcatgccggtaatcccagcactttaggagcctcagataggtagaccacttgggaccaggaattcaagaccagcctggccaacatggcaaaaccccgtctatactaaaaatacaaaaaaattagctgggcacaatggcatgcctgtagtcccagctacttgggaagctgaggcaaaagaatcacttgaacccaggaggcaaaggctgcagtgagctaagattatgccactacagtccagcctgggcaacagaacaggactctgtcaaaaaaataaagtgaaataagcaattataattgattgaaaattaattaatggattaaatattatagtggattaaaaattctagaatactgtatatatgccttctcccacttgatccatgtggttagagggacagaggttctgttctctcatacagtaggtccataatcactttttccctttgttagtcattcttcccagaaatttagaaaagcatggccttctctagttctctctagcttacgctccactcccctacagtggaaaaatgaatggagctacaaccacctacttctactttcatttcttcttttctttctagcaagtagcaagagctgggttcactttgagctactcagccattctcttattttcttccagtatagcctctttctacttttcctctagctctaagtagtaatgcctttggtagcaatgtggtagtagtattagagatttgctttaaaggaaaacaaaaaacaaaaagtcttctwgctaattccagactcatctagcttaaatactctgccagattaagcttactcatgatgaggttgggagtcaaagcttcagggttttttttttcttttttttttttttttaatgttttgctttatgtaatgtacatgaaacaatgaactacagctcccacatgagggaatataaagaaagctgaaattcagtcttcattctagctgccaggccatacatcaataagactgcatctttccagaaaaggcatgtttttccaaatttgcaaaaaagtactctacgaattagcagcgtccctaccttactggataagatagtctagggcactggttcccaaactgcctcactgcaacagaataacatgaagcaattttgaaaatcacagattcctgaagttgcaccttctgcaaaagtctcattcagaagacatgaggcaaaagcacaaaatagaaatttgagttgtgatatggtttggctttgtgtccccaccctaatctcatcttaaattgtaatctcataatcctcacatgttgtgggagggacccgataggaggtaattgaatcatggggctggttttcctccatactgttctcgtgatagtgaggaagttctcatgagatcaggtggttttataagtatagggcttcccccttcgctctgcactcattctctctcctgctgccctgtgaggaggtgccttctgccatgactataagtttcctgaggcctccccagccatgctgaactgtgagtcaattaaaccgctttcatttatcaattacccagccttgggtatttcttcatagcagtgtgagaatggactaatataagttgtttcctgattttgtctattatgaataaagttgtcattcacatgcaagactttatgtagacatatgttttcatttctattggaaaatatcttggagtggaattgctggatcaaaaagttaagtgtayatttaactttaaaaaaaacttccaaactgttttcctaagtggcagtgaaattctgcattcccactagccataagggagcgtttcacttctctgtatccatgtcagcactttatattgttagcattcttatctttagccattctactaggtgtgcagtaatatctcattaaagtttaatttgcattgctattacattgaatatattttcacatactattggccagtcataagttttccactttgaagtggctgttgaatcttctgtccatattttaaacattcagtggttattcttcttgtcattattagtgttcttcatattctggatacaagttcttatatatatttgaaaatattttctccttgtctatgtctttgcttttcagttcttaactgtgtttctcaaagaacgaaaatttggatataatgaagttcaatttctcagttttttctttcatggttcgtactttgtgtcctgtctcagaaatctttgtttaatatgattttataaagattttcacctctgtattcttttagagcttttataatattagacctatgtccagatctacaattaattttgaattaactttgtatatggtgtgaaacagggtttgtggtccaattttttatttctccatatgggtatctaattgttctagcactttgctgaaaaggctatactttttccaatggaattatcatggtacttttattgaaagtcagctggccgggcgcggtggctcatgcctgtaatcccagcactttgggagaccaaggcgggcggatcacgaggtcaggagatcgagaccatcctggctaatacggtgaaaccccatctctactaaaaatacaaaaaattagccgggtgtgatggcgggcacctttagtcccagctacttgggaagctgaggcaggagaatggtgtgaacctgggaggcggggttcgcagtgagccgagatygcgccactgcactccagcctgggtgacaaagcaagactccgtctcaaaaaaaaaaaaaaaagaaaaaaagaaagtcaactgactatatgttttcatctattcctgactttttttctattacattgatctatatttctataccaatggcatactgtcctgattattgaagctttatagcaagtcttgaaaaaccaaataaggtcagtcctctaactttgttctttttcagaactgttatcttggtcctttgcatttccatatgcattttagaacaatcttgtcaatttctccaaaaacaacaagaacaacaaaaaacctgctagagtttgattgggatttctttgactctacagatcaatatggggaaatttcacatctgaaagacagtgagccttctgttctacaaacatcatgtatgtttccatttatttacctgccaaatatcctactgccatcaacccttaatttcatttcaacaggacttgatttttttccagcaacatcctcacattaactaaaagctttaaggcaagccacactctgaaaagacttgcatcttttttttttttttttttttttgagttcatgtcctttgtagggacatggatgaagctggaaaccatcattctcagcaaactatcgcaaggacaaaaaaccaaacaccccatgttcttactcataggtgggaactgaacaatgagaacacttggacacaggaaggggaatatcacataccagagtctcttgtggggttgggggargggggagggatagcattaggagatatacctaatgtaaatgatgagttaatgggtgcagcacaccaacatggcacacgtatacatatgtaacaaacctgcatgctgtgcacatgtaccctagaacttaaagtattataaaaagatacattaaaaaaaaagacttgcatcttttatgaaactttgcccataagtcctttctctaccctttcaaaagccttttcttgaaggtccagctcaaataacttctctttgaagtcacctgcctatccaagcttatgatcttttccaacctttgaacctcttctatatcactgaatacctcaaacttacattacatattaccagatattgtgtggtatttcttgatgtataaggtctctttaagcagacagagtgcaaacttcttgggtcttatagctaaacccagagcaataaatatgttttcctaatcttattaagacattttaggaaaagaaagaattccttttatttgtggttttattttctggatggaacaaaagttaggatgtcaaatattaggaaagtatttctgatacacacttgttaatgagacttaaaagaagcaaatatcctgctgagttctccatcattatgtatatgccattctctttcccacaatcacatattctcctagccaatcatcatttaaaatgttattttctcagactatctagaaaacatctttcctgactaaatgttacatgaccttaataccatttttaactttatatctttgtgcatgtttatatacgacttgcatcattttatttatttatgattttaattttgaaataaggtcttgatatgttgccaaggctggtctcaaactcctgggatcaagtaatcctcccaccttggcctccctggtagctgagactataggtgcatgtcactgtgcccaaccacataatttaatatttagttgtattgctttataaaagttattatgttgtgtaaagatgtgttaggagcagagactttgtgttataagttgattctagactaccttaaagcatgaaattatgccttttatttctttttaacttatgcataaaataaaatagaatgctatggaattaacaagtactcaatatattctttgatagcaataatcatcaatgtttctgagtgacaaatgactacaaatggcaatcctgccaagcaactttcatggcactacaagttggtggacttagggacgtatacggaagataaaggcaagaagaaattctttatctttcaaatatttaatttataatatactttgtattttgaaagccaaattaaagttgagccatggcatttgaaggatgaacagaggtggctttccagcaaaaaaaaaaaaaaaaaaaaaaaaagtaaagctgaaagcttaatctctcaaacagaaagataatcactgtcacatactttcatgaagtgaaaggattaataatgcaactttaataaggcaagagcacttgagaaggcaaatatttttttaaagggcaaaaaattaagagtgagtaagaggaatactaaataatagattataaaaaaactttgaaaacaagttttaaaaatcaaatatgtacagagctagtatttactgggaagaaaaaaataaaagcaaaatacaggtttgtacaatatcaatagatagaatgatcagaagtgaacgaaaactaaggtgataattgccttaatgggcaaaaataaagaaagaacaaactagatcaaaaaatgtctgaaaataagcatcctgtcaattctgataaaatgcaatgaaataagtacaactgaagggactaagtaatctaatcagaagaaagatagcaaaaatgctggaaaaatataaatagggaaaataatatgcttgcttcattggtttggttgaataatccagttagtaatttagcaaaagtaatttgatcctgactatagcaaaaggacagagagttactgggatacaaatttaaataagacatgatctctgtttaaggataccatacacatacacaaatacgcacatgtacacatacatgtaaatatgtgtatatgcatatacaggatatgtgttgcaggcattagagacacaggagtgtgataagctataaaaaacactataagtgtgctaagaaaggtatgaataaaataggttgatgttaagaggaggggctgctgactctttaaagtgaagataaaacaaaatgagagcaacaagaagactgagaatagatggattcagaagtcacagtgtttttccaaataacgaaagtcatcagccctaacgtataatactgttttttaaaaaaagtaaatggcaatatgaccctcacaaagactagagattattgaaaattgcctttaggaaaagtaatagaacaaacattaaaaactaaagttataaggaaatttgccaagaaaaaaaattggttcctgaaactggaatcattccactcacaaatgtgtttgaatacttatcaagagtctaacataggccgggcgtggtggctcatgcctgtaatcccaacactttggggggccaaggtgggtacatcacctgaggtcgggagtttgagaccagcttgaccaacatgaagaaaccccatctctattaaaaatacaaaactagctgggcgtagtggtacatgccgtaatcccagctactcaggaggctgagacaggagaatcacttgaacctgggaggcagaggttgtggtgagccgagatcacgccattgcactctagactgggcaacaagagtgaatacatgtgcagaatgtgcaggtttgttatacaggtatacatgtgtcatggtggtttgctgcacccatcaaccttcatctaggttttaagcccagcatgcattaggtatttatcctaatgttctccctccccttgacccccacccaccaacaggccccagtgtgtgatgttcgcctccctgtgtccatgtattctcattgttcaactcccacttaaaagtgagaacatgtggtgtttggttttctgttcctgtattagtttgctgagaacaatggcttccagcttcatccatgtccctgcaaaggacatgaactcattctttttttatggctgcatagtattccaaggtgcctatgtgccacattttctttatccagtctatcgttgatgggcatttgggttggttccaagtctttgctattgtaaatagtgctgcaataaacatatatgtttttaaagcatttaaaatttaatgcacctagggccgagtgttgtggctcatgccttaaccccagaactttgggaggctgaggcaggaggatggctgcctggttcaagaccagcctgggaaacatggtgaaaacctgtctctactaaaaatataaaaatcaaccaggcatggtggtgtgcacatgtggtcccaactacttgggagcaggagaattgcttgaacccgggaggtggaggttgcagtgagccaagatcatgccactgcactccagcctgggtgacagggcaagactctgtctccaaataaataaataaataatgaaatcaaataaaatgtaatgcacctggacatggtcttctggtcctaagaattcatttcaaagaatgatgaacaataatttttatgtaaaaatgcttacctcaccaatatcttgaaacaacatactcgtaaaacaatatataaatgatgtgcatatatatatatatatatatatatataatacgactgcataatatatccttaaagtctattataaaaactaatgacattatataaagtaatatattatttaagtataagcactagagtcagatatcctaggtatacaggcaggctctgctacttatttgctatgaatgacagcataaggaggcagacaaattcctaggcagacagggacaggtccctggtgaaacccgacctacaagccaaagacagtttaaagactgaaaactgagctaccagtccatagagcccgtgactggaatgagaacttccttgatgccttttaaccaattgaatggtgctttttccaggcaggcccatggaccaatcagcatgcactttcctattattagcccataaaaatcctggactcagcctcacagagggctacctgctcttgggtcccttctctgctgagagatctccttctgtcgctcaatataattcttctctgccctactcagtctctggtgtctgagtatctaattcttcttggtcatggcacaagaacccagaatttgccactctgcaggcagcaggagcaaacgatctgtaacacgaagaaggtataacatttcttggggatctcagaccttgggactctctgggtgagagctgtaacagcacttggggctcaacagttgctggcacctctgagtttctgggtgtcaccacattacccttgtctagatgccagcacccaagaccgaagcaggttgctgcacacccagcccagccatagactaagtgtggatcctgtggcgggtgcagcatccagactggggtgcaagccaagtgcagcctgcagcgggcgggtgagcagcgtgaacccagtgagcctgagcaaagagacatcggccgcagagatttccagctggcgaagcggcaccgaaggggtcatgtaacaccggaatcctccctcctgctcaccaaactgtgggggaaaagagctgctaggtgtgtttctcacccaccactgaactacaaaagccatgacagttggttcaacatatacaaatcaataaatatgattcaccacataaacataattaaaaacaaaaaccatacgatcttctcagacagggaaaaattttagataaaatctaatattgcttcatgatgaaaacctcaagaaactaggcactaaagaaacatacctcaaaataacaaaaccaatctatgataaacccacagtcaacattaggccaaatgggcagaaatctggcagcattccccttaaaaactggaacaagataagggtgcccactctcattactcctattcaacatagtactgggagttctagccagagcaatcaggtaagagaaagaaataagacatccaaataagaaaagaagaagtcaaactatcttcatggacaatataattctatacctagaaagccctaaagactccaccaaaaagcttctgaaactgataaacaacttcaggaaagttttaagagacaaaatcaatgcacaaaaatcagtagcatttctatacatcaataccactcatgttgaaagctaaagcaagaacaaaattccatttacaataacacacacacaaaatgaaatacctaggaatacatctaaccaagaaagtgaaagatatctataagaagaactataaaacactactaaaagaaattatagatgacaacaacaaatggaaaaacattccatgctcatggattagaagaatcaatatcagcaaaatggccatactgaccaaagcaatctgcaaattcaacactagtcctatcaaactaccaatgtcatttttcatagaactagaaaaaatatataaaattaaaaattcagatagattccagcacctacctcctgaaagacaaaaaaaaaaaaaagttaaaattcatatagaacctaaaaagagctgaaatagccaaagcaatcgtaagcaaaaagaacaaagcaggaggcatcacgttgcccaacctcaaactatactctaatgctacagtaaccaaaacagcatactactggtacaaacacagacatataaaccaatggaacagaatagagaacccagaaataatgccccataccattctgttttcatgctgctgattaagacatatcaaagattgggtaatttataaaggaaaaaggtttattggacttacagttccacatggctgggaaggccccacaatcatggcggaaggtgaaaggcacatctcacatggcagcagacaagagaacagcttctgcagggaaactcccctttttaaaaccatcattatctcgtgagactcattcactgtcacgacaacagcacaggaaagacccattcccataattcaatcacttcctagcaggttcctcccacgacatgggaattgtgggagttacaattcaagaggagatttgggtgaggacacagccaaaccatatcattctgccccagcccctgccaaatcacatgtcctgacatttcaaaaccaattacaycttccaaacagtcccccatagtcttaacttatttcagcattaactcaaaagtccacagttcaacatctcatccgagacaaggcaagtcccttctgcctatgagcctgtaaaatcaaaagcaagttagatagttgatataatgggggtacaggcattggttaaatactgctgttccaaatggaagaaactggccaaaacaaagaggctacagtccccatgcaagtctcaaatccagcagggcagtcaaatcttaaagttccaaaatgatctcctttgactccatgtctcacatccaggtcacatgatataagaggtgggttcctgtggttttgggaagctccacccctgtggctctgtagggtacagcctccctcccagctgctttcatgggctggtgttaagtgtctgtggcttttccaggcatagagtgcaagctgtcagtggatgtacccatctgaggtctagaggacagtggccctcttctcatagctccactaggcagtgccccagtaggaattctgtgtgggggctctgaccccacatttcccttccacactgctctatcagagattctccatgagagccccacccctgcagcaaacttctgcctgggcatctgggcatttccatacgtcctctgaaatctaggcaaaggttctcaaaccccaattcttgacttttgtgcacttgcaggctcaacaccatatggaagctgccaaggcttggggcttgcatcctctgaagccacagcccaagcgctagctaccttggcccctttcagccaaggctggaacagctgggaaacagggcactaagtccctagggtgcaagcagcatggggaccctaggaccagcccatgaaaccacttttccttctaggcctcccagcctgtgatgggaggggctgccctgaagacctctgatatgccctggagacattttcccccattgtcttggggattaacactcagctacttattacttgtgcaaatttctrcagctgatttgaatttcacttcaggaaatgggattttcttttctatctcattgtcaggctgcaagttttccaaacttttattctgtttcccttttgaaactgagtgcctttgacagcacctaagtcacttcttgaagcctttgctgcttagaaatttcttatgccagatatcctacatcatctctctcacgttcaaagttccacagatctctagggtaggggcaaaatgacaacagtctctttgctaaaacataacaagaatcacctttgctccagttcccaacaagttcctcttctccatctgaggacacctcagcctggaccttattgttcatatcactatcagcattttggtcaaagccattcaacaagtctctaggaagttccaaattttcccacattttcctgtcttcttctgagccctccaaactgttccaacctctgcctgttgtccagttccaaagtcgcttccacattttcaggtgtcttttcagcaataccccactttttctgtggggtattagtctgttttcaaactgctgataaacacctacctgagactgggtaatttatacaggaaaaaggtttattggacttatagttccatgtgggtggggaggcctcacgttcatggcagaaggtgaatgacacatctcacatggcggcagacaagagaagagcttgtgcagagaatctctcctttttaaaatcatcagatctcatgaggttcattcactatcacaagaataatgtaggaatgcctccacccccaaaattcaatcacctcccaccaggttcctcccwcaacatgtgggaactgtgggacttacaattcaagatgagatttgggtggggacacagccaaactctatcacctacagacatctaatctttgacaaaattgacaaaaataagcaatggagaaaggactccctatgcaataaatagtgctaggatagctaactagtcatgctcagaagaatgcaactggacccctagctttcactgtatataaaaatttaactccagatggattaaagatttaaacgtaagacctcaaactataagaatcatagacgaaaacctaggaaacaccattcaggacattggccttgggagagaatttatgactaagtcttcaaaagaaattgcaacaaaaggccgggcatgatggctcatgcctgtaagcccagcactttgggaggccgaggcgggtggatcacctgaggtcaggagtttgagaccagtctgaccaacatggtagaaaccctgtctctactaaaaatacaaaaattagccaggcgtggtggcacgtgcctgtaattccagctactcagaaggctgaggcaggagaatcgcttgaacccaggaggcagaggttgcagtgagccaagatcgcaccattgcactctagcctgggcaacaaaagcgaaactccatctcaaaacaaacaaacaaacaaacaaacgaacagaaaacaaaacagaaaagaaaagaaaaattgatgagtgggacctaattaaactaaagagattctgcacagcaaaataaattatcaacagagtaaacagacaagctacagaatgggagaaaatatttgcaaactatgcatctgacaaaagtcgaatacccagaatctacaaagaacttaaacaactgaacaagtgaaaaacaaataacccaatttaaaaatgggcaaaagacataaacagcacttctcaatagagggcatacaagcagccaacaaacatattaaaaaatgctccatatcactaatcaccagggaaatgcaaatcaaaacctcaatgagatattatttcacaccaatcagtatggctattattaaaaagtcaaaacaacagatgctggtgaggctgtggagaaaagggaatgcttacacgctgttggtgggcatacaaattagttcagtcactgtggcaggcagtttaaagatttctcaaagaacacagaagtaccattcaatccagcaatcccattactgggtagatatccaaaagaaaacaaatcattttaccagaaagacacatgcacttacatgttcactgcaaatctattaatgacagcaaagacacagaaccaacctaggtgtccactaacagtggactagacagagaaaaatgtggcacatatgcaccatagaatactatacacctataaaaaagaatgaaatcatgtccttcacagcaacaaggatgaaactggaggccatcatcctaagcaaactaatgcagtaacagaaaaccaaatactgcatattctcacttataagtgggagctaaatcctgggtaatcatggacataaagatggcaacaagcgaaactgggaactaatagaggggagagcaagagagggagacaagggttgaaaaattaactattgggtactatgatcagtacctgggtgatgagatcattcataccccacaccttagcatgacacaatatacccagttaacaaaagtgcacatatacctcctgaatctaaaataaaagtttaaaaaaaaaaaagaaagaaaaaaagaagacagaagagatacaagatgcaaagtattccatgcaacagaaacagtaacgatagactttcggctggatttgctctttgcattcagagatcagagatcaatgtgaaaaagaggaatcctatgactaaaatactgattctacatagttcttcctgtctaccttaatactgaaaacattaagggggacaaagaaagcttcatgctatttgattatcattttcatcaaaagggtgtccatttaaatttttttctcatttcaaagtgatacattcattaaagaaaaaatttgaaaatctgataattaaaaaaatgaggaaataaaaaccatctttaacgtttttaaaaagagtgagagagggagggaggaagagaagtggagttctatggagtttgctatataacgggcttttcaatttacctttttatggaggtaaactgtgatgattaaggtggagataagttcaagaaactaaaaatgaggagaagaggaaagagaggtaaagagggttgggtgagagatgaggggaataatggatgaaaaaggcagtggttcaggtttattcccactatagattgctcctacaactccctagaacatgagccagcagagtattaaatacaaaaatggttactgtgacgggaaaaattttctggtgtctaacacccactttgcttgtatcttttatctcatgagaagacaacttttagatgcaacctcacagaacagtaacactgataatctctcttaaatcttagctgtaatgaaaagcacagaaaagacaagggaagactctcagtggttaaaaacaaaagaatacctagacagagttctgtatcagaccatcccagactacaaagaataaccagttctatggattatctaaactttccaaagttttccaggatagcagaggaaatagcctgtttcccctggaaatactgtcgactggaatggaatttatgggaacatacctggctagtttgtaaaaactatctcatcctggccagttcctcaatagtttccatgtgcttaccataaacaaaagtgcacaacactactgctcttcagtctcactgtgatattgctgagatcctgcaattcttaatctgaaaaccagaatcaatagggataagggtaatgaaaatacataaattggatttttctagggtttgtttaatgttactggatagttacttattgacacagtgtttctgggaagggaaaaaaaataaccctacctcacggggcttttgtcaacaaagccaccaaagaagaatgacagggagaccagctggagcaacattaatgtacttaggtcaacagagatcttcctcaaaatgctagatactgaagttttaaatgtatgtgaaaattgtgaaaatacatatcaaagcagtaatagcccaaatctaaggggtgaataggcaaaatattttattagaagactaacatgagagtgtgtgcacagagaggaaaccatcgaataggggaccatgacagattcaattaaaacaagtttccatccagggttctcttaggctgaagggtacttcaggcaaagatgggtcctaagagggggtgaatttgctgcaggataagcaaaagaataggactctttaatctattgtatatgttggtattacccaaaagatgtgaaaaaaaacaattaaaatcatttaaaaaccaaacttgaatgaggataaactacatagaaccttaatttcatatgtggtatctcttccaataaaattgaaaaggacagtgattgaaaatgatgatgagcaaaagcttgtgaaacaaaaacaggacccaaaaacaacgtgtgtccaaaatggacttttaatttgcctctaatttagcacagcattattaacatcctttgtcagttaccatccatgtgatttactctacaattcagcattttgaattgtttttatgaaactaattttgctttatggaatcatgaatgaggactggaaaatcattagtgtgtgaaagtgtcctctgtgcaatcccaaaaattacatttatgacaacaaaaactaatagtcaatgtatttaatattattttactaaaaatttagaaacaggaaatagaaatggctatcatatcattcaactaaattaaaagctactctgtaaaaggaaggtagcacaaaaccaaaacagagaaaaatgataagcccaagtaaaggtttcaaaagtgactaaaagccccgcactgtggcactcgcttatactcccagttacttgggaggctgaggtggggagttcacttgagcccaagagtttgaggtcagcctgggcaacacagtgagacctcgcctctaaaaataaaaaataaaaagtgactaaagcacaaggattcactcattcaacaaatatttattgagcaccctgtaagtttaaggcatcataggataaagtacacacatgaaaagcttgacaaaagaaaattttgaatgtaagagataatatcaaagaataaggaagggtcaaaactttttaactatttaactatactggataaactcaggaggataaatacccacggcaaattttttaaactactcaaaatgtggtgagagtttacaagccatttaaacaggaatacaaacgatcacaatgaaaaggcttcttgtgggggcaggaaggagggaggagggggagaaaaaaaactttctatgtatacatgtctgctcatttaacattccttgaaggaggtatgactaaatctgagtttaaattgaaataaattttcttaaatagaaagagttattaagaatctaaagcaagctagaaagctagaaaacaataatacagaatcttatcctttcaaggctaaaaggaactaccttagagaacatctaacccagaactttaattctgtcaataaaggaggtctgacaagtaatttcctcggggtgaaaatcttatcatttttagttttaattcagaaactatacacaagtggtatatattctctacaaaattagatattctatatcagccaaaattttaaaaaacccatacactagagccattcaacacttttgtatatattaattttaggttttttaagaaagagaatgactgagagataaggacaaaaaggaacaaagagagagaaaagaagaaatagaatatataccctacacaagaagggcatcatattaatcacactattttgtaaatccttaatggaatatttttctatatcagtaagtgtacataacttaaaatgtattattgactagaggaactgcacttttgtatgttgataccttttaaatagtaaacatcagtaaacagtaaacactgtgcaaatgaacacaccagtagtggtggaaataataatttaaaagatataaatctgttgtaagtgtaataataattttattttgtcattttctgacacccacacacatatgcacatatacaaccaccctcaattttcttattaatagacaagaaaatgtattgattataaaaactctaaagtttctctgacctctaaaattttgattctgtacttatgttgtacacctttaatagttttccatgaggcttctcccataataactattttttttattaagtttcaagcttactcttacttggttcaagaacagtttcatatatatgaatagcactatggaaggttattcacacaaacttagttaatgcttaccacaacctgcgatgtagataacatgaaaattaagtaatttgttgaatatccccagatgataagtagagggaatggaatgaaggctcctagttacattttcttaaagattctatccattacatcacatgaagtttttttttgttttttgtttttgagactgagtctcattctgtcccccaggctggagctcaatggcacaatcttggctcactgccacctctacctcccaggttcaagcgattctcccgcctcagtctcccaggtagctgggattagaggcgcccactaccacgcccagctaatttttgtatttttagtagagatggggtttcaccatgttggccaggctggtctcgaactccggacctcaggtgatccacctgcctcagcctcccaaagtgctgggattacaggcataagccacctcgcctggcccaagttacatgtcttaatatattcactgaggcatttattaagcacctattataacaacaacaggattagtatactaggaaaatactcatttaaaaggactgaggaaataaatgtacactgggactggtaaagcagagttctaatgtagttataaataatgaaactatgtagaagaataaataattagtaaataggttaatagaaagcaaacctaattttaaaatgattgaaggaaaaataaatatgtctatgtttagaacaacaggaactggttaactactaaatgcaaaattttatttttctttcttttttttttcaggacatctgttacatggctattaatgcaaaatattctgactttttcttcttttaatcaagttgtactttggtttggctttctggatggttcataacaattaagcatgtttgaatactaactgtagcattatttcccatgatcttaaaattttcatcaaacttaataagaaatgaggtatattttacaaacaagttttagctctcttggaagaaaggtggtaaattaataactggaaatactactatcattatatataatttattaaaggggcaaagaggttatttccttaactactctgaaaaggaggaagactgttaataagttaatttrggacacaagatagtcatattccacattctttgttttaaatgtagacagctgaatgttcactcaaaagatttatttcaaaccttctctatgcaaagcattatgctaagtgctatatgaatacaaacaaggctaccaactaagatgttatccctaacctcatggaaaagaagatataaggtgtggttttgtatttacataaatcaatttagctctctttgagaactatctgtgggtatcagtatgcatttttaggattaaaacagaaacaatgggccaggcaaggtggctcacacccgtaatcctagcactttgggaggccaaggcaggtgggtcacttgaggtcaggagttcgaggccattctgaccaacatggtgaaaccccgtctctactaaaaatacaaaaattagctgggcgtggtggtccacacctgtggtcccagctactcagaaggctgaggcaggagaatcacttgaacctgggaagcagaggctgcagtgagcagagatcatgccactgtactccagcttaggcaacacaatgagatgccatctcaaaaaaaaaaaaaaaaaatggtgctctgggtctcctcacagattcacaaattctttccaacatgctttattatttcttgataagatggtcaaatgatacatacttaaacataaaaaaatttaaagctattcattaaatgtacataaaacaacataataayyctttgaatttagcagtcgtatatttgggtctacttttattatattgccaactgctatggtttgaatgttatatgttgaaaacgatccttaacgcaacagtgttgagaggttagacctttaaaaggtgattaggtcatagggcactggcctcacaaatagatcaatgtcattatcatggaagtggatttatttctttgagagtgggtttgttataaaagcaagttttgccccttcttgctctctctcacttggcctttgcaccttttgccacgggatgactcagctggagggtcctcatcagatgtggccccttaatcttggacttcccagcctccagaaccatgagccatataaatttatgttcattataaattacccagtctcaggtattctgccatagcagcacaaaacaaactaagacaccaccttctgcttctagcctcaacctgatatatcagagccaagtatgagggttaatcaaaatcttcgcctaagatagatagatagatagatagatagatagatagatagatagatagatagayagacagacagacaaatagcttgagattatgaaagctaagacaaaacagtgataatctggatgctctgctgtgtactagaattatccaaggtgcagactgccagacccctctactggagattttaattctacaggtttaggtgcacccaagaacctgtgtttttacataaatatatttggagaaacactgaccttcagaattaccatcaatacagaattagagttcctaacttaccatctacatgtgtcattttttaagatgccagaactattatcatttctttcaatatttctgaagtgaaactatgtgctgacctccatagcacacatttacaactatatacacccatgtttctgcccacttcccaccagatagatgaatggataaagacaggtatagactgatagatctgcccactcatttacctaatatatattaaagaaagcagatattttgcctgcatatcagaaaataattcaagtgtttaaagattttcacatctgagaaacctgaaattctatcctaaaaaatcaacaaacaaaagcaaaaagctacaactgaaggaaacttccaggaaagttctctaaagattttaagttattaacaacagtccttaatttacctgccatcccgttgagcagcaccaccttctgttactgtcttgacgaatattcccagcttttcaagtccagcatctgctccaacacccattccaataatacttataccaagaccatcctcatctattaaaaagaaaaaaaggggggaggtgaaacaacttaagttttacactagtctgcaattagctggtgagacctacttgctgtttctaattttatttttccttatggataggacaataacatgcttgctttagcagaattcttttctaagctacgcagtaagggtatctaatgagatcctccaaaaggctcatgcatttagcatcattttactactactgttggtaattcactgtggtctcaagaaaaggtaacaayttgattattgaatagtcactctgccttaaaacctagattctctaaataatgcaatgaattattttaggcgtaagagtacacatattcaaacatataattttaaataaatctgatcataacatatctggaattcctccttcatttatatggtcttttcttctttacttgtttattcatgttaataagatagtacatgtggctgggcatggtggctcatgctagcaatcccagaactttgggaggctgaggcaggtggatggcttgaggccaggagttcaagaccagcctggcaacatggtgaaagcctgtctctactaaaaatacaaaaagttagccgggtgtgggggcaggcacttgtagtcccagctacttgggaggttgaggcaggagaatcgtttgaacccaggaggcggaggttgcagtgagccaagattgtgccattgcactccaccctgggtgacaaagcgagactccatctcaaaaaaaaaaaaaaaaaaagatagtatatttgagtactttcctctgtgcttctatacccaagaatatatactcatcaacaactataatatatacatatacttagacatatatgaatgtatatatatgtatatatagcttgtttttccttcttatttgcttacacaaatgagattatacctacttctctttactgcttactttttaaaaaccaatgaagcgcctgggcacagtggctcacgtctgtaatcccatcactttgggaggctgaggtgggagaatcccttgagcccaggagttcaagacaagcctgggcaacagggtgaaaccctgtctctactacaaatagaaaaattagctgggcatggtggggcacacctgtagtcccagctgtttgggggctgacgtgggaggatcacctgagtctgggaggcagatgttgcagtgagctgagatcatgccacagtgctccaccatgggcaacactgcgagaccctgtctaaaaaaaagataagtcatggatatcaatgtcctcaatgtccatatctctaaattatttctaatgactgaataatatttcatggtgagatggtatcataatgtatccaaccattctgtattcacatttttatttccattttactggtcctatgaacaatactgtgtgacttttttttttaattcacttacaaatcacgtttatccatatttccatttgtcctttctgtgaatatataaaagatacactattttgcgtgccacatgttttagttaaagttcaaggttattttctgatagcctcaaagtctttgtaatcatgctttactagcagcataaaaatactaactaatcaacagtgatggattattaaagaaatattggtccatatactcaacagaatgacacttttaaaagacttttcagcaataaccttcactttcttaagcattttttctgtttttctttcttcttcttctttttttttttttgtttgagacaaggtctcactctgttgatcaggctggagtgcagtggcgccatcatggctcactgcagcctcaacctcctgggttctggtgatcctcccacctcagcctccgaggtgctggaactatagccatgtgccaccacatctgggtaattttttgtgtttttttttttttttttgtacagacagggtttcaccatgttgcccaggctggtctcaacctcctgggctcaagcaatctcctgcctcagcctcccaaagtgctggtattatggatatgagtcaccaggcctggccaggattcttgtaattagtattcttcggatgaaggtttatctcatacattactacttataaccaacttatgcctgaagtatttccaagtacacctgacaatcttatatctttattctacatatgttttaaaagatgtcacttggcaaaagtgtgatttgtttgctcagtggtatgctagaggaatctttacagtgtttcccctggatgagctgcctgatgcaaaccccagctgaaggcacttccacattgattctaagcataggtgtctctttagtgtgaaaactttaatgctgactaacataaataatctctgaagactttcctcattcattacatttattaagtttatatacatgtgatttctcctatttattcaaattgtttctctggtataaagactgatttcatcaagaggatttatcttgttaaagattttctacattcattatagttttaaagtttcgccacagaaactttaaaatcttcgtacacagagatttgttgtgtacatgaaggttagatgtgtgctgaaggctctcccacactggttacatgcatagggtttttctctctcccaccatgaattctcttgtgtgtataaggttagcggatagctgaattcttattgacattcgtcacattcatagggtttctcaagaaaatgaattttttttcacactgatgaaggatgaatgattgctgaaagccttcccatagtgtttacatccatgtaagtttttccccttagtgtattgctcttgtgttgtttaagagatgatcaatgtagcctcttccatgcagaaaaataccatagaatttctctcctgtatgaaatctctggtgtatatatgtattagtattctggctgaattcttgctcactttcattatactcacagggtttctcttcagtataacttatcacatgtcaagccaatgtagagctgtgagtcaaactttcccatactcattaccgtacaaaaggctcctctcaaatgtgaaatctccatactgtcacaccattaaataatttcttcctgcaactatcttgagtgaaaattacttcttggtttctaaatccattttctctgcctagacwcaggtcttggtagaattctctttcttccttccattgctcctctcattgcttttaactggaaaattactcagatttgcagagctgaaaatccagttgcagaaaaagcaatattaactcaagccatcctcaattctaatgcaaattacttacaaggacaacatgatgactgaagggcaatacaagaaagagcacaatcaacgcacagagaccagaagactgatgttctccagcatcttatttacatacagctttctctgagtgaagtctggaacctcatccttaaaggccacttattattcctgtggctgacccatcgagaacccagctgcaccctgtcttcctctccatacattcctagggacaggcaaagcacyaaggcaaaacagccataaaatgacggcaaagacagagggactatgttattatggaagacactattgtcatactatggagcccaaagcttattttctaacttctggtttcccattttggttaagactctcctgccacaagcctagatgatatatgcagtcatttaaattttctttacaacatctttaatatgttattatttaacccatgtagagttatttatttttacctatgctgtaatgaaggtatccaactttagattcttctagatagattctcagttatgccagaacaatttataaagcacataattacttctaagctgaaatatcatgtgtgtcatatattaaattctcacacatactaacatctttttctggattttctattttgttccactgatcaattgccatttgaatacaatttgttctgattacaaaagctttacattatatttagatatttggaaaattaagtcattcatattccttttcatacttaagtctgtatttctccagacttaaattttaccaaaaaaatttaatactgttttttgcaattctcctctcccaacccaactttgttggcagttctatttggagccttcttgtccaagaatatggtttgtctttcaatttgctttcaaatagaaatgactttcaaaaagatgttattattttatctagataaatttcatgtttttcttagtaataaatattttgttgttttggtgctactgtaaataaaatatttttcccattttcatttctaaattcttaatgtgattacatagaaaaaattgatttttatacatatcttgaatgtaacctcttcctccacaaattattttaccaaatctaatattgaatcaatttggttttctagatagatatggatatgaatatatcagcaaaagatgatgcttttcatcttttatttgctgttatttatactggtcatttcatttaaagggcattacaaatttgatttctggttttaattaaaatatctttagtgtttactcaatttagaattagaattctctgtaggtattgtaaatttatagtttgcataaatttaggcagcttccatcatgtgttaatttacagtctttctttaaagtggtaaatgttaccaaattgacatcttttcatamcaatttgacatgaaatttaaaaaatttaagggcttttcctttaaattgtatgtggatgaatctttgaataatgaaccactctatatccttgtatctaaaactccatttgatcctaatgagtctttctttctttttttttttttttttgagacagagtcttgttctgtcacccaggctggagtgcagtggtgtggtctcggctcactgcaacctccacctcccaggttcaagcaattcttctgcctcagcctcctgagtagctgggactacaggcacgtgccaccacgccgggctaattttttttatttttagtagagatgaggtttcatgtgttagccaggatggtctcagcctcctgatttcgtgatccgcccatctcagcctcccaaagtgctgggattatagacatgagccaccgcacctggccttttctcttcaactatttctatatttgatattttatttcatttagcattttaaaatatatattcacaattgtagttgtattatagcaatcttttttgtagcatattagttttgggtataaacttatatggtatttcaatgaaatgaagagttttcctttattatctatgatctaaaatagtttaacactggctttatgcattctttaaaggtacaatagaatcatctggttgtgatgacattttaatgttttatctgtagttatcattctagtttcttctatagcaattagtctattttactaaagttgattctggtaattcaaattttgttaggacataaattatttctgggcattcacctcatttgacaaagaaatgcagtgactgactgatcttttatagtaacactatatatttttcttccattcctaatttgcataagtttactttcaattttctccactcagtattatgattgatatattttatagatgtattcaatgaaaaggatttgtattaccttattttactagattttcttttctatgttattaatagtgtttttacatatactactcttccttgctagtttgtttgatttatttggtttacttttcctgatttctaagacaggtccattttttgcttttcaagttttttattttaaagaaagaaatcaaggatatagcttttcctctgagtaaaggttttgctgtgtgctacagactttttttttttttttttgagacggactttttaagtttaatcctttccacgatggtttgggatatgagttataattttctcttcaatcaaacatctacctaggaatgtattatgtaatttccaaattctcatattaaaggaacctttaacatttttccaaaggataaaactttttcttttaaaatacagcttgaaatagagttcattatattaacccactccttgatttttgttttctgtccataaatctgtccagttctgaaagaaatatattgaaatctccaataattgtatttgatttggttaccttctagtttaatttttagtatgaaatatggcaacatacaaatgagtttaatatttatctacaaaacattatgtttaaagcataaaaataaaacaaacatccatgtacaaagacacagaatattaccgacatcacaaaagccactatatatccctccctgacacagcaactctttcctcagtgaccattatactaaacattgtgttaatcattccctactttttaatactactttttaaaaactactcatttgtgtatcccaaaacaatatgctatttaatttttttggtttgaaatgtaagtaaatgcaattatattacactaaatggtttcttctgtggtttgctatttttactttccctcgatatcatgttaagaatcatacatactgctgcatgaagtgtggcacctccattttcgctgctgagtaatattttattgcctagatatgctacaatttatagaccctttctaccattgatgaatatttggattggtcttgtttttttgctactaccaaaataagtaatatgatggcccagctgtgtttgtatggccaatgaactaagaatggcttttatgttttaaaatgtatgaaaaatgtaagcattactctttaattcactttaactccaaatgaaagtgtcttttaacaggagtaatccatcagtcatgtttggtgtaatatgactagtattcttcatactttttcatttaagcaattgtatgtttaatacttcatagttttcacctcttttttccttgcccttgctgttttgaacaagctgctctttgtttcactccctccctgctaaattggacagtgaattactcagataaagtatgtaggcaatgtgttctttaaatccttagatagcagcagatgtctttctttcaccaggataggtaaatgctttctgggatggatatgggattcttggatcaccatcctttttaccctcagtggcatgtaaaattatttctacatctccctgcttctagtgttacagtctgatgctagtctaattattttgcctttgcaagtatatttgcttgtttgtttggttgggtattttttggcctggaattttttaagctctttcactttatctttgaatattaggattttttcccaggctatgcctaagtgtgggatcagtttggggttatttagccctctcactcataaatggataagttcttcctaatataagcctcagatcttctttttaaggacaagaaatttttcttctatgattattattagtctgtccttctccattgtcgtttttctcttctgttgcctacaacttatatattgggactctttcatgatttttcttggatttttgctctgtcatttgagaattctttttggaatatctctcaaacgtcatcttctagatcgccaacttaagtctcaacaataactatccttttcaattcttccggtgaaatttttcatttcaaaatcaagaaatttgttcttgttgctaagttgctcaagaacgtctttttttaaatctgtataaattcaggggagtacatgtgcaggtgtgctatatggatatattacatagtggtgagtctgggcttttagtgtaacctttacctgaatagttcgcattgtgcgcaagtggttatttgtcaagccccatccccctcccaccctcgtaaacttttggagtccccagtgtctattactctgctctgtatgttgatgtgtacccactgtttagctctcacttataagtgagaacatgcagcaaataactctgtgtttctgagttatttcatgtagggataatggcctccagctccaaccatgttgctgcaaaagacatgatttcattctttcttatagctgcacagtagtccatagtgtatacatgccccattttctttatccagtcatctattgatgaatacttaggttgattccatgactttgctatttccaagactatttccattgratagtattctgttaaacatacaagcacaagtctctttttgataccatttcttttcctttggggagatattcagtagtgggagtgcttggtcaaatgatagttctatgttcaattatttgagaaatctccacactgttttccagagattgtactgatttacatttcccccaacagtatctaaccattttcttttctctgcatccttgctaacatctgctgtttttgacttattaataatagctgttctgactggtgtgagatggtgtctcattgtggttttgatttccatttctctgatgattagtgatgtggagtgttttttcatgtttgttgactgcttgtaagtcttcttttaagaaatacctgttcgtgtcctttgcccacttattaatgggtttctttctttttgttgttgttgttgttgagtatttgagttccacatagattctgaatattagtcctttgttagaggcataatttgcaaatgtctttttttaagccatgcttgagtatccttgggtaggtttttgtttctttttttcttgttattcaagtcatcatctgtttgttctactcttttttttttcaaagctctctcagaggtgttatttctctgttcactgagtgacagttcagttcttgggtgcccatcttacatcttacctggtaatctctgatcccacgggtcagcagttactacagtaggcagggtgtcattcctgggagagaaatcagaaggaagcctttctgctccctcttctccctgctctctttcaaccttctcccctcagagggggagaggatgtagccctactatttaaatttccttggattctaccgcctttattaaaaatctccataattttccaattatccaccaaaacaaaagaaagcgaccatctgccccaagctctcatataccagctctttctgggctctcagctgtagcagccctttccaggaataccaacaaagcattaggcctcacttatacctccctgatcctaaccaccatcgcagccagctaagatagatgggtttcagttgggagtaaaactttcaatccaccatctactcagaatccatatcaactatttttgaaacttaataaataagatcctctgttagaattaaaattttatccaatccttagaaaaaaggctacattttggaaaaataatyctgtattattaacatagcaacataatgatattaacactgtagcactcacgaacctttctctagctccactgggaaaagttccagcttttctacacgtttttcaagttcatactcagctgaagcagccacagggtcaacttcgtcatttctcctgtcatagtcttcattggagtatgtgttgaaaacctgtagtaagaggccaacaagatgataatacagaaaaaaaaaaaaacctgccaggtatccaaaactatgtaagtttaaacattcatgtgatgaatttcttctaaacaactgttttgtctttaaaatcaattgagatgttaagaaaaggaaaattgagtcagtataaaagtaacttactaatttttaaaatgtgtaagcgatagtaccacttttaatcatttaagagacaaagtagcctcagaacacattatgtgaatagcaatatttatcgccttttatagaatcagaatgaatcatattagctggaacgctctgctgtttcccaataaaactaaggtaaaccatcttgaagctacctaagcaaatacctacactgaacctgtttcatggtatgacctatactagccctgaagtagcagggtgtcagtattataatgctgtctcaatcataagatcactgaacctgacctccattctaacactgtcctgggctcttgtttgtcatccctcattttacttgcatatacatttaaattgaattctcattgaaacttttatgaaattattatgaaaatatcgctaaagggctgtacagcaaacaggatattgaagctgtttatttcttacctacatcatttaaaagacaactaaatgtggccttcagatatagccataagaaacttgattgtccttatttctgctgaaatgtttatcttaaaaggaactgaagtagttgtccaatccctctcttaatacaggaaaaaatatatgaaagaaataaatgtataattcatcaagtccaattaatatacataacagacactggcattttcaataaaattcaataattattatgcatctaaactgtgcctaaagaaactgtgctcccccaaaaatcataaaatctaggattagattttaaaataatatttataaaaagatgcagtagaaacagaaggcagaaaagaaggccaaagactaaagaaatcatgtctatttcctacaaagctggccctgctgttctatggacactttacatttgtattattggaaaacaagtaattcctatattctatatatggtaacctataaaccaaaaatacatacgcatatatagaagcagatataatgtagctcctaatggtacatgcttcttaaatagtatcatttgtaggatttgtacctgagtgggtactgttttcttcttgactttcaacatgttttcatagcctcatgccacttggatccctatttggtctctaccatgtttcttcaccatagtaaaccttactgcatcaaaatgcacatttccatagtatagggttagtgcttttatttatcttttcataatattcataaatattagcatgtttcccatgctaatatttttctttttcttttcttcttcttttttttttcattgagatagggtcttgctctgcactccaagctggagtgcagtagtaggctcactgtagcttctgctttctgagctcaagtaattctcccactgtagcctcctgagtagctaggattacaggcacatgccatcacactcagctaattaaaaaaaatttttttttagaggcgaggtctcactatattgcccatgctggtcttgaattcccaggctcaagcaatcctcccatcttggcctcccaaagtgctgggattaccagcttaagctactatgcctggcctaatattcttcttacattgtcatacttacaactttctcttagacagctcttttgatccttcacttcctcttatatttttagtaatcacttattcacatttattcattcaacaatattttacagttctaaactcatgtttgacattgtgctaggcactggagaaggaatagtttctagtagcttacagtttaggaaggacacagaaatcaaaataagcacctacaaaataatgtggtaactgatataaaagcagcatataccaactattttgtttttattttcctgagaaggtaaagaagttgtgaaggcaaagatatttgacctgagtcttgaagaataaacagaaattcacatatttgactgcagaagagaaggaatatatatttcaaatataagaccctagaccaaaatatatatacacacacatacacatatctatagttttttggaaaacattgatagttgagtgtactgcaatggaaaatgcctatagaagcaagctttacacacaaaataacagttagctgggcctgggtctcatgcgtcccggaaatcactggcagatatgactggaaattattcattaatatttaccacttctctacttctgctaataggtcccggtttatgactgcaaaacaatggtttaaacagtattcattctggaacatcactcaatttcactaatactagtaagtaaataaatatgtatgcgtgtgtctatatataaagtaagtatgaaataactgtttcaaataaataactccttcccaacattttttttttcaggatcccaaacactctgatatcagaatgttcttccctattcgggctagtttataaagttcatttgagagtattctgaaattaaataaaacaaacctaaaacagtaagactgcatattggaaaatgatactgtgtataatttttgagacatctagcaatcagatgactatgccaccatttcattctttaatctcagcattttgggaggccgaggtgggcagatcatgaggtcaggagatccagactgtcctcgctaacacggtgaaaccccatctccactaaaaatacaaaaaattagccgggtgtggtggcaggcacctgtagtcccagctactagggaggctgaagcaggagaatggcatgaacccaggaggcggagattgcagtgagctcccgcgccactgcactccagcctgggtgacagagcgagactgtctcaaaaaaaaaaaaaaaaaaaaaaaaaagaaaagaaacgaaaaagaaaagaaaagaaaaagaaaaagaaaataatgtaatacactcttcatcttcagcttacttataggcttgtaaattaagtaggcatgcagaaaacactgcaaattattgaaaaagaaaagccagaagtcgttatttgcagattaaacaactgattacttggaaaatccaagagctttaacagaaaaagtattagaactaataagagttcagtaaagcgatgtaacttttaaaactcaatacctatatacaaaaacttagaaaatacaacaaaatgatcaaaacaataaaacacttagtaattaccaaccataaatgtacaagcatttttctctctataaaactaagtgatgagtacaaaaagccctgaagaaagtgcaatgccatattatttccctggattaaaatccttaatattataaagacatccacatttctaaataactgtaaatatcagtttaccctaagttaatttatgaattcaagacaataaaaaataaaatcctacctacatttttcgtgaaaactaacaagcagtttgaaaaagaataagggtagaatcaggccctagtggatatcaaaacacataataaaacttcgcttattaaggcaatatagtttgagctctgggatagatycatttttatattctattctgttccactccttttctattcaaattagagtggtctatttaataaattatgaaaagaattagatacctatctgaaaaacattcctatttatatcacaaagaaaaatacaattcagaacaaaaatatatacatatataaaaagtgccaaaagaaaatttgggacaatgtttagctaacaggttagaaagaaattcacagatcctagaagttctaaaggaaataaataatttgattaaaaataaagcccaaaaacttctaggcaataaaatataccataatgaagttagaagaaaagtcacagattagcagaaagtatgaccaaatattaagatgaaacatgaatattcctaatatataaagggctttatcaactcaaacaattgcatgtataagtaggtaaaggaaattgagaattgaacaaagaagaaatactaatgtccaattaatgatataaagatgttcagctttattaaaaattaagcaaatgcaaattaaaacaaggagatactatgcattcatccataagaatagattttttttaaagactaccacatccaggcaggacacagtggctcatgcctgtaatcccagcattttgtgagatctaggagggccgatcacttgaggtcaggggcttgaaaccagtctggccaacatggcgaaaccccatctctactaaaaatacaacaattaactgggcgtggtggygtgcacctcgggaggctgtggcagaattgcttgaacctgggaggcagaggttgcagtgagctaaaatcatgccattgcactcaagcctgggtgacataataagactcaaaaaaacaaacaaaaaaaagactacaacatccagtgtttgtgaggatatagaaaaaaaggatacttttgaagaggaaagcataactagaaagtagttatcaatattttaaatgtaaatgtcttttacataatcatgtcacatttaagtgtttacagaaatacttgcaaatgtgtacaaagatgtatttcaaaagaagttcattacagcactatctgtaatagcccaaagcaggaaattgcctaattgtccaccagtagagaaaatggcttgctaaatcatgatatatacaaatatgtaattcaatgcagtgattgaagagatgtatatctctctactgacatggaagaccccaagatacatacatcgttaagctgaagagcatgctgcagataaagagaaagatattcccaattcatacgatccccaattggtatggtcccaattttaacctaatttaaagccccctaaattccctagctatgtagcacttgccaagttgtaaaaccatgctaaggcgcagtctccttatttacaaaatggtttttataataatgcctatccccataagagtattaggaaaataaaatgaaatagtccatgtaattatgcttggttcaatgaggggagaggaaaagctttctcagggtaatatgagggataatatttcccctgatacctactacccatatcatactctctttttttaaattaaatttaaaaacatttttaatagagattggggtctcaccatattgcacaggctggtcttgatctcttggcctcaaacgatccttccaccttggtctcccaaagtactgggattataggcatgagcccagcctcatactctctttcataaacatgttttgaatatatcacccactaggatgtttaatgccctttaagcaaaaatctgcataactgacttagtattagaacatagattaggctgccaaaatccccacctatgtctagagcaatgcactgtcattacacaatggctcatggcctgccaggctttctgtgttttctctgaccaggaagccctttcatctacatgatcttgattctttccattttcttacaatagttctattatttttattaaccttaattgctctacaaaaaaatggataattaatcagataataatcagagcatgactcctcctggtattccagcaacacaaaaaactctaaaggccaacagcattctgagtcctaatgttcaacaccaacaagatatatgtatttttgtagttcaagctaccttcacattgttcctgttttatttcactgagaaaagtaaacaaaagatgtttaaatttaagacttcttgtttcagagccaataagtgatattctggtttctcgatcaaaggaaacaaaacaagacctcatccactgcttcacagcagagacaggctttcaggggtaacaagtttacaaacacggttagcaaggacatttctgaacgaacaacccaaggctatgaaaagcaaataaagtaaaaattagcttattttaagatttcaactagaatcattatcttatatacattttcagtagtttgaaccacaacactttttcaaaacagcagcaatacattttcaacaataagaaaaaaacttatttccttcacttctttatgacacattttctttaatcaatgcaggtctaaataaattcagcatattctataaatactgactggaaggaatctcccacaatgcttccacacggtctcagttcaggctatggtccaggttctgtaaaatcttcctgacacatcaaagatgaaaaatgttccaggtcctagcatgctgagtttcagatgatggctagcaaagtgtgctcctggagataagccaaacattcacatgcttccacaaacaggttacactcatcacaagcttccttggcagaaccctgactcaccttcacatgatttcagtggctctgcaaaataagctctaaattgaaactaacaataagcctggagaagatagccacatattaacattccaaaaaccaacctggcaagcctcacaaaggaggattctaatagctttagagcaatgtataatctcaactttccttttcttcccccaaattaaggttagttcactgatcgacaataggtagaattatctagtgtattgattgtccagtgtgtgcccgggagtatgttaggtgcttgctgcaaaatgaagtaagccaaactggagtttataatcatcagacaatttagggtaaacactggtagtctccaaagatgtaaacagctgagggctttagtctactcctctgcaagcttttaacataaggagtatgttacaatgaaaagaaatttcaaactaaattctgctcatgtaaaaacattgcttaactggaaggtgcaaaaaacagactcataggcctatctcataaaactctaaaatcccagatttctgtccttaaaagtcattttgaaaagtagcctgtgtgaaaggtttacttaaagcagttgcaactacattctacagtaggatacatttaaccttctaagtggatcactcaccagaatcctacataccacaaaacaggatcaaatggagtactagttaggttattaytccaaaagctgttaatctgcaagcctcgcctgacccaaagtctagttacataaaatatttctaargctaacccctgtatcttcaacatcattcatttcaccaattatttgtagcatacttaacgttaatacattgtcttgtgtagatttaaagtaccaatatctgggtgcaggcttctaatcagtgtctttcaaataataacttactaatcctagtgtgtggattcatgattgaaatacctagaaaattaactaaagggtcctaaaacaaagttactcccataaatattatgttatatatgccaaagtactttaaattatagacaatatagcactttacacaaattatctctttaccaaccaatctagggagtaaggcagaaaagggtaaagagagttcccacggtttttcatatttttacacgagaagttcagaggacaatacacatgctatatataagacaaagtctattaggacaaaaagtacatttcactaattgtaagcctagtgttttaatggattactaaagaacaagaagttgggctgggcgtgggggctcacgcctgtaatcccagcactttgggaggccgaggcaggcggatcaccaggtcaggagatctagaccaacctggctaacacggtgaaaccccgtctctactaaaaatacaaaaaaattagctgggcgtgatggcaggtgcctgtagtcccagctactcaggaggctgaggcgggagaatggcatgaacccaggaggcggagcttgcagtgagccaagatcgcaccactgcactccagactccagcctgggcaacagagcgagactgtctcaaaaaaaaaaaaaaaaaagaagtgaaaaaaaaccaaacatactctatataatgggaggtagagagcatgctagttcaaacggcaacacaaggaagcctacgtttgtcaaggttttccagaaaaatagaattaatatctttatatgtgttttttatacatactatatatatttatattaaaattgattttaaggaattgtctcatatgacagtagggactagcaaatccaaaatctgcagggtaggcctgcaggccagagacccaggaaagaactaatgttgcagttcaagtccaaagacagtctgctggcagaatcccctcttctctgatggaagtcagtcttcttctatgaaggtcttcaatgaatttgatgaggccaatccacgttaaggaaggtaatctgctttagcccactgctttaaatgttcatctcatctaaaagatacttcatagactctagaataatgtttacccacatatctgggtactgtggccyaccaacgttgacccataaaatgagtcatcacaaagtctttcaaacaggatattctctggctgcaaaactgaactttttggtatttgacaaggtagtcaggaatatgacttccttacaagtaagtagaaataagaccgcagatttacaacacctacaagttacagagacacttttgacaagttaaagcatttcataaggataatatcattatttccatacttaaactcctagcttagaaaagaaaaagccaacctagctaggactgcagtaggaaagaatattgaggggaaactgcatggggcccacatgtaaggcagcggtcaatgagaacttgtgctgccacacgctgtgggcttggccaactcactgggcctttctgagctcaggcttttatgtgcaagaaggtaggatcgattatgatactgaggctgctggattctagggtcaatcgcgactctgaaacctaatcaaaattcttatcactatgtgtctctgatgacaagtcttcaactattcatacctacatttgatggtaagttaactaaaagcatgaattctaagttgtggcttatttatagcaagttatctgttccacgttttttaatattgccacataaatacacaatcctatagagcatttsaggaatggataatctgggacccatatttctatctagaagatattattatgttttttagatagttaagcttttagttaattttaccactctgctagtttcattctcatatctaaatcatctaataggcattataaatgccaaaccaaaacacttagtctactgccctccactaaatataggtcagcaaggcagctgaaacccctctacccaggtaaaagataatatccataagctacttttgcaaggagaggtttctgagggataccccatttgagagcattaacaggcyggatgctctccttaacaaccaaaaatccacataatgactcaaactctgaattcagcagttaatgtacaaaaaggaggaaaaggaaatgtaaagattaatacatgtaaaaatcataaaagtaagttttttcttgcaaaactaygggaaaaaaagagaaagtaaaggtcaatttatatttgttcatataaatagtaagctcacttctgtaatccatgtgagctagcccaaagaaaggtaaactagtctatttatgaagatgttagtgccgctaagcagtatttccagttctccttctgggtagaaagggtattttctttctttaccctttgttgccttggggtggggctatgtaaataattctcgccaatgggttctgggcagtggtggtgtgtgtcacttcttgactgagccattttactgcggaggcaagacctttcagtgtttttttcttcttatatttctggaatctggaaagtacgtatgatggaaatggacaagtttaagtaccttagtgactatactgaatacaaggagcttccctttgacctaacatggacatgtaacatcagtgagaagtaaacatctgttagaagatattaggatcatttagtaatgcaatataaactagcctatgttaaccaggctaccatctaaaagaatcacttgctcactattactatggattgcaaagatcctgtcttggtttaaaaacacaagatttggggccaagagattaatataactaagaacgtttcacctcattttaagtgaaaacattaatgacaataaatcagacaaagaggccgggcgcggtggctcacgcctgtaatcccagcactttgggaggccgaggcgggcggatcacgaggtcaggagatcgagaccatcctggctaacacggtgaaaccccgtctctactaaaaatacaaaaaattagccgggcgtggtagcgggcgcctgtagtcccagctactcgggaggctgaggcaggagaatggcgtgaacccgggaggcggagcttgcagtgagccgagatcccgccactgcactccagcctgggcgacagagcgagactccgtctcaaaaaaaaaaaaaaaaaaaaaaaaatcagacaaagaacctggggatgtgtcaaaagcattaatctcaagtcaaggccctattttctgttcttctgctctaagcccagttccaaaagcctaggggcctcaggaaggggactgaataccaccttccatccaaggtggtcatagatcttcttcccagcttttcctcacacaaggctgtggtaacctaggcatggctgcttatagtggcatccatcatatcttccatattacctacctctcatgtgtttcttcccttatgcaatacaaagagggatagttttcagaatcagttcttatctaaggacaaaagaaggcgtgagcaaaatagtcttcagaagtatgtggtaaagatactggaaaacacaacttacgctgcttactaagtcctctcaattcatatctccatagtattcttcttatattatttggagtaaattgttgtatccccaacatattcatattcaaacatatacaaaagtccatgataaaatcaagtatgtatttttgtattatcaatagcaccaaccacctcaaatacagaggatgcaaactctctaaatttttaaattatttattattatttttaatagagacagggtcttgctatgttgcccaggctggtctcaaactcccggggtcaaacaatcctcccacctcggcctccgaaagtgctgggattacaggcatgagccaccacgactcctcaaatttaaaatagctacagttgactttgtggaaagttttacatatacatacatgcacacacatacacacacatgcatacacacacatatataagtaaaatatatatgtaacacatatatgaaaagttaaattttcatatatatgaagatttttagtgaaataatatttcaagataagcagagttttattaaggtcacacatatagaaatattaatgaaataagattaagtctcttgcttttgacaacatagaattcaatcataattggtaccatttattggcaaatatgtgttgttaaaatacttgaaaagtatttttttattttaattttcatttttattctagtgagactgaatactttcaagcaatggttggtcttttttccatcttctatttatgacttactggttactatacattatttttcattgatttttaataaattttaaggtatagtattgcctagaaaagccttaaaaataagttcttcctgtaaaaatagtttatgccattaaagtaatcagggaaaaaaatccttcataaatgtaaacttagctcatcctgaatttggacaaattctaagacaattaaacctaaattagcgagttttttaacagagaactgggaaattccactgatgttcatgttttcctcagtatttttcaatttattgtaaacaattgaactatccatgagaaattagcaatgttctctttcagttcagccagagttttaaactggagacgtatgttttgctaactgacaactggtggccagcatgaaataaattggtggccttggtccagtttccactggacaggtgtcctcatcacagaaacatttaactaattaacccaattggcaaccatttgggggcagtggacagtctcctagatgaaataacttactcctcattccaagaagtaaacactcttttacagatgcagcaagttaagttagtaaatcaatttttgttctagcatgtgtctcagcagttggtccttcctgcttcttttactacaactgccagcactgtgtttctaaaagcccatggaggaaaattagtctaaattgtctaaataagaaaacagatggagaggaccaatacaaggtgtatgtgtgtgcacacatggtgagattacagaggggaaatggggataaggggatgccgggcacaccaaagagggtttgagagcttctcttgagcgtgaaaatggaaagtgagacttttaagcttctccagtacagaagtttacactctcccatgaaaatcccccaggggtgactggacctctgaatggaagggagagtggggtaaagastatcatgaaaagcaaacattaaactctgaggtcttgagtaccttgggaagagtacctcaagccccaaattttacctggaaacagaatgaaacagccttgaaaggaacttaactgttcattcaaggaggtcatcagaaacaactgcgggctaaagtgaaaggggctctcaacacaaggacctctgtaaaactcccaggaaccgtacatacatttacccagggtggtggaagagaatgccaaaacacggatgaggccaaataagtgggtgaggatcttaagaaggttaacattagtgcagaggaaaaaaggaatgtgatataaagtggtgggcaaactaaaatggattcctactccttacataaaaaaggatgatgaccaggctcttcacagtactatgatggtcttttttttttttacatttattttttatttatttatttttattcagtctccataaagactgccaaaaaatgttaatgccgactgtattgtaagtcctcacagcgggatattgggaaaagtcttcaattagctataatcacgcctaggataaacctcatttgctgtgatactgccactgcacaaagctatggtgatccttccatatgtcaacatgactaggctacaattcccagttatttaatcaaacatcaatccaagtgtcactttgaaggtattctgtagatgcgattaaagttcaaaatcagttgactttaagtaagggaaattatcctaaataatctgggtgggcctcactgaatcagttgaaaggcctgaagagcagagctgaagtttcctgacgataaaagaaattctgcctgtgacagcagcttcaacttatgcttgaggcttccagcctcccatcttcactgcctgccctacagatttcagaccttcatagccagactcaacatatgcataaaccaattcctggtggtaaatctcttaaaatgttatcttctactggcggtgcttctttggttgaccctgactgatacaccaacagttcaactcttcctcatagaaaaggtacagtaatttagagcagtagttttcaaagtgctgactgtgacctaaggaggttgtgaatcaatctaataggtcatgaagagcattgagaaaagtaaaattaaaaaggatagaatagaaaaacatcagcattcattataagtagtaagaggacatattgtacttcaaaacttttggtttcaaatatacacatacgtatacacatatgtatgtatcatatctcgatgtgaaatggttttgatttagagactaaaagaacagtagcacttaagaaatagtgaaaaagtcaaagcaggaaatacaggtttctcaaactactgagcctgtgaatgctgactgcagatacagaaattacacttcatactttctctctcttttgagccattgattcttacttcaaatccttattaagcaccagctcactggttggcactatgctcagtattgaaaataccttatgaggctagacacggtggctcacacctgtaatcacagcaatttgggaggccaaggtgggcgcatcacctgagatcaggagttcaggaccagcctggccaacatggtgaaaccccttctctactaaaaatacaaaaaaattagctgggcgtagtggcaggtgcctgtaatcccagctactcaggagggtgaggcaggagaatcgcttgaatctgggaggcggttgcagtaagacaagatcgcaccactgcactccagactgggtgacaggaaaaaaaaggaaaaaaataaaaactttattaatctcagacctgtcattgtaaccaacataagggccgtaataaagggatgtgggccatgctatgggagcacacagtagagacatctaaacctacctgggaagagaggtgagcaagaaaggatttcccaagtgaccccgaaagcaaagacttcagcctgcaatggttagcgtgagcaaacataaggcgggttgggggtagtatgtgtggaaggcattctgagaagaagagtagcatgtgcaaggtaggagtaagacagaagaacccaataacaggacaggaagtaagccaacatggccaaggctacatacagcagtgaatgaacaggaagagatggtagaaaaataggtaggggagctctgggacacagtttttgtgagtaaaatccacatgccatgcagagtccctaaaagcatttgtctttcagagaatgggagtttacaaagaagattagagagaaccagcactaaaaagaaagagaggagccagamgctctaggaaacctctatcttcagtccttttggaggactcagtgggagtctaggccctctcagaatactaagagatttttctccaagtgatcctggtgaggggggccagtcatttgtgcaacagaagaaggaaggcaagaatatgattgcactgtccttgcaacaagagcaaaaagaggaaaggcagcatcaatctcagaaggccatgagcaaaccaaggtcctgagaactaaagttccccctgcagagtcagtcaggcacaagaggaacacatgagggagaatgacagcaacaaaagcccttcctttgccaaatacatgttacatttttagggtgaaattatgtaaaatatatgcattgtaaaggcctatytaaaatcctgtatttccacagtgttctggtctcatataaagagaattcatacttgaggtttagcactatctgtaagagtcaaataataaaacaaaggttgcacaattttctacaatctcaaactgcttcaaatgctgatagaggtttaaaaaaactgttttagcaagcatttctagcactgagacctacacagtacaaccaaaaattttaatttctgtaaaggtcaggagtaaaatatgcttaatttttaaactcttcaagctgaggccagacatcacatggtgggaaaaaaaaaccttcaaaacaagattgaagcacaaacaactaattgttagggaatgcatatatacatgaggacactgatgctgtggtacaaggctgagcttgtaaacctaagattagactcacaaaaaatctttactgcattctgggcagctgtgatccatgttaaaaaataatcatgttaccctgaaaaagcaggaaagactccatttccttacagattgtcccttccatttagacttctccaggaactgcagtcatatgtaattgaccaattctggatcatgactgaaaatgtcaatatacagctaaatctacaaatggtatctgtctcatgttccccttacttattggaaaaactcagagggtggaaatcctttacaggaaacaagataatcaactatctttgttaaaacatgtcgaggacagtgttatctcattattcttagtgtttttgaagtaaaagctgccatcacttccgttagtataggattaatggtcaaatctggggatcactgaccttgaatcacactaactttgacctcatgtatcttttaatagaactgatggttttgtaaataggcttcttaaatcagttgtcaccacagcctcagaaaccatccacataaaagaacacactagaaaaactggtaatttctttattaaaataaataggtgaatgctctgtaagcaaaaaatcaaatgcagcaatcatctgtacctcctacctgggttcctgattctgtatrgacagttcatacttctggaccagttaggtgacttgatagcacctcagatttaaagtaccccaaagcaaaattatagtgtctcccattctgtcttctgtaaggtttctcatgtttgaggacaacaggatccttttggccacaggggcttgaaagggcagtcaatcacacaaccaaacttcctcttctcctcctacacacccacatgaaatcagtaaaaatcgccttttgttccttttttttttttttttttttttttttgagacgcagtctccctctgtcgcccaggctggagtgcagtggtgtgatctcagctcattggaacctctgcctcccaggttcaagcgattctcctgcctcagcctcccaagtagctgggattacaggcgcatgccaccatgcccggctaatttttgtatttttagtagagacagaatttcaccatgttagccaggctggtctcaaactcctgacctcaaatgatccacgtgccttggcctcccaaagtgctgggattacaggtgtgagccaccatgcccagcctgtttctatctttaaaaggattcttgttctactcactccttcctattccctctgcacactaagattcctaataagttatcctgcaacttatgatacaccacatctaggtgccattcctaaagcgtggctctaatcacatcactgtgggtcaggaaacagcactggaagacgggatggagtagagtgacagaggagagagaatgaatttacgaatgattttacatttcttttgtatacttttttgtactttccraattctgtataatgagcaagtattactttctaatggagatggagaagggcataaaaagtcctcctaagtttctccatattacctggagaatatagttcaaacatgcagaaagacatccaaagtcttctaagatctggctccagcatacatggccagccttcacttagcactactcttcctttcactcatcctatcatccaaaaattgttactattttgttatatgtttgctaagctttctttcatatttgttggtctctcctatagatttattacattatgctatatattgtatttatctgtgactacagtttttattcaaataaatcagccgctttggagtgaggcagagtcttatctttctatcacttaatgttcacagtacaatgttttagaagcaatgtgtctttaataattgtcagtgaaacatttaaggttggtgccttaaatcagaaccacttctgaacaaaagaaaagtgacctgtgagaggcaaaaactcacaaaaggataataataaaatttataacttcaaaacaaagaagtcttatgcatagttcaggctgtattctagaagacatgacttaataacatagatgtaatgtttatgtcaggaatsaagtattaccaaaaaaggaacatttgttaatattaccaaaattaatttttgtatcatatggtagacaatataaaaaaagacttctctccttttgatgggtaggtttttcctggcaaaaaattttataatgtttccattttttgatcattttaatgtgactaagtagagaatctagtttggaagaactcataatttacttttcaaatgtattttgaaatgctaaaataaaattgtattagaaatgctacagtcaagggtaattagctttactgttgtggatgaaattgtattatttgggtcctcaggttgaaatacagagccggcaggaagaattaaaatgcttacaagtatttcaattgttgctggagaatggatttaaatatgtaaatatataaaagtggttggctccctttgcagccttgagtgcagcacctatctttaggtgatgtagggtcaattagggctttaatgtcccacaactgtggcagatttgctgattaaaatatagcagtcacttttacagttttgcattctagtcatggtggtctatcctgagaaagtctatctgttggtgcctgtcctctcccgagccaaaaaaacaaaacaaaataaaacaaaacatcatcccatgtataagaactcaagtctaccaaaacctgttggcatggcatgtcatctccacctgccatattgatatcgggaaggtaaatacatatgccatatgtcttaaacaaaagtgtagttgcactcaaatgtccatttgcttcttacaagtcaccctgacatagacaaagcaattatagcaacacagtttaatacaggagagaattaagcctcactctctcactttggaagaaaccaaaacctcttccaaattataggtctcaatttcttgaatatcttggaactttcctatgacaatatcctccaatattagatgactatcctcttgtctagaacacctgtagtcctttcgtacttatatgccgcatttcatttgttaatgctattttcttgtttaaatctgccatcttcagcacaggactagtgtcttacttccactgtatctccaaaatttggcattgtgcctgacagaggatctactcaacaggtgcttacagggagtctgcctgataaaagcagttcttttggaagttctgtaactccctttaatatgtacttcattcattcattcaaacagctgttcaagatttcagataagctgacaacatgagcaaaggaatctttttcactgtctggtmcaccctgctggcttccactgtaagcactggtatttagggcatccaagattctggcagcagctaaagttggcataaaaatgcaacacagagaactagtctttaatcaaaaaaaaaaaaaaagcgtgtagtataagatacagacaagaaaaagctgctcctctgatggctgtgcctgttccagtgctggctctctttccactcctttctcactaaatataatgtaaaagtatatccatcagctgtcatcataagaattgaaaagattttaacagtgactattgggtggtcagtgagattgtatccactctgtttacaggcaaatagcagacytgaatggcgttttccttcaattctgttcaaaaatgcctaaagagagaaataacaggtaggtgataatgaggaggtgaggaaaaggagaagtgcagctaccatcgagtgattcttctgggataggtgtctcatttaaatctcataatcatcttttttggcaggtcagtcaacttcaggctcacagatgacagacagttggcccaaagacacacaggaaatacataagtgacaacgaaatacaagtccatgaattaaaaaaccatgcttttctctccttgccacacagctttagtttgaaaaaaaaaaaaaagcattattaacgcaccaaatgccaaaactaaaataagcacccctacatagaataaacaacacatgccctgcccccacaactgcaaagggccataaattgaagggggtagagattcaaacttactagtaactaaagaaatgcaaattaaattacataagtaatttttcatctacaaagatttaaggctggtcatggtggctcacgcctgtaatcccagcactttgggaggccaagacgggcagatcacttgaggtcaggagttcaagaccagcctagccaacatagcaaaaccccatctctactaaaaatacaaaaattagctgggcgtggtgtcatgtgcttataatcccagctacttgggagactgaggcagaggaatcacttgaactctgtaggcagaggttgcggtgaggtgagattgtgccactgcactccagcctgggtgacagagcaagactctgtctcaaaaaaaaaaaaaaaaaaaaaaaagagttaaaacaaggcaaagagacagaccaactcactctaatacactgtgaataaaattttaacaggcataactttctgggggacaaaaatattgaaaactttagtataagctgacctaacagattctaacagtttaatgaaatcacagatatacagaaatatttctgcacactgacattaatcacaacattactttaaaaagtaaaaaaaatcaagtccaacagaacttaaagaagaaaataaaaatttaaaagaggaaaaacttggaagccatctaaatgtcaaaaaggaagggttaaagaagtggtacattgatatgatggaatatactgattcttatagatgtatcctaaaaatcatgctctataaggttattcagtgacacagaaaatattcaaatatttggtatgtgaaaagattataaaactacatcagtatgtacatacatgatcccaattatgtaaatacatatagacatcataatttctggatgctaagattatgaatgatttttttctttttctttttttgagatggagtctcactctgttgccgaggctggagtacagtggggtgatctcagcttactgtaacctctggctcctgggttcaagcgagtctcctgccttagcctcccaagtagctgggattatatgtgcacaccaccacacctggctaatttgtgcatttttagtagagatggtgtttcactatgttgaccaggctggtcagaaactccagacctcaggtgatctgcctaccttggcctccaaagtgctgagattacaggcttgagccatcgtgcctggctgattttttattttctttatagttttctggattattaaaatatagagctttggtaaatgttatcttaaaaacgctcattacaaaaccatgaatgatcaatgggcataagtctttccatacactataaaagcaaatttgtctatatattaacttaaaatatatgttaatagcacttccagtgttcatttacttagtgataactgatgtttacaatgatgagactatgatacaaaaagaccttgtattctataaatttcaaatgcaaaataaaatcaggcgtttttttttaataagcttgtatttgccaggcagtaaactgaaactatgctttgcagttaagctgtcattcacccctcaaaaaaaggattagtgagtgttgaccttaaatactaaaaaccaccaaagacttgatccttaataacaaagggaatctaagatctcacttcccatttaagacagcttagttactgggacactttgattttaattctcagactatgttataggaaagtccactgtactttatcttctttcagacatttggctgagggtctggaaaactactgctcatgctgagaaacataataataataataccatgcttcagttgaaatttcctgagcttagttcacaatggcttttttagtatgtgtgtttgtgtggaataatctgtcatatgacaacagaagaactagttccctgagttacatctatagatggttctagcatattgattagtctaaagaataaaactttatgtaaaactcagtaatattataagttagtttaattcagaaaaaaaaaaacgagcttctaaaatatacagttgcagaatgttataacccaatgggagctgagcaattacctaagtagggatgaaaagaaccacaaggcatgggactccgctccctgtggtggattatccaggtgaagaatgtgaggcaagtgcagccatcttcccagaatctccaaagcagttaactatgagatcaatttaagggaaggacaaaagaaacgtatttgccatatctggtctaatcttattttagattcaaggaaagaagtacacattcacacagctattcaaagcttatgttagaaaaaaattccagatacagagtattcttgatatatctaccttgtattctttcagaatggttctctataaaaaagacaagcagcaaaatgagtcctttcacatgaaagagatggagccctcttgtattccaatttggatgctgcagttacacctcacatataaattgtatgcattaaaaagcatttgaaaagaaatgtgtaaaagtggtagtagtcattgtaaagtagctggagtactaatttgctttattgtgtttaagattctcatattttggttttctatataagaaaatagaaatgagaaatttcacttaattttctattgaaaaagcaatgcattagcattcctacttataaatagacgttggcatggtgactcagaagatctgctcttccacttgtgttatcttaagtaagttgacctttttaggcccacatcttcctcatctgtaaaaacgaggggagttaagtaaatgatctccaagatcacgttcagctttgaaattccaaaactgtacctacaataaacctgctatttgagagtagcaaattatcactgcattaatgttttccagtctcagcagtaaatactgactaaaagacaagcaatcaccttttcccagctttatttttcaagggaagagatatccattagtgtatgcctccaggtcctcccacttactcacatcaccccaggcaaaagtgatttacttgtctggctggtcccttaggtacaagaaactgggcctgtgtaacaacctcctacctagtatttaactggatactttgatctctacagctctaacttttgtcttacctctcaagtagttcagaattagtcagagaaaaaaaatattgttcaataggcttctcgaacttccaacttccaaaacaatattcagttaacacaagcatttgcaatcacgggtgtgatttttcctctactatctttaaactgccctgattgcatggtggttttcccagtgccatgaacttcagtgaaactttccaaattcaatgttagaaagcacataatactgaacaccatggtcctttaaaaaaaaaatggagtctcctataagggtaccaccatatattttaaatcagaggttgaggtccaatatattccaccttctttaaaagcttgagtttctttcctcttctcccaggtgatgaatgctcttctcattgataaattatattgactattacatcccaattctcagctactactcaagtaccactctaatcataccaaattgtttattaggattctactctgattaaagagccaacatttctttttcttggtttcaatttttaaaccctccaagagcttcttataagccacagaataaagctcaaacaatatagtgtatcttgcaagattttattttttaaaattcttatttcccatcttctctctgacacactcttactggtatctccagaaatctcaagatctcaagctacttaaagtgaacagaattccctttcatgattcctttttttttttttctctctctcttttttttgagatggagtctcactctgtcacctaggctggagtgcagtggcacgatctcggctcactgcaacctctgccgcccaggatcaagagattttcctgcttctgcctcctgagtagctgggattacagacgcctgccaccgcacccagctaatttttgtagttttagtagagacaaggtttcaccatcttggctaggctggtcttgaactcctgacctcgtgatctactcgcctcgacctcccaaagtgctgggattaaaggcgtgagccagcggcacccggcccatgattcttcttatccatccaaaaaactacttatccttcaaggttaaatgtagacatctatccttttactatcaatatttcatcatgtttcactttttccccatcagagggagttcttcaagcattacgcccatgacccagcaaaaacactgacccatattagagattccatagtactgtgaatgaagaaaatttactttatttgtagtttaaaattatagagactaatacttctagtaagctacaattcttaaaactgaagtatttatctttatataaaacattgagactatttgattagagaaagagaaatctaaaacgggttagcaattctcatgagataaaagtaaacatctgagtgctatacacccatatctaaattatgtttatttctgtgtcttaaagagtgagaaactattacagaaggcagattcacaatcgtagcgcaactacactaagtgtgttaggtggcttctcagaatgaaattaccataatttgaacactcagtaaaatgggtcagccttatgcttttggctttctctctctctttcttttttttagaaaatccatcttttatttacttgtcttattttttgagacagtgtctcactatgttgctcaggctggtctcaaactccagggctggagagatcctccctcctcagcctcccaaagtgctaggattacaggtgtgagccacttgctcccgacctaaactctcttttctgaaccaaaatagcattttcatgaatttcactgacttcttgtctaaactagcaactactttataagttatgttcactatcttccttgatgtgattttcactgatcttggactaaatttcaaatatgagtgctacatgcccccttttgagtctccaaattttagtatacatattttatcagtgaagtgcagtagaaaagaataaaagtaaacaaaagagtgcttggcctagtgcagcaaaactaggagtaggttttaagaaaaacctttattccctgtttccccattctagaatttagaactgactacaaagtccccttagttagtaatcaacaaactctatagctgtaaatgttgcaaggaaattcaagatattttggcaataaaaaggcaacagactaaaacatcatttgccaagttaagattcttctccaaatctttttcaggtaaaacacttatttatatttgtgtcaaaatttataacacagtcaccccaaatcttttttaggtaaaatgcttacttatatttgtgtcaaagtttatgacacaatcaccctgttttgatttaaactacctataaaatatgtgttaagacataaaaatcctaaactaaaattccctaatgttttgttgtaaaaataaaaaccacttctacaatgtgtagagcaatatgtactacagtctattttaaaactattctaacataagatgttaacaattgaggaaactgggtgtggagtatataggaattctctgtactatctttgcaggtttcctacaaatttagaactattttaaattttaatattattttggaaaaaatttgggggagaggaattggttacttacataaaataaaataaatttaaaaaaagaaaaaaaacacattaaattatatccctacctcacgtcatacagaaaataaattccaagtggattagtgtattgaagacaaactgaaaagcaaactcttaaaacctttagatgaaattacacaagaaaatgtttatggtcttaggaagatttttaaaacaaaaagaaatcaaacattaaccattatgatagtattaaaatttaaaactcctgtattataaggaaacatataccaagtgaaaatacaagttataaactgagagaatatactaataaaatgctattcacaatgtatttttgggctgggtgcagtggctcatgcctgtaatctcagcactttgggaggccaaggcaggtggatcacttgaggtcaggagttggagaccagcctggccaatatggcgaaaccccgtcactactraaaatacaaaaattagccaggcattgtggtgagcatctgtaatcccagctactcaggaagctgaggcaggagaatcgcttgaacccagcaggcggaggttgcagtgagccgagatcgtgccactgtactcagcctgggtgacagagcaagactcaaaaaaaaaaaaaaaaaaccaaaaatttttttttcttttttgctgagcgcagtggctcatgcctataatcctagcgctctgagaggccgagatgggagaatcgctaagtccagaagtttgggttagcctgggcgacacagtgggatctcatctcttgttttcctctttttatgagacagctctcaaattcatataaataagagaaataaaaatcaaacaaaaaaatggggctaagatataaacacatcattcacagaaaaggaaaatctaatggttaataaacacatgacatagggtcctactttactagtaataggcaatataaattaaaacactgaattccattttacatccattggagaggccgagtatgggtgagaatgtggaaaaacaggaactagtaaatcatgtgagggtgggtatggcccagtgataagtaatgtgacaacagacactaacggtaaagatacatatacgaacctaaaacctggctagttcacatggagacacacaacacagagaaacacttgctcatgtgcctatgtaaacgtgcacaaggatactcactgcagcatggtttgcgatggtgatgaattataaacaatcttaatgtccataacaagaaaatgattacaaattctgtactattcatacaatagaatacatgtactaactatatagattacaactaagtgggctatggctcatgtatcaataaagacacatctcaaaataaaaaaattcaacaaagtatatttatctgacaccatttataacaagtacaatatgttgtaaaagaatataaaatgcttggtaactaaaagcaccaaattcaaaagagtgattacttctgggaagggctacaaaacgattttatattagggagtgaacactgtggaaatctaagtctgtaatattatatttctttaaatagaaaaatacaaagcaagcatgaaaaaaattaaaattttacaaagctaaatggtgggtacccaagttgtcatactatatgttctatgttcaaaatcctttataataaaaatgtgtaaagataaaacttggcaaaaataatttcttagtgacgtttagcctattttttcaagatttcactattaaagttaatttttatttcatcatgtccttctaagttctctgcccttaggtatatcatccttatgtaaatagcaacagactgacttctctgtctacatccaataactcagaatttttccctaaacttttctttcaacatgggcattaaattttgtgttagctcactggtaagtggtaacacattgttcttttctattttaataaactgatgcctatggcatatacatgctatctaagtatgaacaattttttaagaactttaaaaagatgtctttgccttgttttctagcatacaatattcctgataagaaatctgctgtcgtctttatttttattcctttctgtgcaatgttccctttgtctctggctactttcaaaatttctcatattcactgattttaagcaatgtgattatgattgcaacttggtgtagttttcatttttcttgtggttgggttcattgaactccttggatctgtgaacttagtgttttcacccaattcagcaatttttcagcattatttcttcaaatattttttcatccctcatctactttttggaacccaattacaaatatatttcttgctgctgttttattgtggaggtggttgagattgtttgtttagagacttctacactaaagtctatattccctgtggtacggagcctccgaaatctctgcttgattagcttagcagttagctaagctggaacgacctggaaccacctggaaccactatgtttcctagtctttgcagcagagctctgaagtgttaaggtacacttttgacaaagttcaagacatgctaccccaaaatatggcaccttggaagttgaggaaacagcagaagcaagaggccacttgaaccttcccctcctcacattcctccctgaaacaggccataagacctaggttactgtgtaaccttctccctcccttctcccttgaagaatgtaatgtgacaggtgtcttgccctataccgggggcaaggaatgtcacacagggacaagaagaagaatctgaaaaaacagacattgccaagttcccctagtttattatcattagatcatacccttttgtcctccaatcatagttctgcatgactgtccataaaaatacacagatttacctgtttctctgggtcttcattcctgaaggctcctatatcacataaaatatatacaaaatatatatgcttttctcttgttaatatgtcttttgttatgggaccacagccatgaaccttgcaatgggtgagaaaagaaatcccggctgggcgcagtggctcacgcctgtaatcccagcactttgggaggccgaggtgggcggatcatgaggtcaggagattgagaccatcctggctaacacggtgaaaccccgtctcttctaaaaatacaaaaaattagccgggcgtggtggtgggcgcctgtagtcccagctacttgggaggctgaggcaggagaatggcgtgaacccaggaggtggagcttgcagtgagccgagttcgcctgggcaacagagcaagactccgtctcaaaaaaaaaaaaaaaaaaaaaaagaaatcccttccaccctacactttttttcttttttaagagacaggatcacccaggctggggtgcagtggcatgatcatagctcactgtagcctcaaaatccagggctcaagccatcctcccacctcagcctcccaggtagctggaattacaggcacacgcccccatgccatgctcattttaaatttttttgtagagacagtgtctcgctatgttgcccaggctggtctcccactccaagcctctagcagttctcctgacttggcctcccaaagtgctgggattacaggaatcacccatcacaccaggtctctaccctctacactttaaatgtgcaccaggcagcagacaactctgccttagcctccacttctggcttacacagagcctcaaggtcagcctaaggtgagggccttcttaggtattttccgagcatgctcacagctctacacatgcatgtaagtcttctgaattcccaagaatgtgtcagaacttccttcaaacctcatatgaacatctaattccccagcttctcctattaagttttttggttagccctatttttcgttttaactgctatctactagtaagacagcagaaacgtaaagcaagtatttatgacaaacacccctctttcacacctcgccccaaaaaaacaacgtgttagcactgagtcaggtcaaataaaaataatctttgtgagtggggttatccagacaatcaccacacaggtcaaacaatgacaattcaatgaaaatgggatttytaaggcaatccaatactataagccccctgaagtggctgccaaggtggtggttttcaccgtgatttcaggctgttggtttcaaggctatcatggcactgggaagtttgttgggggcaggggagaaggtaaaggtaatagagcaaattaaaatcccactaaatttgctgttcttacagagcttatggtcattttccttaaatgcttcataattgtagcaagactttggttaatttccaaaattctgaaaaaaggtgactgaccattttgccagtattgcttttatgaagaggagcatttccagagtgccttatcccaccattcccgctgatgtcactacatatttggccacttaagttacctcatggtttactaatgcacctttcagggagttcctccccagtcatttttattctctctgtttaattttggaaagtttctatagctgtatcttaaatttcacttaccttcatttgttcactgtctaatgcacagttaattccatccagtacatttttcatctcatttttcattatagtgcttatctctagaagtttgatttggacctttttcatagtttccatatctcttcctaatacgtttttctctagcacctcaaaacatatggaacacagttaaaataactattttaatattcttgtatactaattcttccatttatgtcatttcagggtcaattttgattgatttttctccttgttatgctctttttaaagtccctgcctctttgcatgcctggaaatttctgaatgaatgtgaaatattgtgaattttaccctgttactgctggctatttttgtgtttctacaaatatccttaagcttttttttctgggatgtggttaaattatgcagaaagtttgatccattcaggtcttgattttaagctttgttaggaatagatgaagctacatacccttctgaattaattgattctagtcttattctttgtctttgagctttttctcaactctttgtaaacaatagttaacaagcagatatgtaaattgacctgcctgataatgttttaattgacatcttaccccatatggaaaaatagttttgttccatgtgcaagtcatctggacatttctttatctcatataaatctctgctgttttgactttctctgaacctgttataacatctacttcgttctgtaggaaaccagaatatgccacccaaaaatatgactgtaggagaccagaatgccaccctaaaacatgcctcttttgcatattgattattttgagaaacagcggacacatgagaagctctaaaaacagagtagaagtatagtttgaagtcaggtagcgtgatgcctccagctttgttcttttggcttaggattgacttggcgatgcgggctcttttttggttccatatgaactttaaagtagttttttccaattctgtgaagaaagtcattggtagtttgatggagatggcattgaatctataaattaccttgggcagtatggccattttcatgatattgattcttcctacccatgagcatggaatgttcttccatttctttgtatcctcttttatttcactgagcagtggtttgtagttctccttgaagaggtccttcacgtcccttgtaagttggattcctaggtattttattctctttgaagcaattgtgaatgggagttcactcatgatttggctctctgtttgtctgttattggtgtataagaatgcttgtgatttttgcacattgattttgtatcctgagactttgctgaagttgcttatcagcttaaggagattttgggctaagacaatgggggttttctagctatacaatcatgtcatctgcaaacagggacaatttgacttcctcttttcctaattgaatgccctttatttccttctcctgcctaattgccctggccagaacttccaacactatgttgaataggagtggtgagagagggcatccctgtcttgtgccagttttcaaaggaaatgcttccagtttttgcccattcagtatgatattggctgtgggtttgtcatagatagctcttattattttgagatacgtcccatcaatacctaatttattgagtttttagcatgaagcgttgttgaattttgtcaaaggccttttctgcatctattgagataatcatgcggtttttgtctttggttctgtttatatgccggattacatttattgatttgcatatattgaaccagccttgcatcccagggatgaagcccacttgatcatggtggataagccttttgatgtgctgctggattcagtttgccagtattttattgaggatttttggatcaatgttcatcaaggatattggtctaaaattctcttttttggttgtgtctctgcccggctttggtatcaggatgatgctggcctcataaaatgagttagggaggattccctctttttctattgattggaatagtttcagaaggaatggtaccagttcctccttgtacctctggtagaattcggctgtgaatccatctggtcctggactctttttggttggtaagctattgattattgccacaatttcagagcctgttattggtctattcagagagtcaacttctaccaggctacagtaaccaaaacagcatggtactggtaccaaaacagagatatagatcaatggaacagaacagagccctcagaaataatgccgcatatctacaactatctgatctttgacaaacctgagaaaaacaagaaatggggaaaggattccctatttaataaatggtgctaggaaaactggctagccatatgtagaaagctgaaactggatcccttccttacaccttatacaaaaattaattcaagacggattaaagacttaaacgttagacctaaaaccataaatacgctagaagaaaacctaggcattaccattcaggacataggcatgggcaaggacttcatgtccaaaacaccaaaagcaatggcaacaaaagccaaaattgacaaatgggatctcattaaactaaagagcttctgcacagcaaaagaaactaccatcagagtgaacaggcaacctacaaaatgggagaaaattttcgcaaacctactcatctgacaaagggctaatatccagaatctacaatgaactcaaacaaatttacaagaaaaaaacaaacaaccccatcaaaaagtgggcgaaggacatgaacagacacttctcaaaagaagacatttatgcagccaaaaaacacatgaaaaaatgctcaccatcactggccatcagagaaatgcaaatcaaaaccacaatgagatagcatctcacaccagttagaatggcaatcattaaaaagtcaggaaacaacagttgctggagaggatgtggagaaatagaacacttttacactgttgttgggactgtaaactagttcaacccttgtggaagtcagtgtggcgattcctcagggatctagaactagaaataccatttgacccagccatcccattactgggtatatacccaaaggactataaataatgctgctataaagacacatgcacacgtatgtttattgcggcactattcacaatagcaaagacttggaaccaacccaaatgtccaacaatgatagactggattaagaaaatgtggcacatatataccatggaatactatgcagccataaaaaatgatgagttcatgtcctttgtagggacatggatgaaattggaaatcatcattgtcagtaaactatcacaagaacaaaaaaccaaacaccgcatattctcactcataggtgggaattgaacagtgagaacacatggacacaggaaggggaacatcacactctggggactgatgtggggtggggggaggggggagggatagctttaggagatayacctaatgctaaatgatgagttaatgggtacagcacaccagcatggcacatgtatacatatgtaactaacctgcacgttgtgcacatgtaccctaaaacttaaaagtataattaaaaaraaaaaaaacagagtagaagatactgttttgtaagggaaacttagatctatgaagaaaagctccatttgtaagagtatctccctctgtggcaggaaatgaagaattactaaatcataagagactcctatcaatggagaaggcactgactcaaatctgcataacaaaccttactcttcaccatgcttttcctggtcacctccccacaactggcctcacacacaacctttcttcgtttttagctgaagatgttatttaaatctgaatcctagctatctctttgagatttaccattatttcttacatacctcccttatatacaagaggtgtacatattaataaacttctgtttgtttgttttttcttgttaatctgtctttgttattgggggggcagctaacaatgcagaggatataggaaaaattattttttcctcctctacagttccctcatattatactatggaaagaaatcctttaatgtgcattcactcttaaatctgtataagagatacatttttcctttctcttaaaaattatcttttaactcagtaaaataacaaaagtcaaaaagatgagggggaagtcaagggattaaaaaaatggaagtaaactaagatcctcatattcactaacatgtcggtaaaagtctactgatttttaaaaatcacagattatataaattaactgtttgaagatcactacttaagtgaaagtaacaaagacacagaccacaaagcgaaaaccagaaaacaaagtgattaytagaaacaaaaaaataaaaagaagttgatataattaagagcaaacatttatctcataacaatcattgcttactgaagtcagatatttgagggaaagaaaatttcagactaaattaaaaatcaaaagccaactctatatttacacaagtggcttattttgaataaagtcattctaaaaggttaaaagtaaaatggcattatttgaaaggaatcattctgtgaaatcagacaagaaaaaaaataaaaggtataaacattggaatgaaggcataaacgttggaaagaaagagataaaactataatttgtaaagaatataactaaaaaataaactggaaaagattagcagtgtaactaagaagtcaggttataaaactagtaaacataacctaaagccattttcatatatatmcaataatgagagaaaataaaatgaaagaaaatatctcatttctgattacctcaggaattaagttctatttaaggtattaagtcctactgaactcagaaactccaatggattctcacaaaataatgaacaaatactatttttattttgaaatatgacaaaaaagtttaagtttgcctggaaaaagtacacactaacaaactaaaaattttttaataaaaatagtattgggggagagcagctagatataagagaaaatttaaagttttgtaaacatacaataattgttattactagtgtaggagtagacagattgatgaaacagagagtccagaaagatccaaattcaaatatataaaactttggtttatgagatayaaaatatgtcaaaataatgaagagaaggtggattatacaataaatggtattaggaaattatgctaaccttatgaagaaaaataaagctagatcctcacataattactttcaccatgtgagtctgtgaagggaatcagagtaggccattgcaaaatatgccactttagactaagaactgtgtttaactaaaggcaattgttctgtgacctgcaacattctgtctaaaactaggacataggctgagtgcggtggctcacacctctaatcccagcactttcggaggccaaggtgggaggatcacatcagcccaggagtttgagactagactgggcaacagagtgagacccgatctgtatgaaaaataaacacaaaaccaggacataaatttcctttcgtaaagatgacatatttttccatttgtgaaggtgttctcctcttccatatcagaaagacgacccctaatctgcaaaacaaatcttagtaaacaactcttaattactatacattttctagttactttcccacaagttacccattgctctgccccacagaagccccaaacccctttcctttgtctagctacctctccatacatttttttttgagatggagtctcgctctgtcgcccaggctggagtgcagtggcgcgatctcggctcactgcaacctctgactcccaggttcacaccactctcctgcctcagcctcctgagtagctgggactacaggcacccgccaccacaccaggmtaattttttttgtatttttagtagagacggggtttcaccgtgttagccaggatggtcttgatcccctgacattgtgatccgcctgcctcagcctcccaaagtgctgggattactttacaggcatgagccaccatgcccagcctacctctccatactttatcaccttttgttaagttggtatataagccccaaattctaaccacctccctgagtcacatttcgtcatgaactcccatgcagatgtattaagtgaatgtttttcttcctggtaatgtctttagtttgattcctgggttctagactctgaacttaagagggcagaagatgacttttttttcctcccctacatttttagtagatctaagatttaaaggtaaaaataaaattacaagaggatctaggaacagattagtgaatctttttaaatgtgatcctgtgttggcaaagatattttgaagaatgacataatactcagaagcaataacaaaataacaaatataagaatctgaaaacataaaaattggaacaatctatatgactataaaggaagagaagtcaataataaacagagaaaattattcatggcacaaatgaactagctaatggttattttacaacaaagtgttctttcaaaagcaatatgaaaaacattgataaaccaatagaaaaatgaaccaattacatggacatgtagttcatgagaaaaaaatacaaatgtctcaaaaatataaataaatattcaactccacttacaatatatcttaaaacaaaaattagcattcatcacctatcatattattaaaacttaaaaattaagtgatacttagtattggagagagtaggaggagaaaagcaatctcacaaacctgaaggacaatttagcaacacccatggaaacttcaaatatgtagtctttgggccgggcacgatggatcacgcctgtaatcccagcactttgggaggccgagacgggtggatcacctgaggttggaagtttgagaccagcctgaccaacatggagaaaccccatctctactaaaaatacaaaattagctgggcgtggtggcgcatgtctgtaatcccacctattcgggaggctgaggcagcagaatcacttgaacctgggaggcagaggttggggtgagccaagatcgcgccattgcactccagcctgggcaacaagagagaaactccgtctcaaaaaaaacaacaamaaaaaaaaaaacaaaaaaaagcaatgtagtctttgacacaggaattatacttctaggacttcatcctatatatttacttcacaagtacaaaatcctaataataaagacggtctttgcagcattgtttcaataatataaaatagggaaataacacgatggcttgtaatgggggatcaataaattatagtaatattaagatgggatagtctaaaaatattagaataaatttatattctcttacataaaaaggtaacggctaaatacaatgactctattttgccaataactaagtacttttcatacacaagtttactgaaagctcacatcaactctatgagatagacatttgtattgttcaccacgctaagcatgaggaaactgagacacattaagatgtgaaataactttcccaagatgtcacacatagtaaacgtgggaattggggttcaattccaagcagcatagctgaagatactgtgcttctaacctcattcatcattcttacaacatatcttaaaatgaaaattcatgttgcctaatagcgtgtgtgagtgtgaacatgcttgtataatattttttgtttaaagaagttatgggctgggttccatggcttatgactataatctcagcactttgggaggctgaggcaggaggattgcttgggcccaggagttaaagaccaacctaggcaacacagcaagactgtctctaccaaaaaagcaaaaaaacagtatttatttatatatatatgtatttatatatgcatctaaaatttctagaagattacaaagaatatttatcattagttcttctggtgtgtgagccttgacaaaaaaaaaaaaaaaaaaaaaacttatttctttcaggtattgcattgaataacagtgcaaaatcaaaagaaactaattgtgtagaaattaggtaaaaaataaaacaattgggataagcatcaattaattttagagaaaggtagctgcaaatgtgttattaagttataaaagagacaggcaaaatcattaaaaagcaagcccttggcaagaagtctttcaagaaagtaagttctaaaacaactataccagagtcaaatccaaagttactcttatgctatgttctacatattccggtagctttacatgtagctataattaaaacaatataaattcataatataaaccctgaaatataaaagtaggccaggcagagtggctcatgcctgtaatctcaccactttgagagaccgaggcaggtggatcacctgcggtcaggagtttgagaccagcctggccaacatggtgaaaccctgtctctacaaaaaatacaaaaattagctgggtgtggtggtggatgcctataatcccagaaactcaggaggataaggcagtagaatcgcttgaactcaggaagcggagctcacagtgagccaagattgcaccagtgcactccagcctgggcaagagagtgagactctgtctcaaaataataataataataatattattattatattatatataacatattataatatataatatatataatatatatgcaatatataatatatattgcacatatatgctatatatggtatattatataatattatattatattatataacttatattattatatataataattattatatatataataattattatatataataattataaatataatatataaatatatatattwaatatatatatttaatataatattatatattatattatatgtaataaatatacatataatatattatatattatattacataatatataatatgtaatataatatataatatatattttataatatattatatattataaaatttcaaaattttacattttttaaaaaatcactaatatacttaaaatttcctataatgagatattgcctgctaattctgacagacaccgtaatagcatgaaaccatttctaagtatggtgacttagttttatgagtcctgaatacatgtgaatcaagtgacaatctttagtgtatagtcacaattgaaaactaccttccagtttgagatgaatcataaataaatgtccctgtctcctctttttccccttgatattctcacaaataataatattatataataatataacttatattattatatataatatatattatataatacaatattattaatttttataatatatattatattatatattattatataatattatatatttagtaaggcaaaagctatgtgtattatacaaatatgagtttataataaataagaaaataaaaagaacagtttccctttaaaaagaagtaagtaacaaaagagaagtttggttaatatattatggatttaacatgaatatacatatttcttttataataaacctagttaataaaatagaatttgttcatttaaattaaacatgacattatggttcacttatgtaatataacagtaagcagccattaaaattataccacagaacaatatttaataaaatgggctgctcttttaaatatgatataaagtaggcaaaagactacaaaaaggtagataaaatacgatcttttagaaaataaaagcatatgtcttcatagggaaatagcctggaaatccaatttcaaatcgtaatagtgtaataattaacactgggtagtggggctacaaaaaaagtttatttctgtattttctaaaacaaacatgcttttatattaaaataattaccttaatgtatttcataatgtaacattaaataatacagatttaaattttactaagcatattctttcttttataataaaacattttcttttaattttaaaactactagataatcagctattcaaaatgaccccagatagctaacatttttgtaaactctattttgtgacatttaaaagaaataaaagtggaaggtaagttgagctaagcttttcacattcctcttttcccacgcatccacagtactcctagaactgccacataaaaaaaatttcaactagatattgtatctaggaaaagtaaaatttaaaaactaaaacattcctaaagatctggtactattatacctttgcaaggaactcccgaaatagattattctgtattacatggcctcaatatcaccctagtgagcttgtttcctagtttctctcactatattacaaatacttctgtcccattgctaattcacaacaaagaggatgggctcaggtagttattctccaaatcctaaaatctcaaaattttacatttttwaaaaaatcactaatatacttaaaatttcctataatgagatattgcctgctaattctgacagacaccgtgatagcatgaaaccatttctaagtatgrtgacttagttttatragycctgaatacatgtgaatcaagtgacaatctttagtgtatagtcacaattgaaaactaccttccagtttgatatgaatcataaataaatgtccctgtctcctctttttccccttgatattctcacaaaaaatattcctcaatttttttagccaattaacattaccttgatcatctgaggcctgcctctcttggtgttcaaagtctcaaagtagaagtcattgttcactaatattctctttccatatgatagaatacatataatgacttcataatactcttgaaagaacaaagttactaaatacctataaagtagaattagataatgactctaaaatggggaaattgaaagcataatctgacaaaatgctccaaataatcacaaaaagtctcacttcttatgatcctgaacttagaattttacaagtacatgaattctgacaaaagtcttacttcataagcaaaaacaccttatatatatatgtgtgtgtgtgtatatatatatatatataccagagatttaaaaaataattgaaatttaaattttagtattagtcatttaagtggggtgctctgtatagtcctatgaaatagaaaacaaacaaaaaaagctgtttatttccttccttgatcactggttttcagtaattgcctaaatttgctttcactaaataatttcaagggaaactattacaaggtcatggtgatctatgtttactcaagcaattatttcaacatctctttcttaagatgtatctccattcgacaattttttttcaaacataattaggccagaaaccacctccaattaacacagaaatttttccatgacatacagggaaagaaagcaggcttacaagggtgaggttacatatatgatgtttacccacttgggaatgatttctagacaaaatcaggtgccactggaatgttacatcaaggttaacaaagaaaaccaagtaagccaatagcctggaaacctgtgatatgcacagattttctgtaagtagggctaggaaatgtctttcttgcaataacataatagttgcacccacaaagggaatcatgtatattttttaaaaatgcttgaagacaataagaaatagaagggaattttatggttgtaggctcaaagagtaagaagagatcagtttactgtgtgctaacaacatgaacagcatatagtagtatttcctacattgacaacatgaagctaaaggacatacagtaagctaagtaacatgaagctaaaggacatacacatacagtaagatgtaatggttcactttactctcttcccccttggctgtctcttcgcttggtctctgacaagaacattctcatgaaaaagaaaaacaagtccttagaaacataaagggctttcaagaaatggcaggcacctaacaagaaaaacacagcatataggtggagaaccctgactgctactaatctaacttcaagtgtcaacactgaaaagaacacaagctgactggggagcaagtaactgcaaacaaatacaatggttggggcatattaatatttattaatatgtatatacataacctccactggggtacccgtggagtgtctcaacagtgtcctgatttttcctttcttctctctctccctaaagtacttcaaacccaacctatactcctccttccctctccttccattttaactgccctcccttctgaatgtactctatctaaagtgtagccctacttcctttactagtattaatatttttccaaaagaatataattatagaagtttaaaagccaaacacttaggtttgttatataacaaagtgtaatcctctgccctccccctccacatttctgattcttgtcctccatccctcctttaaggcagtcatacacacactatcctcctcacatgttgggaaaatcattaggtagacagcccttcatatccatgagttctgcagatggctgcatttgtactgagcatgtacaggctttttttcttgtcattattccttaaacaatatactataacaactatttacacagcatttacatcacattaggtattataagtaatctagagatggtttaaagtagacaggaggacgtgtgtgggttatatgcaaatactatgccattttaggagactgatttgggtagtaataaactccagtctcctgcacagccggctctgcatgaattactctttctctattgtaattcccttgtcttgagaaatctgctctgtctaagcagtgggcaaggtgaactcattgggtggttacaaaagcaagtacctgactgctgggcctaggtcccctcttcaccatctccactcaagtgtgtagaccaacatcttcttctagccttccttggtcctacagcccactatccaccacagggatgctgagagcataagctcaatttttgaagggtggtagacatgactagggaagggaagccagagacctgagtttggggctggctctgacattttctacctataaacttaaggctctctgaccctcagtttcttcatcattaaaagaggcataaaactaacccaggctatttggaagttaagatgaatgtcacttttgctttttgtgttttgtttgtctttttttttttttttttttttttcttgagacaagagtcttgctctgtcacccaggctggagtgtaatggtgcgatctcggctcaccgcaatctccacctcccaggttcaagcaattctcctgcctcagcctcccaagtagctgggactacaggcgtgtgccaccacgcccagctaatttttgtatttttagtagagatgggctttcaccatgttggccaggctggtctcaaactcctgatctcaaatgatctgcccacctcggcctcccaaagtgctgggattacaggcgtgagccaccacgcctggccgaatgtcacttcttgtctcccaattcttgctaacagtcgttacttcttaataggcgctgaggtttgcaatattttaggagtttgctggagggctaggccacatatccagtttttttttggttgtttgtttttgttcctttagcaacaaggatgtttatttcacctgggtgcaggcgagctgagtccgaaaagagagtcagtgaagggagataagggtggggctgtttcatagtttgactgtaattttccacatatccagttttaaccaggatctagccagatagccagatctgaggcctagatagaaatttggtcctttgtggaattgcttttactgaacttccatttgtagctgaccagtagttacctgggtatacacaggtgtgttactgaagctgtagaccacctgattgggcactgctgtatttatgagcttcttggagaaattctctcaaacctcagcacttagaaaagaaaaaaaaaatactttgccatacatgagttgagcatccatggattttggtatccgtggggaatctggaacctatcccccacagacactgagggatgactgtgttattattatcataaaagttgtttatacctgagctacttcatgtatataagtatctcttctttctcacacaaatttttgttaactataaagttataaactgtctttgttttttgaataactttttggtgtacattcactaattcagccctaggcattccaaaaggactataaaacttccttcccgccagtgtatcgcctcagataatatattagcttcatgcttgtttgttttccttagacactgtcctggagtcttctgactgttttaatctggactataaactctctaggcactgagccaactattagcctaaacttcacagtcattgtgggaattcccttcacatctctctgctggatcccatttcctggattccacattttccttcttcatttattaattccctgaatttcatggtacacaactccagtagctttctgagaaacagcagacaaaacatatctttaagacactgtatgtataaaaatatctttattctactcatgcatatgattgataattttggtatagaattctaagatgaaaattacttttcctcagaatttttaaggcattgctctgttttctcctttctttgttaaaacggagaaatccgataccatccagatttcccaaccattaacgtggcctgttgtttcccctgaaagttttcaagttctccttatctctggtgcataagaatttctaaatgacatgtcttggtgaaaattcctttcttctttattgcacatttaataaggctttctatctcaatattcactcacgtctagctctaggacaatctcagtattacttgcttgataatttcacttccttttcctctgttctctaagtttctgtgtattagttggatgttggacctcctggattgattatcttctactgtataatttttctctcctattctccatatctactatttctacttcattgggaaattctcctaactttatcttcaaaaatgtaagacatcttaaaatgtccactctccttttaatgtccttttgtcctctgaatatcactttattagaaaactttattccttctacatatagtatcttctcttctattaattataatatttttaaagtttacttctccttcctacattatctccattctcttctactcccatttttcctttgggttatcttacatgtttggctctacgtacttaattctttaagagtgctaaaatattagtttactagggctgccataacaaaataccacagtctggatgacttaaacagaaacttatcttctcacagttaggcaggctggaagtgcaagaatgcaagatcaaggtgttggcagggtaggtttcttctgaggcctctctcctaggcttgcggtctagtcaccttttgtatccacacagtgtttcctctgtgcaaataccgctaagtatgtccaaatttcctattcttataaggacaccagtcagattgtatgacagccaatccaaaaggcctcattttaacttcaccgtgtccaaattcagtcacattctgaggtgctggggtttgggactttaacacatgaacttgggggtagggacacaatttggaccataacaatacatttctataaagttgattggagtactgtgcccttgcctaggcttattaactagtgaatctctttgtaggatgaaaaagtagtgaccacatgagccagtgcttatttctcttctccacatggaaaagcctattttttttccttgaattttagactacctagatgttatcaatctcagctgtctagtaggttaaaaaaattgaaattgtgtagattatctgtctttatccttattgttctgtgggagtgatatcactatgggagtgacattctttctggcttttcacatcccaagacaaagtacaacygagctgtgcactcaaattaaatcactactttggtctgtgcagaagatggatgtttcttgaagaataacagtagtttattgtcagcttaatccagtgatgactccagtcacaacagacaattccattttcttggaataagtcatcaaagcccctgaaaacaggcaggtacctaacaatcttgaaaattccttttttaaaaaaagtaaacttaaagttgtccaaagtaattttaaatcaccatacttactaagatgtatatatctagaataattctgaactagctatctagaaaaaggtgaaaaattaagagtgaattaaaaatgaaagcaacttggggcgaggtgcagtggctcacgcctgtaatcctagtactttgggaggcccatgggaggattgcttggggccaggagttcaagaccagcctgggcatcacagcaagactatgtctctatgcaaaattttaaaaattcaccaggtgtggtggtgcacacctgtagtcacagctactcaggaggctgatgtgggaaaattgtttgagcccaggaggtcgaggctgcagtgagctatgagcatgccactgcactctagcctcagtgacagagtgagatcatgtctgaaagaaaaaataaataaataaaaaataaaaacacttgggctccagtttcatttccacaacatattaggcaggtcaacagtggtaagtcacttacttaatctgtcagaatcatagtttttcaactacagagcaaattaattatgtacctgaagtactataaaaattttataagacattatacaaatgtggttaatttcattatttaaatcaaagatgttacagtaaagtcattttaatatgttataccacatcaaaagttytcattaattctccagattctgcaagcatttaagtgactacacaggttattccataatttacaatttttggcaaaactacttgtagtcaattctcattattcgtggatttcaatatttgaaaagttgcccacttgctaaaacttatttgttacctcaaatctgtagrgcttttttggcatttgctgacaggtcagagtgacaaaaactttgagttgcccaatgggcacgttcccagctgaggtcaaataaggtgcacttttccttcatttttcagctcttattctgtaagcaaatgtcctttcttcactccacttagtgccatactttttgtaagtttgtgctttttgttggtgattttgctgttgagaatatctcctatgcacagtgccaaagtgctgtctagtgttcctaagtgcaagaaggttgtgatgtgccttacggagaaaatactcgtgatgtaccttatagagaaaatattcgtatcaaataagcttcattcaggtatgagctatagcagtatactagccatgagttcaaagttaatgaatcaaaaatgtacattaaagtgtctttaaaaagaaacacacgtgaaacatggttatataatgatttactgatgaaaatgtgaccagaggctggcagggacctaatgccatattttgcaaacaacaatggttctatatgcactgattcagtgttttctgtgactttacagaacttaaataacagcaaataacagtactacagtttaaatgatacaagaaattcttctgaatgtacagagttaaacaatttaagaagtcctagttaactattaccaagataagtggatctcaaaagtccccatttttatagtaaatttataaggctctctttacaaacttgaagtgaattaacatggtaaaacctgcccccacacataatttcaaaacaagtattatgctctgagtaatataaagaaaaaataagactataatttatgttaaataatgtatttcattatgaatacgtctcagactcaactacattagaaaacacatccccacaaatttccgcaactctcctgatgagaatcatccacattcatttggcccttttgcagtttcaagaaaactgtttatagtgtacaagtgcacgccaaagtagcatccaatatgcaaacctatcacatccaaatttcatcacatacacatgtaagaatctgcagcaaatgagaagataaaggtaagatgcacctttattttatttaaaatttttttttaaaaaagtcttgctctgttgcccaggctggagtacagtggcacaatcacagctcactgcagacttgaccgcctgggctcaagtgattctcttgtctcaaattcccaagtagctgggataacaggcatgtgctgccacaccgagctaatttttttaatgttttgtagagatggggtctaactatgatgcccaggctgatcttaaactgctggactcaagcaatcctcctgcctcagcctcctattaaattgctggtattacaggtgtgagccattccctccaccaaatgtacctttaattgagtaaggcacatatacagggtcacacaagattagtttgtgacatgaaacattcttacaataaataaaggaattgttttctcttccatcaaaatactctattagtgatacttttctccagtcattcccttgagtcctctcagacttacagcccaccaattccctgccaagaaatcacatcaatactggtctgcataaaagtttacatggctcagatacatgcttttcctctttttcacattagactttcagctctgcttcatcacaacactctatttgaccagtcaatttccaatggaagtttattttaacaatatttgcaggactgcagctgcaaccctgcagtcccccatctgccatctaacacccacagccgctactgctaccaagcaacactcctcctttcataatagaagaaacatggatatgtaagtgctctatggcagcaaagcctgttatggctattttttttttaaaacatagaagcagaaaaaagtggggcagggtaaagaaaaagtatagttttataatcatacttagggcaactaaactgaaaggagaaaaaaaaatcccccttggccgggtgcggtggctcacacctgtaatcccagcactttgggaggccgaggcgggcagatcacctgaggtcaggagttcaagaccagcctggccaacatggcaaaaccccatctctactaaaaatacaaaaataagccaggtgtggtggcacacacctgtagtcccagctggctcaggaggctgagggtgcagtgagctgagactgcaccactgtactccagcctgggtgacagagtgagactccatctaaaaaaaaaaaaaaaaaaattccctaatctatggaactgaactacttccacttgaaggagcaagaaagacctgcacaggacattttgggttctctttcacactgatgcacagggaatttgggaagttaatgcccttcttatgccatctcaaatgtgaactgtcatgtgacttcatacaagcaagggtgagtgtgaatctgaagacactggtttccaaaactttacaataatgaacagtctcaggcagattgctccactcaccctcaagggccacctaatgcatgctcctgactgcaagcaccctgccagctgtgcagaggagtcactccaccatcttcaacatctacacaattgccaaaggaaaataagaacagaaacaattaccagaggatgcaagttaaagaaattctcctcaattacactgcctgagtggtttaatttaaaaagaatttggggccctaatataacatcttgtcagggtcatacaagtttgttcaagtcactaagatattttcagcaaattatatcttcattagcctaatatctcacttttattttaaaaaccattaattcacaagccattttcaggaatattgctgtgtgttaataaagttttattgtatcttgggtaagactaacattagtctgtattatgttgcaaacacagacaaagccatggctctttattttcattcattcattcgacacagggtctcattctgtcacccagctggagggcagtggcacaatcatggcccactacagccatgacctcctgggctcaagcaatcctcccacctcaacctcccaagtagctgagaccacgggtgtgcaccaccacatctgactagtttctgtattttttgtagagatggagtctccctacgttgcccagcctggtctcaaactcytgggctcaagcaatttgcctgccttggcctcctgaagtgctggggtaataggcatgagccaccgcgtccagcgccatagctctttgcacatcattcaaagaatgataacaagttatattgtaaagacctatggtattgttaaagaattattttataagtgatagcattccaaactgcaattagaatatcacttacaaaatttttgcctattcacttaacatttttatagatgttagctcatacacgtatttttaaacttcctatagatttccatagagaacttcatatgggtgacattatattgagtcccagtacaagcccaggaaggcaagaagttcagaaaatcccaggtgttttgtttttgattatctggacttaggagtccccttataacacaaatgattttcttaaattccatgttactatgggattctgttgtaatcaatttatacacrcacatacagggtcagaggtaatgttctatttatgtactccaccaacagtccatatcacagtcacaatacactggctcgcaactttcctgggtcatctaccccttaaactagtgctagctcccacggtaacatttgtacattcatagtgtgagttatactgggattaacggaatacttacattcattccagaggccttgtctggagactgtatagtcaggttatgtgcatgtgaatttgctgccacatggcacaagcatattttattaaaatcttttctaaactggaatataaatccctatagccaatcaggtcatactgcccacccctctgacaacctgactcagtaaggtttgggtcgagtaaaagtgccaacttcttaaggctgcaaaaccatatctagatgatgtcagcatctaaatccagttgtaacttatgggggaaagtttggggtcttcggaccttacattttcaactgtgctatctaactaaccaagactgattccatcatctaatttatataaacagcagacctcagtttacagtcctactcataaaagaccctcttatttggcactggtgaaggaggcacagcctgggtgatgggtcatggtcacttcacctttcttttacatatctactctttattagttcattccaagttcaaatcctaacctgtaccttaatccctggttccataaagttgatttatacaaatccccaaatctgccccacccccttgctaaagcatggctgactcaagcttccactgtcggagaggtccagcacaggatgttcagtcaactcaagacacttacttgtcagcctctcaaaactgtgtggcaagaacctggataccttagatttcagtttcctaagtaagtctcagcctatgaaaggcagggctatagctccattagagtgaaggcactatggtacttacagagctggtgtttcagagtcagacaacctctgctgtgtgggagaactggggatggggtagacttcagagaatcaccagtctatttccaggagtgttttcacttccaggactgctgccaagttgtctgctcagtctctctcagcctgtatcttctcccgcaccttaacccctcccaacatctgaggcaaaacacctcaaccacacatttttcagagtccttgatgttcccgtcycccctccaagtcttgcaaaacgaaagcaaaaggggtgaaacaaggtctagatcagaatccaaggtttccacagtcccaaaatgacacagtacacattaggaatgaaggaagctaaataaaattcaagtctaggtggtagagtattgagctacgaagttcctttatagggactaatatatcacaaaatttttgtccttcaaagtcacactcagcatacatacattctgttatgctcaacctcatacaaactgcttatgctctagaaataacagatacagaaaaatgaagtaataaaatatgaactttaggactacctttcatgctcaggctagtctattttgggacatatgtttaacattaaactgatcatacagtcagatgcactgactcaaggccttctaaagtctgggctgagaaacttcaacctattactacttggttattctcttgtatggttagcctccgtaaaatgtgaataaagaaaaagtggggttttcacaggactaaaaagctattaaaagagttctctgggattttgtaaaaagaaatataaaagtatacacaagaaactagtaagaatggctgttataatcaatgaggagaagggtagaagacgtttgggatgactggtaaaataaatcttagcctataccttttaataaaatttgtattttttaaccatgaaattataatacctacaaaagtaaagataaaatagtgaaaaatagttagcatggcaattggaaatggaaaaaaaacacatggaggtgatacatgaataactaaagtttgaaaattaccactttgagtctgggtgtggtggctcatgcctgtaatcccaacactttgggaggccaaggtgggtagatcactggaggtcaggagttcgagaccagcctggccaccatggtgaaaccctgtctccactaaaaatacaaaaattagctggatgtggtggcacacgcctacaatcccaactatttgggaggctgaggcagaagaatcacttgaaccagggagtcagaggttgcagtgagttgagatcatgccactgcaccctagcctgggtaacagagcgagacttcatctcaaaaaaaaaaagaaaagaaaagaaaagaaaactaaagctttgatgtaagaaccttctccctactccaccccgctccacccccgatcccactcccatcccttttctttcctttgctaaagccaattttcttgtatcatttttcttgacctcttacaacagcttcagcacatttgactatttccttctggaaaccttcctttggcctgatagtcatgacatatctttctcgtcttcttcctgcctctctagcaactagtccacaatctccctttcagaccctttctcctttaaccagacactaaagactgtacttcctgaggattccacagccctcttctcttctcagtttacattctcccctttagtctcatttacttggttcaaattacaacaaagaagctgccactctaaaagcatcttcggcccagatgtacatcttcttgtgtgtaattttgttttgttttgttttttccaggaaaaacatattgaaattccttgcattctctatcttacccagttataacatctaatacctagtaagggatctgtaaatagtccagttaacaattttaatttagcctaagccattattttttacttataaattcaactaaacaatctaactaaaggtagaacttttgggaggtcaatctacaaaggaacaaaagaccaatccttacagtattatttaagatgattatttacagtactcattcacagggccacttctgacttactgaatcagactctccagttacaaacttcagaatacatgttccctgatgttctacaagaatttctagtactctggtttataaccattggtctacatatctctctaattgacaaatatggtcattccaattatttagaacaaaggtctccccaattcctgatctattacccatacctaaagttcaaactgagaagaaaatggattattagagaggaagtaagtgaaacaaatttaagaacattcattcaatataatgaattcctcttcaatactatactgaaagggcataggaagaaggagtcaagtggattctatcacactgaaaattatcccaagcagaaagctgggtaagtgcaaggaataaaaatgagtaagaatagggttattaacaaatgagatctgagaggaatttaaaaaattaaacagagggatggtttcccaagttttagacgttgtataagctgtctataatcatttctttaatgtacctaaattcatctgctagttctttgtggggaaaatgcctcaagttcatggagtagacccaaattaaatctctctaccatgaccataatttcttttaaaccgttctagagatgtagactatttcacatctgcactaaatgagaaacaaaccatcagcttttgatgtcacattaaaaacaaggtagttactactaaaatatagcactttggctgtatgagttatttaattactacggagacaatttaaattttcccccttttcttttctttattatttgctttttctccatgttcaggggaaaaaatcaagttcatagaactacaatttgtggcatatctaaaacagctgtggttgaatgatacagtatttgaaatcccccaaattatgtgagttcaaagactgtgaatttcttgggaacaaacaacagcagaaaaaaagaaaaggaaaaaaagacaactcaacatgaaagccaaacatattccctaatgaggcttctgatgaagtcataaattcctctttttcttttctaagtgaagtctccaaataatacatttgtcatggagagagagatcaaaattcaacaatttttaaagcagtaaatcacattaataacttaatctattcttatatataacttgaagttgtctaacaaagtttagtgaaggtgtgtctgataatttttaaaaactggtctggcagaatgacataattaatgtcyaaacataaatattcatttagattttggcctttttaagattgaatcattttttcttaggagcttctcctaaagcaaatacctgcaaaaatatactagttaaaatatttcatttaaacagatcagtgataactttcatgagttgaattcatattacatacagctgtaaatgccattagtattacttcaggcaaacttgactatcacaaagcaacttctgggaatatggtcaaacaatgcatgcaatatttgcaaactgaaaaatactgcaaaatcatatggcaggggaaaaactcatatggcaaggaaagcctgttattttgtgacaccataagattaccatggttaataagaatgcaacacttcattaacctcaaaccactgtgagccccagggtttgaagtaaccagtactacaagaaaaaatatatctgctatgctgctcaaagtactccagtgttatactgaaattatctttgcatgacgataaaccagcatattgatctgttgggtggcagggtgaataccacataaatcctatgtctataaacttgttcctgaataatgaaagattacaagaaaaataccaaattcactgaacttttgtcattccaatttaattgtttagataagaacttcttggaccattaaagttctttagcacacaaatccataggtatcaagtgtgcccatgataagaaatgtcagcctttaggaaatgtaaaatatgcatgccattttaacaagtaaaagtgagaaattaatattgctaatagtatatgcaagtaaagaagtatgagacatgagtcttgccttctgaaagcttttgaaatttttataatggaaacatatttatatacaacagttaaataacaatacaagttagtaaataactggattaatacttatttggggttgctctgtattgattagcaatgcttattagtatgttattctggcacatggtaggttctcagtaggtagaagctcaaataggtatgcaatggtttatgtgagagaaaataagaacaagaaattcctaacgtatgttgaggtcaaacttagagtgtattgtcaggaaacgcttcctagagtacaaggtacttgagcaaaagggcattctggggtagaatgagagacaaaagaaaaagacagaaatgagtgtactaataagaaaccaaggagatgtacatgatgcagaattaacatgactaaagtcaaaggctaggcttaaaaatatggatattatcaaataagctatggggatcactaaaggttattggcaaacatcacttttaaagaagattaacctgtctttggtgagctcgatggagaagagaaaacaaacatgttaaatgttttcatagcaatctagaaaaaagtgatgacactaggggtgggtgttaagtagtggtaataaaaactgaaactggagatgtttccaaggaagaattaacaggacttataaaattaactccatatcaagaacaaaagaatgggtagggttaagaattttgaagttttcaacagaaaacttcagtactagagttctcaacagaaaacttcagtactagagttctcaacagaaatggggaggttggaaaatagcaatattttaactggggagaggaatggaaaatatataataatacttctagtcataaaatgccccctaacactctgcacagtcctttcccaaacatttattttatgctaatagtggcaaaatgagcaatgcacatattatctccacttaacagatttggaaatagaagtatcaaggagggaaggacagtcagtgaatgcttaatccaatacatagatttctctccctcctataccaaggttctttttcctaaaataactttgtttttaacaccatgacatataattcatcaggaattgatcacgtaagttaaaatagttaacttgcttttatttattcaaagaacatttttgaacattacaaataggccctgtgctaagcactggaagtagggtaatgaatgagatcaacacagtccccactttccattttatgaagaaacaagtaaacaaatataaaacaaaaattttcaaatactattcaatgctatgaaacacaaatgtcaatgtgctgggaagaagagctcatctgggggcaagtacaaacctagaccagtcaagaaagagaaaaaggtcagatgtggaagatggaaaaaacaagcagttagtgtggcagggacaagcagggaccagggagccaggacgcatagggccttatagctccagtaaccacaccttctacttcacctgggacaggactggacacacctgtgctccaggtacaatcagtaatagcacttccttttactctcaaaagagttctaatttcaatgataaattaaatggtcaccctagttccagacaatgtacggtaatgatatagaattaaatccaaaataaaagccaggcatggtggctcacacctataatcccagcactttgggaggccaaggcagatggatcatttgaggtcagaagtttgagaccagcctgaccaacatggtgaaaccccgtctctactaaaaatacaaaaaaaaaaaaaattagctgggcgtggtggtgggcgcctgtaatctcagctactcgggaggccaaggcaggggaatagcttgaacccagaaggcagaggttgcagtcagccaagattgtgccactgcactccagctgggcaagagagcaagactccctctcagaaaaaaaaaaaaaaaaaacacagtggggaaccactggaggaagccatagtggactaatctaatattatcaatgtatctattctaaaatgtcatgcttctctgtatactcaacataaactgtctatgtatacttattttagctgatttaacatttctttctttttaggctaaacgttgttttgtgattgcccttcagatctttcctatcttcaatagacctgtctgagctgaacgctatatacttctatagagcaatgtataatgaattttgttagggagctttccaaagcatgcagttccctttctccaagctactgcctactgcccaaatagaccaaagtttggtgaggtcagtagaaacctaaatgagggaagatccttgtaagcctactttacagaccaccacatacagcaatgtaacaagtgcctcacaaacagattctgtattgagctgccatccttctcttcaggattaggaatccaagttgtaagcaccctctccaaaattgagtattggacttcactttcatccccctctcccatcatagttcaaaagtaaaattacatctacgaataggctttctacgcagtttccaatattgttattcctgttatctagcatttttatttttattggtgttaagaaacttacttaaaaccttattgaattttgctgcaatacttcttttgtgtacatgaatgaaatttccccagagccagttgcattgtgggaaaattatacaaaaacttccttagtgtgaggttcaagttccacattcactctattccctgttccctctgctttgtaaaaaactgacaagcacataccaacaccttactgatgaaagccataacccatttctattacattccttcagatttgattttatgaaaactttaatcactttatttgcttttcttttaacaatgagtttcttcacatccatctcaacacagagagaccctaactgtgaacaacattttaatgaaacttcccctgagtgaggatggagggaagtcgtcccaccaatgctactattaatacaaagaaatgaaacaggctccatgaaggcagcatgctttatcacacaggaagattgttctgggggcttagtcaataataggctggaagaaggggagactagaggcatgcagagaatcccaggcttttgagcttttccagggtagaaatgatgagagcatgatatagagcagacacaacgacaagagaaatgagcagaggtaaaagagatattgcagacttagaattgatggcacttggcaactgaccggacacataaggtgagggaaacagaacattgaaaatgacttcaagattgctgtcctaagttcctgactattggttgatgccaataactaaaactgggaacacagaagaaaaatctggctttggagagaagatgaggaactgacaaggccctcccatttagagatatccagcaggaagaagaaaatttaatgacttaacattataaaattgtatgacataaattcttaagcatgtccttatccttacctacttcaaaaattaaaatgcctacaattcaacacatctgtcatgaaactcactatcttctcctatagcctgctttcttgcttgtatttcttatcttgaaggatggcaacacaatccacggggctccccagccagaaacctgggtacgattcttaactcctccttttcaaccattagattcctgccaccttctaactaactcttcaatccttccacttttctccattccctctatcacagtcttgcttcaggccatcataatctcttatatgaactactaaaatagcttcttatcttgccttctttctcattcttgctttttaccaattaacaagtttggcaaaacaatcttcctaaatttcaagccagttcgtagtctccctgacattaagcccattactgactgtttattatttccttatagtaaagagaggcaatgactataaaattcatctgggccaggcacagtggctcctgcctataatcccagcactttgggaggccgagacaggtgaatcacttgaggtcaggagtttaagaccaacctggccaactcggcgaaaccccatctctactaaaaatacaaaagttagctgggcatggtggtgtgcacctgtaatcccagctactcagtaagctgaggcaggagaatcacttgaaccctggaggaggaggttgcagtgagctgagatcacaccactgcactgcagcctgagtgagagagagactctgtctcaaaaaaaaaaaaaaaattaaaataaaaaaaaaattttaatgcatctggttctgtagatgttcaataaatagtgatggtcatggctgactttttttgttgttttggcataaaggatcttttgtaattgagtttctaaatacctctccagttttatcttctaactctgaatggtatgttccaatagtagcaaactgggtaaccccagaaaatagtatactttttcatacctcagtaaatttatacatactatttcctctttctgaaatgacatgtataaagatgccaatttttcccaattaaatatatggattcaacataatcccaatcaaaatctcagaaagttattttgtggatattgataaactggttctaaagtttatatggagaaacaaaagacccagaataattaacacaatactgaaggagaagaacaaagttggaggaccaacactacctaacttcaagacttactataaaactacagtaatcaagacagtgaggtactggtgaaagaagacaaacagatcaattgtacacgatagcctagaaacacacccatataaatatgcttgactgatctttgacaaaagagcaaagacaatacaatggagaaaagacagtcttttcaacaaattgtcctggaataactggacatccctattcgaaagaaaaaaaaaagaatcaataaaaaaaaagaaccaagacacagaccataacccttcccaagaattaactaaaaatgaatcacagacttaaatgtaaaaatgtaagatgcaaaactataaaactcctagaagacaatgtaggagaaaatctagataactctggatagtgatgactttttagatataacacaaatgcacaaaccatgaaagaaagaattgataagctggacttattaaaatttacttgtgccagtaaacaagtttggcactgatgggacccccatttagagacatccagcaggaagaagaaaatttaatgatgcaatattataaaattctatgatataaatgcttaaaaatgtctatatccttacctacttataaaattaaaatgccttaaattcaacacacttataatgaaactatcttctcctatagcctgctttcttgcttgtatttatttcttttgagatggagtttaactcttgttgcccagggtggagtgcaatggcacaatcttggctcactgcaacctccacctcccaggttcaagcgattctcctgcctcgcctcccatgtagctggaattacaggcatgcatcaccacgcccagctaattttgcatttttattagagacagggtatcaccacattggtcaggctggtttggaactcttgacctcaagtgatccacctgcctcagactcccaaagtgctgggattataggtgtgagccaccaagcccagcctcttgtttatatttcttatcttgaaggatggcaacacatccttcagatatgcctatcacaagaggtatcagataaaggagtattatctaaagtaatttaaaaattcttaaaagccaacaataacaaaacaatcaatttgattaaacagatatatcccaccaatgaagatatacacatggtaaataagtagatgaamagatgctccacatatgtcattagggaactgcaaattaaaacaacaacatgatacccactacatgtattagaatagccaaaatccaaaatactaacaataccgaatgctgctaaggacgtgatacaacaggagctctcatcattgctggtacagccactttggaagacagtttggcaattttgtacaaaactaaatatactctaaccatacaatccagcaatcacactccttggtatttatccagatgaactgaaaaattatgtgcacacaaaaatctgcacacagatgtttataccagcttattcataactgtcaaaacttgaaagcacccacaggtgaatggataaactgtggtatactcagaaaatggaatactattcagagctaaaaagaaatgatctatcaagccatgaaaagacagggaggaaactgagatgcattttaagtgaaagaagtcaatctggaaaggttgtatactacaaaattccaactatagtacattctgaaaagggcaaaatgtagggagacagtaaaaacattagcaattggcaggaggaagggattaattggcagagcacagtggatttttaaggccagaaaataataccacagtgcatgatgtggatatatgtcattatacatatatcaaaacccatgaaaaatacaacactaacagtgaaccccaatgtaaactatggactttaggtgataatgatgtgtcaaagtagtgtcactgattgaaacaaatgtaccacagtaaggcaggatcttaacagtaggagaggctgggaaggagccagggtatgtatggagcctctctttactttccactcaatcttactatgaacctaaaactgctctaaaaagtaaagcctatttttaaaagtaggtggggtcctctttttttaacccaatctcttcgcaaattagtggtttatcccctggaggtaaaaattgacctttcttctccaaaataaacaaattggaacaattccttctgatcttaatccctgaaattttaatatatggagcctggaagtgactgttgatgaagtttattccacatgtgaccttctacatactcctatgcatatctctttccggcatggtgtgggtttgggatgctacaaccaagcacccagtggtcacacaaacagaagcatgatagcccagggtctgaccagacttctccctgtgcttgtttgtgtttgttttattctcttttgctttatttttcaactgttcaatacattgtagaacatgattttgaaatgcccaagtcatttttacttctcagtatttgtaaatttatagatataactgaaataatttcaaataacagatacacttatataaatggttatatcaataaaaacacagtaattaaaaataatagctgtcatagggccgggcatggtggctcacacctgtaatcccagcactttcggaggctgaggtgcgcagatcacaaggtcaggagtttgagaccagcctgaccggcatagtgaaaccccgtttctactaaaaaaaatacaaaaaattagctcggcgtggtggcaggcacctgtaatcccagctacttgggaggttgaggcaggagaatagattgaacccaggaggcgaaggctgcagtgagccaagatcgcgccactgcactccagcctgggcaacagaatgagactctgtctcaaaamaacaacaacaacaacaacaacaacaacaacaaaacgctgtcatggttaaaaaaaaataccagtatatacgttaatttctccagaaaatttacccttaactactcaagccaattacttgctcttccaagacactgctataataatatttctattattgtactcatcatatagtatttccttatctttcatatccaaacttctcagattacttctttgaggctaagtatgatctgatcctgtttatcttaaaactttgttatgtaactttttgttgaatgaatacttaaaaatgataaatgaatgaattacaagaagccataaattagacttaatagatgctaactattaaggagaaaatgctctcaatttttgtcatcctagtgaacaagaaataaatatcaacatttgtactataggcagttttatgctggactttatgtactaccatttaatgtacatttcattttacataaaattagatgagtaattaaaaatataatgaagttttcttattctgttaacagctattcctttttaaaataaatattctacttgggaaagtataattaaagtcttactcttgtttaataatacaaataaaactgaattctgtctaaggaaaaacaggaaagatttattaaccagcatgtttttatacttatagtttgttctatctgttcagcctacagcatacatttttgtaaaaacttcaaacactttctatatggagtacttccaactgcaaaggcctaatagaaaaagctaccccaagaatgtgtcccctttacatctgtgcctcataccacaatgcaaaagataaagtggtccccaatgaatcactctctataactggcaaaagttattgcaaatttaaatggaaaatttaaggccattaaaataatctggtgaaatcaagaaaattcttcaaaatctccttcttcagtttcagcaaaggtaccacctgacaaaaagtgtactcaaacagtctttttgggctcaacaaggatgtcagctagggcactcaactatatttacaacaaagcagtatcagaaacattctttactgtgaataaacaataagctcattcaaaacagacagaaaaagatcctggagaattgaagccattatgtctcaaaaagtgaatttctaaaaagaaaggtttctagcaagttagaaaatgatagattttgtcactgaagactgaaactgtattgacagctctctataactggcatagtacacatcaactaaaaaatgtactctaaagcatttgtgccgaaacactgcttaatagtccctgctgataaaatttattcatgtatactataaaagtaaaaagccattcgaaataataaaaagagatgacatgctgactttaatcttggggctggaaccaccacaacgcccttagagataaatatgaagcaaatctcagctgctgccaactatggtgtgtgttacacagaacctggagagctctaactggtccctctctgttctcctgaattactccattgttgaaatcaacaaatccaggagagagcccagcaccacaaccaagacatacaaaaagctttcaattacaaacaccgcaatagatttagcttagtggtcacagttggctgcaaaccgtttctctgagaaggaaaaagaagactttatctaccaaggtggttataaacattagagaataattttggaatgcagggtcaagaagaccagaatgtgtgcttttcattyaaggattcacgagcttttattactggtctaatttaatcaaagataacgcattgtttagaaacaagcaattgaaagctggtatgaaaaagaaggaagtgagaaatcagtagcaaataagtagcagctgatgtccccatagctaaaatgcatgacagagaattccctgggctcaatccaagtattacccatgcaggcctctatcttttctctcttaaaaagtatcttcttagaaaatgtgcatattaagaaagaatttaaatacaacagaagagaaaaataagagtttcatatgatattccacaattccgtgttatcaaatagcagagtccaaaaggttttaggcaatgccaaaggccatcgggttatctgcttttagaaaatacaatatctgaaacatttaatagaaatactacctaatcttgaccaggtatggtggctcatgctggtaatcacagccttttggtagactgaggcagatggatcacttgaagtccaagaccaagaacttgaagttcaggaccagcctgtcaacatggtgaaaccccatctgtactaaaaatacaaaaattagccaggcgtggtggcacatactcctgtaatcccagctactcgggaggctgaggcaggagaattgcttgaacccaggagtcagaggttgcagggaaccgagattgtgccattgcactccagcctgggcggcagagcgagactctgtctcaaaaaaaaaaaaaaaagaaaagaaatactacctaatcttaatgatactcaacactgataattatacaaaagaaaagaaatactacctaatcttaatgatactcaacactgataattatacagccttctttagtagcctggtatgtgtttaataacccgttaaattcagaaattataattaactattttctgttgctccattataagcccattttctccatttgatttttgttgcatcaatatattacagtaggtagttaggcatgagcagggcagaagagggctcccctcgcctactagaaatgtcaggcaaccatacagtaggtagttaggcatgagcagggcagaagagggctcccctcgcccactagaaatgtcaggcaaccatcaggtgatggtcccacagttgacacaccacttctctaaaaatgatcattggtcacaggcgccaaaaagaggcaatttcacaatagataaaaacacttgaaattggtaactggcagctcaggaattgggcaagtaggcttgggcatgtgcattaagagacaaaatggcagagtatgaccttccaggggcattccactgaaaaagggaagaaagcctcaagtgagcatgtgtacaacttcttaaacacactgcgcatgctcacctcccaagggttagcaggccactgcgcatgcgggcagcccaccctaagagatgggaaaaggtaaacaaggccctgtaaggatgccaacatataaaactccaaatcaaaaggtcatacgccaccattgacctccaaagtgcccgtttaggtctcttccaagtgtactttcctttgtttcctgctctaaagcattttaataaacttccattcctgctcggaaacttgccttggtctctttttccactgcatgcccctcggtcgaattatttcttcttaggaagcaagaattgaggttgccatagattcgtatagctttgctgccagtaactcggatatttgccaccactaacaaatatattatttcacatgcttgaaggagttaaaaggagtcaatcatcttacctaattttctaaggacaaaatgaagacccaagccttttcaactctagtcctagaacccattttctattattttcatcatttttattgccctttactgaaaccacttaaatttttaaaaccaaacctattccactaacaaaaactgggtcaaactatgtcaaaatcaaagactgaggtcaggcacagtggctcactctgtaaatcccagcactttgagaggctgaggagggaggaccacttgagcgcaggcattccagaccaggttggaccacacagtgagacacctccatctctacaaaaaaatatatatatattatatatatatatatatttaattagctgggtgtggtggctcacacctgtaatctcaacactttgggaggcagagttggaagaactgcttgagcccaggagtttgaggctgcagtgaggtttgattgtgtcacttaactccagcctgcatgacagagcaagactgtctcaaaaaaaaaaaaaaaaatcctgaaaaaaatagttaataatatcagcttattgattgtatagtcccttacttttcaagacattttcagcttttttctcttttagactcattagaccctttcaagttagaaacttgagataatattcctgatcttgcaaatgatactgcatgggcaaaaatgttcatattttttttcttttaaacttcaattacttacataaagcagaggaaacacaggaggaaaagagtataaagagccacagttaaggtagaggaggagaaagtagagggaagtcccttcaggtggctcattctttttagtaaataggtgagaatgatggataaagtgtggctttcaagatctgaggcaagagggagcagttagaacagccactggcagaccccctccagaaataaaggacaaacaactaaaacactgtaactgcctcatttcctgttcacctagcctaaggcttcttttgatttttctctttttcagttgagttttgaagcagtctccaatgtattgttgtgcttctgcaataagaaggatttaaatcttgatcaaactaaggagtgatccactaatcttatttctgatattaatgtactttaaaccctaagaaaattaatgaacaagaggcttaggtatttcaggacagaactggaagaatcagagtacaaaacaaatggcatggagtagccagtaagaggaaagttaagactgggtctagagatgatgttttaacagtttatcgttagaggaatttgatgttagaattccctaaatgttgccagctagtgactatctgggcccggtggcacaggcagtaaggaaatttaacaagacaatagtagataaagaaaagcagatttattagagaaagtatgaaaatatgttgtaagacaggcagcacagcagagaagggggctgtccgcaaagatgcaggggctggagggaagttttacagggtcatgctagagggggtacctggagaacaaggtcactgtgcctgcagaagtaggtcgagatcactgtgcccttgtgttgtttgtgattagccatctctcagaacagttgttcactgttcttccccatctggggcccttcctccttgttgcttacttatcaggactccacacaaaacatcatgtacaagtttttattcatttgtgttgtatgttattactgtccaaaatattttaattttatagaaagcacaagcaagggtatttagtgaaatgtgcctgttttttctcacacagttattcaaggcagatatgtcttaccactctgcttatattatcctactgaggtaccactaattaccccatagcataggcatacctcaagtaaaagaaaactcaaggggaatttaagtctctctagaatttaatttgaaatctcattcccttaagtgatggaaatatcacaaaagaataacgtaggtttaaagaaggtaaagaagaaaagacctaatttagcagcctcattttttatatatgctacagggactgcatagtagcaaattttccatatgtatcttacttgtgtggagaaaacattttaaaaatatggttctaagttaatgaaattgtgtagcaaatggagtacctaaaatctgtcttaaagggacttttttttttaacaaaaatatacttttagatgtaccagaaaaataaaatttcaaagtgagagtcatcagctaaactctgtttatttcaatgtgtggattatttcaaaacatgaaatttattttaacatgtagatgatacaaaaaccattgtattttgtcagcttgatgatatctttcaccttttcttgagcataaaaataacctattgactaaattcaacatcgacaagaagttttactttagatcaacacatcatgaagtcctcattaatatacacctgtgaagagcaggtgtgttgaacagaaagatattattttgcataataaaactgacacactatcaacagcctaaatgtgtaataaatgaatcacgtgtatggtttatttttcaaggcatcataaatgaagtacaactttaccaaaatttggtattttcacttgatgagatgaaaaatggtatagatgccttcatgcaaaaacaaggtcataagatagcattcttaaattcatttgatataaaaagttctacttctaaacagacatgtcatctgactcttctaataaaacatatcagtttttaaaaatagtagcataagtaggaattttaggttgtgtagacaaaatttcagaaaaagacccattgcactgcacatgatgcatgagtatcacgtattccttaaatgcttattcttccttgtctactcacaactccacacctcctggaaaacggaatatttttggtatcatcttaaatgcttacatataggtctatttcatgcacaagtagactaggaactccctgagggcagtaaaagcacacctggctacctgccttccctgacatcaccttcccaagtaaaacctattgcccaagsgcctcgagatggatggtaggaccctctccccaccagtgagtgaagcaaataatgtcctgttcccaaggatgtactacattactggccatgtattttgacctctgattaaataaaggtgccatgtaaagtgttgtaacttctatttgcaccacctagtgtgcaaatagatctcaaatttatccttccagcacaggttctggaagtctcactgaaaaaattttcaggaaataatgaaattttaaattataataataagtaaaataatgtatagtaataatgtatagttaatatttttgatgtgccataagtcacttcagagtgatatagtactccttaaggacatgtcaataaatattcaattattcctatttcagaaaagcatgagatttctagttacgagaaactacaaataaaagaaaactgaacgaagcacagcctttgcaataggaacattaacaagtatacattcatattttagagtgacaattggataaatacaaatagtatttagggaggctatagaaaagctgcacaaaaatgcataagaaatgaaaacacattcttcttaaatttgtcaaacaatctacacttacattgtcaagatgaaatatgataacaaatgaaataaaactgagctctctggaagactttaaattctaccaatgcaagtttccagaaacatgattaaaatctttttttctcctgagattcagagcggaaaggtttttcctcctatttttctgcatgacagtctctgcagattacaaacagacgcaggggatcattctaaaaaccttggagaagaaatcagcattttgagattcgtctactaatgtatgtcataacctcatatgcagctgggctattctccatgctcattactactaagatgaccttagtcatgcatttccctcctgttccctttcccaaatgttcacgttcttccttcaatcccagcatttcccaaactgtactctgcaaaacattagagacccaggagatacaaagtggatatttctgtcaaataaatttggaaaatatttcatgggatatctcctctcagaaatcacaaactatagtttggggcagaataagaaggcccttgaaagacaggctaaagaggtagattttattctggaggccaaggtgagaactgtagaggattttcagcagggagagagaggattaatctctttcatggagaatgcatattatgctgggagggcagtattggggaaaaaattcaacagatcatcaaaataatcatgcaagacaagccagtaactaaaattcgagagtagattaaacaatttcttcagagaatgaaaagtgcctagtgaaatctagatgtggcacaagggaaaggatggagataaagatggcctaagttctctatgatcactattttctcagtaaaacagaaagcaaaataacctgagtaagggagaagatacaaatttcaagaaacgagaggaaaataacaaaggtcaagttctgagtcaactcctgtgggcaacaggagtacatcctgtattattattattaaaataatatcctgtattatttttaatttttttttgtagaaacaaggtttccctatattgcccaggctggtctcaaaggatgctggctgcttataagtaaaataactccttaacatcatcatgcatggagccgttactgactcagccatgctatcttttcctcctctaaatcccttatagcactttttttttttggtacctccctaggatactttaaaatctgtgttatatttttacttatacactttttttactttcttctactagattttagttatttgactgggggagagagagaagttattaggtcttatttatctgtattatctttcataaaacatgctatatggtaggtgtttaaaacatctatgtgaaattgaaggtacaattacatgtcatagaatatatgcaaccttgcttcaaaatccacctttctgatcctcgttcctctataggatagatgtatcttccaccgtctctcttatttcaagatcttctccgtctttgatttttggcagtttgaatatgatgtgctcaggtgtgggctgttggtatttggtttttgtttgttttgatatttatgctacctggtattctctgagcttcctgtgtttgtgggtttctatctgtcattaattttagaaagttgttagccattatcacttcaaatatttttctcctttatctctttctcctcctgttattccaattatgggtatgtcacacctttaaaaattgatccacagttcttagatgctctattctgattttttttttccttcattccttttttcccttacatttcaatttgggaagcttctattgacctattttcaaacttatttattctttcctcatccttatcaagtctattgatacactgaaggcattcttcatttctgttacagtgtctttgatttatagcatttccttttaatacttttttttttttttcagatgtagtctccctctgtcgcccaggctggagtacagtggcatgatcttggctcactgcaacctctgcctcccagattcaagcaattctcctgcctcagcctccagagtagctgggattataggcacacaccaccaagcccaactaaaaagtagagacggggtttcaccatgttggccagcctggtcttgaactcctgacctgaagtgatctgcctgcctcagcctcccaaagtgctggattacaggcataagccactgtgcctggcctccttttaattttttattcgagttttcgactccattcttacatagcccatctgtgcttgcatgttgtctacttcttaaattagagtccttaatatattaatcagttattttaaactgcctgtcttataattccaacctctgtgtcatctatgataagggctctgatgatggctttgtctcttcagactgtgttctttcttgcctttggcatgccttataagtttttgttgaaagtggacatgttataatgggaaataggaatgaggtacatgggcttttggtatgaggatttatgttctgctggctatgtgttgggctgtctaacgtttgctgtagggtgctagaggtataaaatttctgcagtgcccttgttttcatcttcccttttaactatgggtttctttaagtactcttcctcggagggaatttgtgtcttgaagttctttcagctgtcatctgctgttattaaactggagacgtgccagtgtgatagtgaaatgggggcaaggagtagcattctataatctctgattatactaaacctctgtttaatcagagattacagaatgtcttttagtgagtctttgtctctagcctgtgacctttacaagttttttcatgaattgttttttccaattccttcagtgaagcaggaaggctacagggcccaggcagtaatatcctactcccatggctgcagcacaaggctctgatacagtctttcaccctggagtgtggacattttattaaaaaaaggctctgggtacattttaggatgattacttgtccacttctcccaccagggccatgagggaatcattctcagatcatctgtgagaaactggtggggttccttataggtaaagcccatgaacactggtggggaggtaggtaggagtttctaagtcacaccctgctgaatacttagtcttcagcaatttatcaaaattgccatttaaactgttcctaccagtttatgactctagcagcttcttctccaggtaaatagatcttggctgagactctctggaggcacctgtctccagatttcagggagggggtttgccctgtaacctcaaatatctgcttcagggtccaagaaaagtcactagtttttcagtttgtccagttttttcttgttctaacgatgtgaataataacgtcttttttttttttaagacatggtcttgttctgtcacccaggctggagtgcaatgacacaatcacagctcactacagcctcaaactcctgggctcaagcaatcttcctacctcagccttctgagtagctgggattacaggcacttgccaccacacttagcttttttttttttttttaaattattttgtagaacaaggtttccctatattgcccaggctggtctcaaactcctgggctcaaacaatcctcctgccttggcctcccaaagtgttgggattacaggtgtgagccaccacacctagccaagattaacaacttccttgatctyaaaatgtcagaactgaaactgggagactcaatatctaatttttatattaatccagtgttaaagtgcacgtgtgtgcacgcacacacacacgcgcgcacgcacgcacacacacagcattctttcagatttgtattctcaacaagggctaaggaaagaaaatgtatgaatagagcatattcaaaggtgctaatgatagagagcaacttaaggatattacaatagtgcaaacctggtatttagagtaagaagattcagccatgaacctttcagatgtactaagttgattatttaactcctctaatcctaattcattaaaatagatatgaaatcacttttggtcataacacatgtggtcctaataattattatcataactccaggtgacattttcattttaaaataacaggccaagagtgacaatgctttatatttatgaatgtaatcactaatttaaaaatttcagaaaacaaggagaatcaatattctttgtatagttatctcaatttttttcagttaaagaaaagcagatacatttatatataaaatttccattactaataatggaaattttccaacatatacaaaaacagagaaaaataatggaccactatatgctcataattgattctcaataattatcaacatttctgccatgaagtctcatctctccctccccctcttttttttccagagtactttaaagcaaatcccagacaatatgcgaatacttcagtatgtatctctatgggatagaaaagtctctccactgggtacagtgactttgctctcactcactttggaggagaagtgaactacttttcctgtgtatgaacgacagcagcatgttttcaccactagtgttgccatttggaaacttaagcatgaatggaagagtgagtgtgagtggtgagaaatcaaattgatgaactgagttggatagtgtgtatggattctcttatctgccctcctaccctcagtctagatcactggagaggtcaataataaaacatttctcttgcagttcaaattctggatgagaattcgcttctgcaaattagaagcaattcatctaagataatgaacacagaagcgaagcagaagccattttcctacatcctttcractgttttaactgcaaacaaagataaagaaatgcaaggtgttagcagtgctttttgtggcactttccaattttctgggtgtcaagaggcaattgtgactacagcattagcagtgtaactctggcttcctgattactggattgcagcaagaggagtatattcataacwcacagttgcagcaaccatattagctataactggctcttgggtggatcatttctgtactccctaaagtcattccagcaagaacagcctagaactcatatcttagatcttccaactattttataagcatcaaattctcttgtattaaatatcttcctgttttaaataaatgtaatttttgtttcctggactaaatcctgactcacacgctatttgatgtatctgtgtgtctgtggaactaatactaaagtttcatgaaaatcccctttttatgtgtgatacattaatttttctattttacttgtcctatttacaattctcttaagtctatagtcactcttaaatttccatgctattctatgtctattcattaaataaaatgctaattgcaatgtttaaaatctacttcatgacccaccaacaggttgcaagcttcagttaaaagacactgcttacagcatgatcttattaagagagccgaagtatactgcagaatatcacaactgcattacttatttttcttttattccatcctggtcttcatgayagacaatcgaagcttttccagctatcatcttattggcctctacctaaataggagacagcattcaggcaagtctccacatagctaaaaaatgttttcaacaaataagcaaaaatggagaacagaaaataagaagaagaaaatcgtacgactgacattaaggtttgggggaaaactgctcttgatctaaaaagaatgcaaggtttttttataaaaccattttctgaaagctttcattgaccagacttgattttgttattaaaacatacctccagaaaccatatgcagtgtttgattctttttcctccatctacttattagtcaaacagaaataaatctaatatggaccaaaagaacttttaaaaactaaacatccttaaatcttgttatatgaatagtgaactatattcagattttggttcttgattccaaaaccaataaaatcacagcaaaatgttaaatgaatccacagatctcagaggataacagatcataaaactcccacagatttggcaaggtggcagtcactgacagaaggagaaaagatatataaatataagctaaaatttcacattttttcctatgctaaaaaattgggctctatgtacaatgtggartatttaaatataaaacatttttctattttaacaaatatatagcattaatgagtactacattcatgcattatatgttctctttactataggaaaaatatttttaattaatttgaatcattaattgaagctcagcaggcttaaactttgattttaatgttttgaatagaaatctgaaaaatgtagtaccctcttttacgcctaataaaacagaataaactgaatattaattagtcttttgatgcttcagatttctcattatcataatcaattaccatccccatgctgaaatactgcactgagctcaggagttattgatatgtggcaaaatattatagtgaaaacatcatggatgttggtgttaaacacagcctggttcagatcatggtactcacaactttctagccctgtgatattgtgcaaattaattaacatccctgcatttaggtctcatctgctatagaacagaaatcataatgctctactcttaaggttgttaaaaagattaaacaaaaatataggcaagaaagtaaagyattttttcttgctattaacactataaaatcaagtatctcttacttctcaaactagaatattccataattctgaataattgatacaaatgtacaaataattggtaaatgcagcactactgtatttgtagactcaaataccataaacttttagagttcaaaggacaaaatacgaccgggtgtggtggctcatgcctgtaatccctgcactttgggaggctgaggctggcagaccaattgaagtcaggagttcgagaccagctggaccaacgtggtgaaaccctgtgtctactaaaaatgtgaaaattagctggctgtaattccagctattcgggargctgaggcatgagaatcacctgaacctgggaggcagaggttgtagtctcaaamaagaaacaaaggacaaaacacgatgtgtgagaaatttacaccttaattttaaatatatttagaataaatgctattgtattgcttagaatatttttttaattaatgctgtattttaaaaatgttattatgtttattgatattatatagatataactaatttttattttaatcttgtataccagaaatcttgctaaatgggactacagctagcaaaggacatacaaaaatctctaaagataacttcataaaatgttattgagacatttaaaaagacctggataaatgaaaatatacactatttatatggattgaagagtaaatataaagatgacagttttctccaaattaccatggactaaatgttatcccagtctaaattcacaaaaaagtttctgtggaaactgactgattctcaaatttatatgcaaacgcaaaaggccaagaataaaaaacaaggcaattttgaagaacaatgtgtaagaactttatgagatatgaatatttattataaataaatagcaatgaagatagtgcagcattggtatatagcatcacaaaaacaaaagacaaatgggacagaccagaaaaacctagaaacagacccatacatatatgaatcattgatttaagacaaaactggcacacttcatagaagcagaaaaaggacagacttttcaatgacaatattgagaccactagatgtccatatggaaaaaaaaatggaattggatccttctctgacacacacaaaaatcaacttcaggtaagttttcaggacttaatgtgaacacaagcaaaatataaaacttttaggatacaggagaaaaatcttcatgaccttgaggtgggaaagatttctaaaatgacacacaaaaagcactaaccatcaaggaaataactgataaatttggctaaattgaaaaaaaacttttgctcaacagaaaacataatgaagagtgaaaagacatggtgcagaatgagacaggacactgtgacccatagaagcaattaggtttccagtcaaactacatatataaattgtacaaactgataagaaaagatagctcactagaatgaaaaatagacaaaggacttgaacacatacttaaaaataaaaaattaggccaggagcggtggctcatgcctgtaatcccagcactttgggaggccaaggcgggcggatcacgaggtcaggagatcgagaccatcctggctaacacggtgaaaacccgtctctactaaaaaaaaaaaaaaaaaaaaaaaattagccaggcatggtggcgggtgcctgtagttccagctactcgggaggctgaggcaagagaatggcgtgaatccaggaggcagagtttgcagtgagccaacagcatgccactacactccagcccaggcgacagagcaagactctgtctcaaaataaaaaaattaaaaaattaaaaattaaagagtaaggtatactactactatttaggaatgcattaaataatattattttaaaggtaacagaatgattactgttaaatcaggaacagtggttacctctaagaattagagacttctgaggtgaagacaatattctacttcttaatgtaggaggtggtttacacaggtgtttattttataattactcgtaattatacacaatataagacagttttacacacttttgtatatattttgtaatatagcagactgtcttaattgtactaaaagaactcagtgacaattttccagacaacacaggctatatagcccaaaataaagattctcctgaaaaatggaacttctagattcagattttccccattttgttgttctagagtcagactcaccattgtggggtagaatataataagatatattgcttttgccagagaaggttacagggaagtgggggcattggtctagaaattgaccagctaaagctgaagaaataagctttagataagggtagatttgggggaaatgattcaattagttttactattcctacccttagtttgatgagtaaatcttcctgaatagtgagcttgctcctctagatctcagtttctcattcaatttaaaaaaaaaaagattatgtcttagtaaaaacacaagtatcaagttttctctctctgtgacatgttttcataaaatgcattttgagaaatcgtccatgaacctgcaccatctactaactctcaccataattttatgcaaccaagagaagcacggatggatacctttggctagctacacaggaatggtgawaaactgcatctttgacatccaccagcatgacaagtgaaataagacctaaaaccaggaaattctgggactcagtttccccaaatttcaaacagaaacaataaaatccatgctacatatctcaaaaggctatatatcataatggttgccaaagtgatttgaagcagacagattataaaatagaccatcacttctgaatacagatagggtacagtagaaataayaggaaacagaaatccgaggttttgcctcaggcatttactagctgagtgactgactgactgactacagatgacttggaccagtctagttgaaataatttaaggttatcttcccatttccataattacatatgaattagtccttcaaaaactatatactatttaaggttctatattgacttttcttttttttttttttttgaaactgaatcaccaaatctcactctcttgcccaggctgcagtgcagtgatgcaatcttagctcactgcagcctccgcctcccaggttcaagtgattcgtctgcctcagcctcctgagtacctgggattacaggtgtacaccatcaggcctagttaattttgatatttttagtagaaacggcatttcaccatgttggtcaggctggtcttgaactcctgacctaaggtgatcccacccacctgaaactcctaaagtactcggattacaggcattagccactgtgcctagccagtttctataatactgattttacagcaaagattttattaaagatccaatattatgcccaagataaattaaaattatcactttatgaaaggattccaaatagggtttctttaaataattttcccagaacttatatttttacttattagaggtaacgctttctgtataccttcctaaaaatgttagaaatttaatgttacatctaagttatacattcagctgccaacgttaggaattaaatgttatattaagttattccttcaactatctcctacaactgattaaagtaaacaaaaggaagaacaagtttccataagacaaaattgaaaaccagtattatgaatccagttttgggtagacacattcaggtaaacgcaaggttgatattcaatagtcacacatgggtttctgccctacttggccatcagctgctgtttaatagagggcccaactacccctttcccacacgaggttcccagtctcctctcccagaatccctgaataagccacctgccctawattccccacaactccacaactaaagagcgaaaccccaggaggaaagggcaggcccagtatgctgttccagtcctgaatccttggtgcctatgccacataggttgttaaatatttggaatatcacccttgggtaaacgctatgtgggtgaaatatactttatgccttctaaaggaagagtaagagatttagtggatctgacttcaaatttttctatctctttggttgagtcgatcaaattactggcagctttatgcatgtaggtaggcaacgttgctccctgttctttttggggttaccacctcttttttctttgttgtcattataatggtaagaacttcagagctaacacttggacaggaaaactcagtccaaaatatttgcctctaggaaatcagacatctaaaagtatatgtcagtctctttccctgatctcaatctgtgcaaaattaaaaaaaaaattaaaagattacaaaaatgtttttcaacaaaacatatcaaaatgtacagtttttctctacagtctcagaggaacttaacggaatagtaactactggctatctagaacaccaccaaatgccaaagagactgtcagtttgattcaacttgctaattaaagtgaactaagataacatttgaaagatgtttttaaaaagtgttttactaaacacttgtttacttattaaaaatctttctaaatatttctcatttggatctgaccagctacactgtgatatatgttattaacactatttcacagatgaggatattgatgctctcagacatttgcccaatattactctgctgttaattaagagagggcactgtgcacagcaaaagaagcctaagaagtaccctagagaaacttaaaattctaactaaaggacgagctcaaagggctaaaatagagttagcgatgagatatacgtctttggaatctctcttgcactgtcattaccatattcatcctactgcaaaggcgagagccctagtacctgcaacagccatgatgctcaagttaagcctgctgtcgctttaaaacaataacatgtaaacttagtaaatgtaccaatcatttagtaaagtaaatgccaactaaaacggcaatgtatgtcagttttgattcactaagatatgcatcagaaatatgaaatcaaacacatgtctaaaataattttccaaaaagccaataatgagtgtgataggaaagacatgcttcaaaataaaattttcttccctgggatttattagataaaattcccatttaaaaattaattacaataattccagcagtagcatgatataagtctcctatccctaatagttctttaccaaagttattaagtggaaaaatcactttacaacacacaagttgtcttctgtaattacttaagactaaacagaccttctgggctcccttcattcactgatggttaaacagttgagcaatattttaatatacattctatgtaattgcacagaattttaacatcataagctattgcctggaatcaattatctcaatcacaatttctctaattgtttttccaaatattttttataaatcaaaatctggtctacttccaatggactcaaaacttgcttacagttccagaacacaaaaatttccattaagttaggacttactacacaacaataataacaataacaataatacatttcaattcatgttttcataccatcttttaaaaagtagcttggcctcccataaaacacttcctcaccctgtgaaaaagatttgtgacagaacagtgtgaacaaggaaagtatttggtgcaaagaatatacgcggcctctgtatgttaacatttatcaatgctacagtgtctaggatatagtctagcacctacactccaaaaggcaaaaattattaaatgaagctcttcaaacagaaaggctcagctgtgacatatgcaccaaaaacaggagttctattttccttggctttaaaaaaaaatcacttctgagaatttcttctgagaccaatctgcaaatagacttttcacactgacctccttgtttgtccaagcaggtctaaagagtgaaaccacaaggttcaatcagttaagctatcttcctgctttaggctccactcaaagagggctattatgtcaatgcagccctgctacaaacaacttctgtaggtgtttaatttctgtcaccagggaacatctgtctatggaatttgtttgtatgtattaaataggatgttctttacgtaacaagcataatagagtaaaacatatgcacattctaagaactttaaacttcataaaaagcactttttcaaaaacttccccacttatgctccacattctattcagccaagtgaacacacattatttcctctagccctaaaatgttacctaatatttattccatcacacgatttctaataaaacttacctagattacatgttaatatatgcaattacatgaacaatatattaataaaatgtgttgtgttaatttttaaatttcccttcagcagagcatttgagattgctattctaattccaaatatatagtaagcaatatgaattcatttttatgaaagaaaatttcatatttctcatatttcatttatacccctgattagaaatatcagttattctaggctgagttttcatctttgggcagctgctttctgtttgtccaactttgcattactaaattgatctaaaatcatcaaaatattctctaaaaggattacacatgagttgtatgattaaatatacttgatttctctacagtattgtcttctgaggtgattctgaatcctgaaagactcatttatccataatcacaatacagaattttagtcacagaagaacctttggtgatatgagacagccctaaatttatggttgagaaaagtgaggctgaataaaatgaaaataattttatgttatcctgaaaacgaatatatgtcactcaatggacctaaaagtaaatacacaggcaggtcattcatgaagccacagcacaaaaaaacaaaatacataaatcaaatacagtcacatgaggcatgcagcataaagaggttttggctgacaatagaccacaaaaatgagggtggtcccataagattataataccatacagtaattttactgtacctcttctatgtttagatatattaaactatacaaatacttaccatcgtgatacaactgccaacagtattcagtacagtaacatgctgcacatgtttgttgctaagagcaatagactaaaccatatagcctaggtgtgtagcaggctatatcatttaggtttaaataaagtccatgatgtttgcacaacaacaaaatcaccttgaagcatctctcagaacgtatccccgtcgctaagtgacacatgactataaaaatgtagctcttttcaagagaggctggcaagatagctgaataggaacagctatggtctgcagcacccagctagatcaacgcagaacgtgggtgatttctgcatttccaaccgaggtacacagctcatctcatggggactggttagacagtgggtgcagcccacttggggcgagccgaagcagggtggggcatcacctcacccaggaagtgcaagaggtcagaaaactccctcccatagccaagggaagccgtgagggactgtgctgtgaggaatggtgcattctggcccagatactacacttttcccacggtctttgcaacctttagaccaggagattccctccrgtgcctatgccaccagggccctgggtttcaagcacaaaactgggtggctgtttaggcagacaccaagctagctgcaggagtattttttcataccccggtggcacctgtaacaccagcaagacagaaccattcactcccttggaaagggggctgaagtcagggagccaagtggtctagctcagcagatcccaccyctatggagtccagcaagctaagatccactggcttgaaattctcactaccagcacagcagtctgaagtcgaactgggacactcaagcttggtgggggtaggggtgtccgccattgctgaggcttgagtatgtggttttcccctcacagtgtaaacaaagcagaggggaagttccagctgggcagagctttccacacctcagcaaagccactgtagccagactgcctctccagattcccacattctgggcagggtatctctgaaaaaaaggcagcaaccccagtcagaggcttataaataaaacccccatctccctgggacagagcacctcagggaaggggcaactgtgggtgcagcttcagcagatttaaacgtccctgcctgccagctctgaagagagcagcagatctcccagcacagtatttgagttccactaagggtcagactagaccacctcctcaagtaggtcgctgacacctgtgtctcctgactgggaaacacctcacagcagggaccaatagacacctcacacaggagagctccggctggcatctggagggtgcccctctrggacaaagcttccagagcaaggaacaggcagcaatctttgctgatctgcagcctccactggtgatacccaggtaaactgggtctggagtagacctccagcaaactccagcagacctgcagtagagaggcctaactgttagaaggaaaactaacaaacagaaacaaatagcatcaacatcaacaaaaaggatgtgcacacagaaaccccatctgaaggtcaccaacatcaaaaaccaaaggtaaataaatccacaaagatcagaagaaaccagcatgaaaaggctgaaaattccaaacaccagaaagcctcttcctccaaaggatcacaactccttgccagcaagaaaacaaaactgaatggagaatgagtttgacaaactgacagaaataggcttcagaagacaggtaataacaaactcctctgagctaaaggaacatgttctaacccaatgcaaggaagctaagaaccttgataaaaggacagaggaatttgctaactagaataaccagtttagagaagaacataaatgatctgatggagctgaaaagcaaagcccaagaacttcgtgaattatacacaagtatcaatagccaaattgatcaaactgaagaaagggtatcaagagattgaagatcaacttratgaaataaagcatgaagacaatattagagaaaaaggaatgaaaaggaatgaataaagcctccaagaaatatgggactatgtgaaaagaccaaatctatggttgattggtgtacctgaaagtgacagggggaatggaaccaagtcggaaaacactcttcaggattttatccaggagaacttgcccaacctagcaagacaggccaacatttaaattcaggaaatacagagaatactaaaaagttactcctcaagaagagcaactgcaagacacataatcgtcagattcaccaaggttgaaataaaggaaaaaatgttaagggcagccagagagaaatgtcrggttacccacaaaggcaagcccatcaggctaacagtgaatctctctgcagaaaccctacaagccagaagagagtgggggccaatattcaacattcttaaagaaaagaattttcgccaggcacagtggttcacgcctgtaattccagcactttgggaggctgaggagggtggatcacgaggtcaggagttcaagaacagcctggccaacatggtgaaaccccgtctctactaaaaatacaaaaattagccagacatggtggtgaccacctgtaatctcaactactcgggaggctgaggcaggagaattgcttgaacccaggaggcagaggttgcagtgagctgagatcatgccattgcactcaagccaggtgacagcgagactccatctcaaaaaaaaaaaggattttcaacccagaatttcatacccagccaaactaagcttcatacgcaaaggagaaataaaatccttcacagacaagcaaaggctgagagattttctcacaaccaggcctgccttacaagakctcctgaaggaagcactaaacttggaaaggaataatcgatacgagccactgcaaaaacataccaaattacaaagcctattgacactaggaagaaactgcatcaactaatgggcaaaataaccagctagcatcataatgacagtatcaaattcacacataacaatattaaccttaaatgtaaatggtctaaatgccccaattaaaagacacagactggcaaattggataaaggctcaaaacctatcggtgtgctgtattcaggagacctatctcatgtgctaagatacacrtaggctcaaaataaagggatgaagaaatatttaccaagcaaatggaaaacaaaaaaaaagcagaggttgcgatcccactctaagagaaaacagactttaaaccaacaaagatcaaatgagacaaagaaaggcattatataatggtaaagggatcaacgcaacaagaagacctaattatcctaaatatacatgcacccactacaggaacacccagattcatatagcaagttcttagagacctacaaagagatttagactcccacacaataatagtgggagattttaacaccccactgtgtatatcagacacctcaaggaggcagaaaattaasaaggatattcaggactygaactgagctctggtccaagtgacctaacagacatctacagaaatctccaccccaaatcaacagaatatacattctgagcaccacatcacacttactctaaaattgaccacataattggaagtaaaacactcctcagcaaatggaaaagaatggaaatcttaacagtctctcagatcacagtgcaatcaaattagaactcaggattaagaaactcactcaaaaccacacaattacatggaaactgaacaacgtgctactaaaggactactgggtaaacaaagaaattagggcagaaaacatttcttcgaaaccaatgaaaacaaagacacaacataccagaatctctgggacacggctaaagcagtgtttcgagagaaacttatagcactaaatgcccacaagagaaagcaggaaagatctaaaatcgacaccctaacatcacaattaaaagaactagagaaggccgggcatggtggctcackcctgtaatcccaacactttgggaggccaaggcgggcagatcacagggtcaggagattaacaccctcctggctaacacggtgaaactccaactctaataaaaatacaaaagaattagccaggtgtggtgatgggtgcctgtagtcccagctactcaggaaggaggcaggagaatggcgtgaaaccaggaggcagagcttgcagtgagccaagatcgcgccactgcactccagcctgggcaacagagcaagactccatctcaaacaaacaaaaaaaagaactagaaaagcaacgggcaaataaataattcaaaagctagcagaagacgagaaatacctaatatgagagcagaactgaaggagatagagacatgaaaaaccattcaaaaaaatcaatgaatccaggagctgcatttttgaaaagatcaacaaaatagaccgctagccagactaataaagaagaaaagagagaagaatcaaatagatgcaattaaaaatgataaaggggatatcaccactgatcccaaagaaatacaaactaccatcagagaatactataaacaactctacaaaaataaactagaaaatctagaagaaatgaataaatttctcgacacatacaccctcccaagtctaaacaaggaagaattcgaatcactgaatagaccaataacaagttctaaaactgaggcagtaattaacagcctaccaaccaaaaaaagtccaggaccagacagaatcacagccgaattctaccagaggtacaaagaggagctggtaccattccttctgaaactattccaaacgatagaaaaagagggaattctcctaaactcattttatgaggccagcatcatcctgataccaaaacctggcagagacacaacaaaaaagaaaatttcaggccaatattcctgatgaacattgatgctaaaatcctcaataaaatactggcaaaccaaatccagcaggacatcaaaaagcttatccaccacgatcaagttggcttcatccctgagatgcaagtctggttcaacatacacaaatcaataaatgtaatccatcacataaacagaaccaatgaaaaaaaccacatgattacctcaatagatgcagaaaaggccttcaataaaattcaacaccccttcatgctaaaaactctcaataaactagatattgatggcacatatctcaaaataagaccagctatttgtgacaaacccatagccaatatcatactgaatgggcaaaaactggaagcattccctttgaaaaccagcacaagacaaagatgccctctcttaccactactattcaatatagtattggaagttctggccagggcagtcaggcaagagaaagaaataaaggatattcaaataggaatagaggaagtcaaattgtctctatttgcagatgacataattgtatattgtatatttacaaactccatcatctcagccccaaatctccttaagctgataagcaacttgagcaaagtctcaggataaaaaaatcaagttgcaaaaatcacaagcattcctatacatcaataatagacaaacagagaggcaagtcatgagtgaactcccattcacaattgctacaaagagaataaaatacctaggaatataacttacaagggatgtgaaggacctcttcaaggagaactacaaaccactgctcaaggaaataagagaggacacacacaaatggaaaacattccatgctcatggataggaaagaatcaatattgtgaaaatggccatactgcccaaagtaatttatagattcagtgtgattcccatcaagctaccattgactttcttcacagaattaggaaaaaactactttaaatttcatatggaaccaaaaaacagcccacatagccaagacaatcctaagcaaaaagaacaaagctggagccatcacgctacctaacttcaaactacactacaaggctacagtaaccaaaacagcatggtactggtacaaaaacagagatatagaccaacggaacagaacagagcccttggaaataacaccacacatctacaaccatctgatctttgacaaacctcacaaaaacaaccaatggggaaaggattccctatttaataaatggtgttgggaaaactggctagccatatgcaaaaaactgaaactggaccccttccttacatcttatacaaacattaactcaagatggattaaagacttaaacataagacctaaaaccataaaaaccctagaagtaaccctaggcaataccattcaggacacaggcatgggcaaagacttcatgactaaaacaccaaaagtaatggcaacaaaagccaaaattgacaaatgggatctaattaaactagagcttcttcaaagcaaaagaaactatcatcagagtgaacaggcaacctacagaatgggagaaaatttttgcaatctatccatctgacaaagggctaatatccagaatctagaaagaacttaaataaatttacaagaaaaaaaaaaaaaccaaccccatcaaaaagtgagcaaagaatatgaacacttttcaaaagaagacatttatgcggccaamaaacatgaaaaaatgctcatcatcactggtcattagagaaatgcaaatcaaaaccacaatgagacaccatctcacaccagttagaatggcgatcattaaaatgtcaggaaacaacagatgctggagaggatgtggagaaataggaatgcttttacactactggtgggagtgtaaattagttcaaccattgtggaagacagtgcggcgattcctcaaggatctagaactagaaataccatttgactcagcaatcccattactgggtatatacccaaaggattataaatcattctactgtaaagacacatgcacacgtatgtttactgcagcactgttcacaatagcaaagacttggaaccaacccaaatgcccakcaatgacagactggataaagaaaatgtgacacatatacaccacggaatactatgcagctatggctgagttcatgttatttgaaaaggatgagttcatgttatttgtagggacatggatgaagctggaaaccatcattctcagcaaactaacacaagaacagaaaaccaaacactacatgttctcactcataagtgggagctgaacaatgagaacacatggacacaagaaggggcctgtctgggggacaggatgggggctggtggctaggggagggatagcagtaggagaaatacctaatgtagatgacgggttgatgggtgcagcaaaccaccatggcacatgtatacctatgtaacaaacctgcacgtgctgcacatgtaccctagaacttaaagtataatacaaataaataaataaataacaacaaaaatgtagctcttttctatgataaagttgaacttacaaattgaatattctaaaaaataataaaatatttaatttatatcttcgttttaaattttattgacatttgattcacaatgacctggatatgtaaactgtacaatttgatgatttctgacctatatattcccatgaaaccatcactacacctaagataacaagcatttctaccagaccctttacaatccaattctcactgtaccctgtttccaggtaacattgatctgctttatgtcactacaggttcattgcactttctagaactgtatataagtagaattatataataaatatttctctattggtctggcttctttaagggtaattattttgaaattcatcatgatgatgatgatgatgatgataatgatatagccatttgttccttttgactgctgagtccactgtttgggtatgatacagtttgtttctccattcacctgttgatggatattgggttgtttccagttttggctattgcaaatgaaactgctatcaacattcatgtacaaatttctgtatgggcacatgttttcatttctcttgtataaataactaggagtggaatggctggtttgggcgaggggggatgtttaatgcttcaagcaattgccaaactgtttactgttttacatttacttcagcgatatatataatttccagttgttccacatgcttgccatcctaatggatgtagagtaagataaaattgtgattttactttgcacttctctgataacaacctatgctaatcatctttttatggtttatcgattattcatgtattttcttttatcaagtattagttcaaaaattttgcccactattttaaaattggattgtcctgttattattaaatggaaagagtactttatatattctggacacaagtcctttgtctgatatatgttttggaaatgttttcttcaattcttgcttttttgtgatgtgaccttactgtgtcatgccccaacggtgaagattttaagttatatgttactttatttatttatttattttaattgagactgagtctcgctctatcgcccaggctggagtgcagtgttgcgatctgggctcactgcaacctccacctcatgggttcaattgattcttgtgcctcagctgggattacaggcgcctgccaccacacccaactaatttttgtactttcagtagagatggagtttcaccatgttagccaggctggtctcgaactcctaaccycaagtgatctgcctgccttggcctcccaaagtgctaggattacaggcgtgagccaccacgcccagcctattttttctaagtagtatggttttaagttttacatgttggtctatgatccaatcaaatttttatgtctggtatgaagttaagagttaatgttaattgttttccagatggatatccagttaatatggtgccatttctgaaaagattttccttttcccttttaattaccttggtaatgtcaagaacyatgaagggtctgagattttaccctacttgcaagctacaagttagcccgcaatggcttccctcatgccagcagaagacccaagacacctgaatcagagacaaagcaccttattactctcagcacgtcaggcagtaagagcttcatgtttgcattggtcctccttaaccaccaacgcccacagggaaatgcagaagcaaggtcagatgaaggctggcacacagcgggtcagtgtcacaactgaggaaccataaacttagcaaaccctcactcttacacagtggctgctagcaaccctacccaggctttgcctaagttgaagacattatgcttactatcgtggtcagaaaacaaatccagttcctccctcctgttagcgcttgagggaaaatgtcatggaaagcaagatactagtcatacttaaaagtgattttagctgggatttctttgtggaaaatattcccaaagattgtgttgtcaccaggccaaacgacatgagccttagtgatgtcatctgccatcttggcctcttccaacacattttctagtgatacacaagaaacatatcccagatttctgctgcagaagatgataacgagagccttcttggacatttaatgattgttggcaagaaatgtgctgctcatctgggcctgagtaagggttactgaatgaatgggtgktgaatgaacattcagatggtggacagtctgtctatcatgttcatcttcatgttcttggagtcagcagatgaatcagcctcctggttaagcatgttttggggataattttcccttctctaggcaatgattaagtttgcacattccaatatgttaaatagcacatttatttttgcctgtgtatggagagattcaggaaataatttttgaaacctttaaaacccatacataataagctattgttgcatggttaaaaataaaagaaaacaaatccagactcttctcccagagaaaggcactatctcaatctcccaagcaagtttactatacaaatgtctttggaaagatagtctagaacaaacatgccaatgcatcttgctcaaaagatgtgtagaaatgtcagagaaccacaagaatttgtcttagaacaggtacatctattaaaaaaatcaattgatcatatatgtgtgggcctacttttagattctctatcgtgtataatttcatcataccaaaatgtgttgattattgtagccttatattagttcttcaaatcaggtaggataagtcctccaaccttcttttttttaaacttctttggttattccaggtcctttttaacttccacatagtttttataatcagcttctcagtttctaccctcctattctattggcaacattttgtatttttcagtgtaggggtcttagacatctttgttttgtttatacctaagtattttatgatttttggtgctattataaacgggattcttttaaaattcattttccaacagtacgctgttaggataaatgaatgcaccaattttagtatattaaccttgtagtttgcaattatgaagattcacttactagttctagtagttgttttatagggttcctaaaatattttcatgtaataatcataacatctgtaaacagtaacagtattatttctcatttccccatctttattcctttcatttcttttacttgctatatttcagtttcccagagagtaccacaaactgcttggtttaaaacaacaaaaatttattatcttgcagttctagaggctagaaatccaaaattaaggtgttactgggccatgctccctccaaagcctctaggaaaaaattcttccttccctcttctagcttctggttgtcctagaagttccttggcttgaggsaatataattccagtatctgtctccatcttcatatggctgtcttcccactgcrtctcttctcttctaataaggacaccagtcatattggattaggacccaccctaaatcagcatggcctcattttaacttgattacattgcaaagaccctatttccagataagaatacattgaaaggtaccagaggttaggacttcaacataacttcttgaggtacacrattcaatccataacacataccttattacaatggctgggacctccattacaatgctgaatgaagtggacgaaagtaggcatccttgtcttgttcttattctcaggggaataagattctgtctttcaccattaaatatgagttacagattcttcctaggtgtgcagagtttgaagaatttcctaatttttctttaataaatggattattgtcacaggccttaaatgcatctaccaaaataataatgagattcatttctttttttaattacactgattgactttaggatgttaaataaaccttgtattcttaggataccttctacttaggcatgtattatccttttatatattattacatttgatttactaatattctgttaagattcttgcatttacattcatgatagatttttgtctataattaccagcttttcaatgtttttatccggttttggcaatttttgaaattttcaaaacatttatttatttcatctcattgtcaaatgtgtggcataagactgttgctgtattctctaattatccttttaatgtctgtagtactattatatatcccccttttcattcctgatattgataacttttttttcttcatctatctgtctctagcccccatgatttccaatgagaaatctgtggtcatttaagtcattattccattgtatatgataagtaatttttctctgttttaagactttgttttcatctgtggtttcagcagcttgattacaatctatctaggcaagattttctttcttattctttagagacagggtcttaggtcttactgttgcccaagctgaagtgcagtagcgcaatcatggttcactgtaaccttgaactcctaggttcaaaagatcttcttgcctcagtctcctgagtagctaggcctacaggcacacaccaccatgcctgccctaattttttttattttttgtagaggcaggggtctcaccatgttgcccaggatattattaaactcctggcctcaagtaatcctcccaccttagcctcccaaagtactgggattacagacatgagccaccataaatcacctagattttctttgtacttatcctaactggtgttcactgaccttcttgaatcattaaatgtgactttctcttcatttacaagacttttcacccattatttcttcaaacatattttccttgtcagtctctcttctctaagagtctaattatattaacatcataaattttgatattattcagcaggtccatgaaactctgttcattttttctcaatcttttatctctacttttcagacacaataatttctaatgatctatcttctagttcactgacactttcctctgttacatccattctattattaagcctatctagtgagatttcattcagaattctatatccagtgaaaataatccttacaaatgaaagcaaaataaagacatatttgataaagcttcctatcattstgtgtagacattaagttgtggcaatgataaatagcattacacactgtagatttttaaatatagatagatcaacacagaaacagatatatatgtatatgtatgtgtgtgtgtatgtgtgtgtgtgtgtgtrtrtatatatatattcgtgtgtgtacatatatattttatgtttgcccactaagagcaactagaagcaatgataatccattataaattttcacatgaagtgcccaggtcctggtttctaaaaattatattcaaataaaagaaactatagctccttggaaaaatggattattcctagacaggaagagatccgtatacaatgagtctagaatatctttttgtgccacagaataaagaagaattcaaggaatcatggagatttttcaacaggaaacagaaaccatccagaaaaggttccaataggccaaatctgggataattcgagcaaaacactaaaccacagtaatggattttaactcatagattaagataagaatccatgagttcatgctaatataaataaataagtcagtaagcaaatgagaaaggaaacttcttccttacagtacaatgacaattagtaaatacggaagtgacaggatgagaaaaatcattttacaactatcatagtaatgctttttttaaagcagtagtgcttcagtcatgcaagaatcaacaggtgctaaaactagagcatttaactttgatgagaaatagatatttacaaagtctcaaagtattttcacacaagatatttattaaaggataaaataataacttcataggggacaaactggcaaagtggagaaaccaccttaacaaaatgatcaaagttaatataatcaataattggacaaatctttataatgtgtctccagatctgatgcactgaaaagaaaacaaaaacacttccacagtattcctgccaagactgcataaattgaaagctaatcatgaggaaagagcagataaacccaagcttatgaatattttatcaattaactggcctacacatttcaaaatatgtcagtatcataaaagacgaagaaaaaataaggaactcttccaaattaagggagacatgatgtctaaatgtaattaatgtctgagcctagatcagattctaaatcagacttcttttgttttcccataaaggacattactgggccaacgggtctaatttgaataaaggatacagattaaataaataaaagtactgtatcaatgttaagtttctgactttgatcaatgcattatggttgttttagaccatgttcctgattttaggaaatgcatacttgagtatttggggataaaaacataatcatgactgtaactttatctcaaatagttcaaaaagaaaaaagaagaaggcagagaaaacaactatgataaaatgtttccatttttcatttaggaaatctgggttatgagtacatgagaattatctgtaattctttctacaatctttctttaaatctgaaattatttcaaaacaaaaagttagaaaagtaaagagaaaatgctaaaaacttgttgatcaagtgaaagatttgagaagggctgcaatattaataatttttaaatcacttctaccttttaaatgtgaactgaaaaatttctttttgcactggtagcaaaccaaactaaataatttcttaattaataagcacaagcactaattatttccaaatgaacgaaaaaagtatatgttactaaactggggatcaaaatctgtcccactacaacagcagtcaggtaggagtctcttcaatgactacacagaaaagatttggtgaaatttgcagaaaagtatctattacttgtatatcatcttactctggtttagttcttaaacatttggataaccctctgtttgctagtactagactaatgcaatcagcagggacagagaaactatataataaaaaatgatagtccrtggaacaaaaactatttaaggaatatgaatgaaggaaggaaaccactgaactgtgtaaatggatgggaagaatatacagtaattaaaaattgactaaactttaccatactgaattaaggttatgaatgtctaggaattatattcccatatatatatcagtaaaacaatgagactgccccatcggtaaacccctatccttcaaataaaaccatcagttggttaatttcttatgcagtgaaaatgacaaaggctcacaagattaaaaatggtcaagtggcatgggtagtgagtctgcatgtatcatgaagcctgttacaattccaacaccaacctctttcccaattcatactttgaggaataatgtgaattcaaaggggtccacaacaaaaacaaaaacttcccaactcttcaataaaacctactacatatacaaaaaaaatggaaggggccagagaagtcatcccatcccgctagtaaattaatcccctctttacaataataatctagacaaattgccatttagcttgacagggaaaggactcactttgtgaaggcagcccaatcaatccatattgagtgattccaacttttcacatcattacatattaatgtaatctacttccctaaaatttctatatactcagtgatcctagtcctgcctttyataagaaggtggaataattttatgctcattgtcagaaatcttttctccagatcaggttccctagaattgagaagtccttctctagacttctcatgcattccctccaaataaagtatctcttcctaaaagcatgatcttgttcatcttacggatatccaattattccttaatatataaagtgtagaatgaaacaaatactccaaaggtatcctaaagagcagacaacagagtacaggtttgatatggtttggatctgtgtccctgcccaaacatcatgtgaaattgtaatcccccatgttggaggtggggcctggtgggaggtgattggatcatgggggtgatttctcatgaatggtttagcactattcccctagtgctgttctcataatagagttctcagggtatgtggttgtttaaaagtgtgtagcacctcccctccctgttcctcctattctgcccatgtaagtcgagcctgcttcctctttaccttccgccatgacctcagtaagtttcctgaggtctccccagaagcagaggccgctatgcttcctgtacrgcctgtagaaccatgagccaattaaacctcttttctttataaattactcagtctcaggtatttctttacagcagtgcaagaactgactaataccaggggcctcttggaaactatttagaaactattaactgctatagtccattattattttgacagttttaccagctttatcatattgttggctcatataaaacatgcagtcaactaaaacctttctgcactgtttcctcgaaattaagtgaatattttatatatcattaatgcagacatatatatttattcacattaaataacatattatttgccatgacatagcacrtcagtccactgtgataatgttaaattcctatttctctactcaatatattagctattcctttcaacttttcatgccctaaaaatttattttgtgtaccttcatctaagtcattcataagaaatgtggagcagatttcaagagctccctttccaagccagtgctgattcatccaaaccactctcttttggaatctttagtcacccaaccatgaagaatttcaactgaaagttgttctctccagtagagtagtttttaaattccagtcttcataattcctgattagtagtaaatgtgtgattaataaattttaactgaagaaagtgaaaaatattaagaaatcagaagagcagaaaaggaatcacttacagagaaaataaggataaaaggataagaccacatatatagtgatkacttttgaaacattatcttaggttttaacttgattgttcagtttgaagaaaatcacaaaagtaaatagcatcattatttccccctacaatcagtagctcatagaacagagcacagtctgccaagattcccttataaaaagaaactccgagaaagactaagtaagccaaaatttttcagatgcttttactgtaagataatctaaaaatcaaccttgtgaaagaaagctctattgtaattccatatttgaaagaataaaattaattttggtatgtttaattcagatattaatgtttgcatgattctcattttaaatataacataatattgagcatgaggtattttggatgtaatatgctgatatgaaaaatatctttaaagaaaggctgaattctgaaaggcaacactgttaccttaaacttaggccaaatgtaaagagattatattgaaagagaaaagttttctctcagactgcattctgtcaggcagactccaatttatcatttttacctactttctacgtgcaataccaacatcagtggtacttgtatatctttatgaacagtaacatctgcaactaaatgcagaacatcaatataagaatactgctcccctaacacagcctcctgtttatctttaaattttaaaatattatctgttatagcaatagtacctggttcaaatagttataattttcaaaaacagtagtatatagaattttttaaaattatatattttgattatatattttggggtaaactaaaggtgaaggcaaaaaggaaaaaaactgcctgaaggcctactaaccacataagggactactccatcttgctaacatacattttcaatattgagtaactacgctagaaacacagacttcgactaaattcattgtgagtagaattcagtaacagaaaccaaaaagaccaagtaaaatttaaagaatgaatttcctttaatttaaaagcagagataattatcaaacttgtaaagaaaaatagaagttccgaaatcagactgcatttaaaggaagctattttttttttcttgccatctctgatgggtctagagtctcactctgttacccaggctggagtgcagtggcacaatcacagctcatggcagccctgacctcccggactcaagcaatccttccacctcagcctccagagcagctaggactacaggtgtgtgccaccatgcccagctatttttattattattattatcattatttgtagagacagtgtctcactgtgttgctcaggctggcctcaaactcctaagctcaagtgatcctcctgcctcagccccctaaagtgctgggattacaggcgtaagccacagcatccagccagtatgaaatttaatatataggcaaatgctctttgatattaacatttctggaactgtgaatagtttgtaccctctgaatagtacatacagtaccagaaatgctaagatctctagcatggaaaggctcttaatagaacacatcattcattaaataatttaatactaagttccatttttattataatcaaatatttgctgctgctcaagcctacaaaacctgaggaactattttccctatgtggcaaggaacactactttcctgctaagccattctgcccctgtcctcctctttacctggctggatatgctgtgtgcactattcctgcctctttacagccaagtaaccagaattcacttcatcactctatgaatatatatttattcctttcatttcaactggctgtcaataattccaagctcctagttgcttggctaacaacattaagccctaactgctcaaactgctgaagcacaagttctggcagaattgtacaactcccagtattcttgaaaatccaaaggagcacttgtaagggtccagtgattactcctgacctctacatttcattacaagtcatcaggatgcatctctgatgggtctagagaagtgctaatcaaagctggaactcaaaacttccctactacctagccactggtagcattaggaaaccgccacatcttgatggcgaagacgttaagaatcccagcacacctggatgctagagaacaatgctatcatccctgtcaagagagtaggcagcaacctctttctttaaagcaagagtctttttttaatatatattttcttcattatactttaagttctagtgtacatgtgcacaacgtgcargtttgttacatatgtatccatgtgccatgatggtgtgctgcacccattaactcctyatttacattaggtatatcttctaatgctatccctccccccttccccgaccccatgacaggccccggtgtgtgatgttccccttcctgtgtccaagtgttttcattgttcaattcccacctatgagtgagaacatgcggtgtttggttttctgtccttgcgatagtttgctgagaatgatggtttccagcttcatccatgtccctacaaaggacatgaactcaaccttttttacggctgcatagtattccatggtgtacaggtgccacattttcttaatccagtctatcactgatggacatttgggttggttccaagtctctgctattgtgaatagtgccaaaataaacatacgtgtgcatgtgtctttatagtagcatgatttataatcctttgggtatatacccaaaactccactctctcccattcttcaatggggtaggtgtgaccatgataccaagttctcaccaaataagaacaaatagaatatgagcagaatttaaatatcccacttccagaccactgcttttaggaaagcagtggtactccttttacacgtttacctcttctaccagaggacaacagtgaagcttacaacgtacatggtgatcccattagacagaaggagcttcatgttcctgaaagaatgtccaacaaacctgaagcagtaaggactatcatgtgagtaggaaataaactttactgaactgagccattaaagtgtggatttgttactgcaacttagcctactctttaactaaaacagaatcccacaataaggctgattccttcatccattgttcctcttggcaaatagagataaatctataaggagtctctctaatgcattttaaagcttcatatatatctgtatgccgattgtagggagatttcaagtaggtgtttccccctaaaaaccccttttatgaatcagataacagaaatgttaaaatggagtagaagagtaccatcaaactacaacccaccaaaggcatctgattctcagctgagcttagctgaccatatttatcatgtaatttgtttcttaccataaaaccayaaaatagacattatttcaattttacaggagaaaaaactgaagcttggtttgtytgtgtgtttgtttatttatttgagatggagtctcactctgtcccccaggctgaagcgcaatggcataatctcagctcactgcaacctccacctcccaggttcaagtaattctcatgcctcagccttctgagtagctgggattacaggcatgcaccaccacgcccagctaatttttgtatttttagtagagacagggtttcaccatgttgatcaggttggtctcgagctcctgacctcaggtgatccgcccgcctcggcctcccaaagtgctggtattacaggcgtgagccaccacgcctgacaaagcttcgtttctataactttgtaacagccacatatggaatactaaggatagtatttaaaatcgatccaacagatacctaaagctaactcttatttatactatacatggattatacaatatttcctctccaggtttttacatatttgttgatacatacaggctataacataaaaattaccatttcaatacaagataatcaggccttaaaataaagttactatttcaattaagtaaaaattactgggttcttatacataataacacaattgaggagacatatgtatgggaaatgagagaatacaaacacaaaagaccttcttgccctagagcagtggttctcaaccgcagattttgccctccagaggacattcaagcaacgtcatcttaagacatttttatttgtcacaaattgggcgaggaggtaccactggcatctattggggtgaggctgggaacgctgctaaacatcctacaatgcacaggacagtctcccatgacaaagaattatctgggttaaatgtcaatagcatcaaaaatatctccctagaataatttacaatctatggcaaaactctgtactccaatgaggcacctaaaatttaggatggccattcaaaaatttattatggccgggcacgatggctcacgcctgtaatcccagcactttgggaggctgagatgggcggatcacctgaggtcgggagttcaagaccagcctgaccaacatggtaaaacctcgtctctactaaaaatacaaaattatcctagtgtagtggcgtgctcctgtagtcctagctacttaggaggctgaggcaggagacctgcttgaacctgggaggtggaggttgcgatgagccaagatcgcagcattgcactccagcctgggcaacaagcgcgaaactccgtctctcaaaaaaaaaaaaaattattatggccattcartgaaaaaagatcaggcagggaaaggagacaatggtaagacaactgaattgctcaacaggctattagcaaataaaccctgtctcacctccaggagaccatatcagaattgagaagggtaagggatatggcaaagtactctttataattagaatgtagtaaattttattttttctcagtagtttaccagaaggtattatcctactaaataaaatgttaatttcctgtgttgcagaaatatataataggtcatgcactttatatttaggatcttcctttcaaaaaatcaaaggcctagccaaatatcttcttatataaacaagcattaaaaatgttcttggcygggcaaggtggttcacgcctgtaattccagcactttgggaggctgaggcaggtgaatcacctgagttcgagaccagcctggccaacacggtaaaaccctgtctctactaaaaataacaaaaattagccgggtctggtgatgcatgcctgtaatcccagctactcggggagctgaagcaggagaatcacttgaacctgggaggcggaggttatagtgagcggagatygtgcggcttcactccagcctgggcaaaagagtgaaactccatctcwaataaataaataaataaataaataaataaataaataaataagttcttaagatctcaatttattttaatccttatgaaaggtgcaaattgaagcaagtaattcagattttgtggaaagattcttggcaaaaattaacaaataaggctacagagagaacattaagacatttaaaaacttaataaaaatatcctaccatcaaaataccactaaggtttttacaaaattgaaatctataagcaagatgctaaaaataagtgtagattacttctaagatactttccacttctaaaaattctatgattcttctcatcaatttttttttgtatctttagaagagaataataatttatgtctggtaacaagggaaaggctaattaatttttctatttgcatctgttcaatggagaaaaagaattcacaaaaattgtgaagtggtaaggtttgtagcacttatttatataggctactataaatatagccagaacatttttctaaaccaaagatcttaaagaaatgctttattaactttcttggcaggtgctgaccataaccagatgctagtatatatcacttttacaacatataaatgatcctaaaatgagctgaaaattgaacttttgaaaatgaaattaggtttaaattcacaaggtgagtttgtaatttaaaaccattctgtggattttcttttttgcatatttaagtgttttgaaatgtgaataaatctgtgcgattctgaataggttttcttaatgcattttatatctgtgattatatgccttgaaacttctaaaaattttctttaaacttttttaaaaagtttattgtaagacaaaagttcaatactaatgttccagtcattagtttttttaaactgttattctctataaaatgaattcatacagtattcacaaatcctcagtttactgagtgccctgaataaacaataaattgttaccatatttagccctgtggagaaaactaaaaatagattatatcatataattacaaagtgaaataacaagtggaaaaaatgaaaaaattaaaaagtaaataaatcactttatcaaaattaaaatcatttacctttcatcaggaatacaacattgagcaaaacaaaatccctgcccacgtggtgcatagtctagcagcytggcacccaaccaacaaaatgccaattctaacagcttacaaacgaaagtatatagtttttccatgaaaaattacytccattatctctgttctaggataatcagaaatctttactcaagtcagcaagagaaaaatatattaaaatcctcttttccacagggaaacattcgacagatctttgttaagatatggactgtagtctgtgggaaggaatcatcatttgtagtgtgtccttccccttcaccatgacaacgtgcagcagcaaagctggatgaagtgcatgtacccatctgtcatcaggagtatatttaaccaatgactacaggacagcgacatccaacaggtcaccagtcataccacagtatacggtatctactctcagtcatatccagtcatatccattctattattgagcctatccagtaagcttttattctatgcatgagtactctggattagccctctaaagaaggttcatttaggcacgtagtatccagaattgatattaataagacattcctattcttttcagagtctttaagcagctccatatacatggaactcattcattaagtcggtactcatagattagttaatttaaaaaggtataattatgttgattatagcagaaatgggatagtgacaaagtaagctttctttaaagatttttaaacatgtctcacagacttaaaagaggccaaatgtaaccyaggtgtgtcctctcttcctctccttccaatagcttttttttggccgtcatactgttttaaaataaatttctttacaaaataaccagtgattgtgctgtcacagcttagcaaaaaagcacaaaggaatgcttttatatatctttagtttgaagtgatgcacagatctgctccattcatatatttttatgacagattacctgatactcttggcacaataatttttttcctaaaatgctaaaaaagcaggagatgctcaactttttactcaaagtcaagcagaagaagaaaagttaaaacaatctatcattcccttctctcctgacaagaaatgccaccacactgtaacatccaagaactttacttccagtactgcacactggcccatgtgttctggtacaaagggtgcaaaatccaagccttcacctgctccctaccttgatcttttagaataagtacagatgggtagctaatctacaggtcactccttttcttcctctttacttttctgattccatatgaagataaaagaaagttcaactgtgtgtttctaaggcagtggttttcaattctgactacacattagaattacctaaggaatccaattaaccatgyctaggccctaacccagaccaacaataaatcagaatctctggggttaagatcacactggtaattttaagaagctcccaggtgatygtaaagagtagccagggttgagaaccagcattataggtcaaayaaattactaagtatttgatctatgtttgggattgaaagttacctctccctattttaaattatttctgcaaaaagttacataaatattaaaaccagggttatatttttgttccctcattagagagttttcagaataaaggagcatccccttaacaatctcatttttatactctacatggtagactttagtttctaaatgatcttacttggaatcaacaaggaagcatttttttcccaaggtgcagaataacaagttgagttaccatgttttctaacaactaacagaacccggaaattttatttccttgtttattttagagataagcatggactacattttatgcatgattcttcatattaatggagacgtgtaagaataattattcaagtttttcctaataggcttgaatctgatgactgaaaacaggagacgactgttttctttagcaactaagaatgacactttactaaaattacttattaaagaatcctaaagaaaagaaagacacaatcaccagctaaaaagctttttaaaaagcttttttttaaaaaaggcaattttctgatttattcttacatactttaagacttatcctttacaagtgtcttatgggactttttttacaagttatgatgacactggcaactctccaaccagcaggactcaggatcagattcccatactcacatcctctgggtcctactgcagtgtagccatccaaggagtaatgaggctggccctcccttttatagtcatagctattacagacatcatggatagaatgtaaatacagagtaaattcagatgaacacttacatcacagtttaaggacacctgaagagagtaaactatgtacgggtaagttagacacctatactgtgccatccaattaactaatctcagcttgaagacaaatcatgatttcttcctgactctacactgttctgtttttgcctaggagatgatagttcctctttcacttttctttcctgcgaaatcattctacttccaattttaggccaggtaatatttttcaattctgtatattttcttttaactctgggttccaagctcacaaatgcaacatcacgtctaagttgctctcctcacctccctaaaaggaatccctaatttgrctttcctctgactttaggcaccaagcacctttctcaggtcccctgaacttattcccatcttcacgtgtcctacctggagacacccacctcagctacctctcaactcttccttcttataacttacaggtcttggataaactctcagattgttcatgatcctgactcctcctcccaaggccttcttaaatgaaatatagttcatatcaacatatgagaccttcagtgtatgaataaatcctaatctataatattacaatttttgtagtaatagtcatgtacttaaaatatcacactcattatttttaataacatgtttttgaacatgaaatggcctcttaatcactgggggttagtaagtttcagtacgaaaggtaattttcactcccacaaaggtattttgaagggctagctatttccctctcaatagaccaacttagtgtttaccatagatgacgccactttttaattgctgcagagagagcacttattacaaaattctggtttctaaaaagcatggcttgtgacactcacacgaacactaaaacatttcaaagaattttgtcagtgattaactttttgagtagaaactcctgaattaaagcatctcaggaagagctctatggtttcccttgtgttttttttgtttgtttgtttttctgtttttcaaatatgcctctggaaagtgacagtttaatatcagattttaataaatggctttgtcttcaatacatttagaaaacttctaatgtaggctccagctttcagagggctgcaaatagtaactctgaactgattaacaaaaaatactaatcaaaatgatggtaaatggaaaatgaaaaataactggttggattggactcacaaatcaaaataaaatttgtgtttcaactgggcttgatgttgcaaaagtcacactaagcatccttttattctcctcataaaggataacattgtgagagtcacatggcaattggatctcttaagattttcagaacatacttcttagtgtattacatgacttacaggctctcatttaccataaagatttaatacctctggactttgaacttttttgcctttatatataattgtacgcttatcaccatcatggttatgcgacatgagagaggaaaacaccattgaaaagcttcaacttttctgtcaacaacaacacaaagcgttttytgctattgttgtttgtttgtttgtatgttttactttcaatagctcaactgaatagctatataaagaaatgttacttatcatgcaagccaagtccttatttataacagccttccctgaattcaaatacaagtatacctccaaatccaaacaatacaggtccccagagacatgtgaattctagatcagccttctaccagtcaaaattcttaactataaaacatcaaattaccacagcagtaatgacagatctgggaatcactgttttctcaccatctgcttatatgacaaacaaattattaaatgaggatgttaagacacagggctctacacaagataattacaattacaatttttaaagatcagaatcaacctttgaaatgacattttcccactaaatacagtgatttccttttcattctctttaaccaaaattgcaagtcaattctgcgttaactaaagcaaatagattatgtatccttttttgaaagagaatattcagagatagtgtagaatcagcaaaaggaacaatgaccctggaatcctaaccctgcaacttaactgtgtgacttggagagagacgattagcctatctgcatcatttacctcatctgttcacctaccttacaaagaagttgagggagaaaacaaaataatatgyataaaaattcttcctaaatgccctatcttttatcaatataagataaatcagtcaaaaactacaaattatatttccaataggtaggaaattttcacctggaaaaaggaaaaaaataaaggaaaaagaactcaaattatgtaggctatagtaagagtacatgaaaaagcatcaattactacataaaataagatttgtttaaaaaaaaatcaaactactaagtaccaatgttagaaaggaaatggctactaatatacatcatagagatgtaaacayatgtgtatgtgaagtgtacatgcaaaaatctacatgaaatcaacagccatgaaagaacagttttcttgagatctgttaggcctgtcatgtgcacacactgcaatgcaatagaacagatttattttctcattctacaaacacttcctgaacacctatatcatgtatgaagcattattttgagtgtttaggacacaatgatgggtatgaaaaattytgccgcactacttacaaaagaactacatcagaactgcatgatgaatcttaatttaaataaggtatcttggctgggcgcggtggctcatgcctgtaatcccagaactttgggaggccaaggcgagcagatcagttgaggtcaggattttaagaccagcccagtcaacatggtgaaaccctatctctactaaaaatacaaaaaattagcctggcgtggtggcaggmacctgtaatcccatctactcagaaggctgaggcacaagaatcgcttgaacccggcagtccgaggttgccaagagctaagatcatgccactgcactccagcctgggcaacagagtgagactctatctaaataaataaataaataaataaataaataaataaatwaataaaataagatatctcagctggttttggtagtgatgctattcttcttgtgctaaaaagtaatgcaactcaaacagttgcacacgatcaacaatttcttaggagatgttttgttgattttattgggcttagttcatctgttcattggatgaatattcattgagtccctagtagccactacagatgcatttcaaaggaaacctttctaagactatctgaggacatatgtataactaaattatttggtgttttctgttgattttcttttttaagtaagaagaaaatgaaataatagaatagcagcaacataattcttcaatattaaagtctagctataaccagtagactgaagagatgaacctagtgctgtatctatcctgcctgtccacctctcatccatctagagtggctgtcccatttctataccataggccatactgatgaagcagtgactgaayacaggacagctttcaggaagaattaaactgtagctcttagattcagactgcagactgcccataaagaagatttctgccaagtaacacagtgaaagctgttgacattccctgcttccttcaatatgaaacttccccaacaattcaaagtcacaatccatgatctactacttagagttcaaagtacatcattcatcacaatatagtccaaatagtttctaggagattaaatgacataaacacaacaattgaagaggaataaggaataaaacaagatggatggcagtggctcacacctgtaatcacaggactttgggaagccaagcggggagaatcacttgagcccaggggttcaagatcagcctggcagcatggtgagaccctgtctctaccaaacatttgccaggcatagtggcttatatctgtagtccctgctacttgggaggctgagatggaaggaccacttgagccccaaggtcaaggatgcagtgagccatggttacactactgtaccccarcctgggtgacagagtaagattctgtctcaaaaacaaacaaaaaaacaccaagaagtatgtagccatcttcatacagtttttgtaaaacggataagcagaaatcttatatactgaagtgtgagaaaacagaataaaccaaatgttggactggatttaatataaactattccaagattgtttaaacagctagaagttacaacagagcccatgtggactcaatgcgccatacaaagattaataggaaatggagttctcaagaatctcatgctgaaacagctcaaaatcaaagagaccttttaaaaaaaatcaagctgactaagaaaaatcagacactgagttaggatataagaggtcttatttcaaatgctagaaaaactcatataagccagacagtttaagattcattactttaagacaaaacatttgacccttctagaagttagtttcctcctgtaaaatgagaggggtaaatagttcacaggttttcaaattttatttttgggagtaccagattgctttggtgttaggtagagaccaacagagctataaacctaatttaaatgagagcagatgaagttttaactattttctatattggggtcctgtgtagaatttcattttttaaaaaaggagggagggctctaattctgtgaagagctactcactaaacaagaaaaataaacaacctcaggttatatttattcaaagtcacaattaaaataaattcttctattaaaaacagaaactgttccacttctgccatgatggaataagtaaaattgtccataccttcttactgtaagctactagaaaactgaggaaaaaaaattttttttcaaacattgagacaacaggcagcccagaattatgatccatgagtgaaggaaaaaaactgagtaaatcccttttccataagaccctttccataacagtgcaggctaggaatcccaagtagatcacagcagtctcactcrgttgaggagttaaaaataagactctagggagactgaagaggccagagtttgtagggctgagtactagtgagctcagagcttggcagagaaaaactccagaaatcttcacagaggccccttacgccaatagctaactactaagttacacatatacacrgaggagaaaattctatgagactgggtgacctattactggggagctgcaagctaaataattcccagtggtctcactgggctgcaagatgcttgagttctgacagacatgaatagagagactcaaacaccctaaacactgagcagagtgttacatcttagtaggagagctaccctgcctccacaggggtgtcaccagacccactataacgaagttttgataaaagcctcaaaaaatgaagctaaaccacagtagctttgacagcactcaaaacaaatttcaaaaaatktaaaagaagataataaaatctagacaatagtataatagtcataatatccaacatccaataaaaaatttcagatatgaattttaaaatgtgattcataaatgggtgaaaaaaagagactagaacagacccaaaaatctaagaaataataaacttagtagaccatggaaatgttaaaataattaatataaataggctcaaatatttacaacaaaatatgaatatgatttaaaaaatggaagatatataaaagaaaatggaacttttagagaccaaaaacatacagagtatctggccaggtgtggtggctcacgcctgtaatcccaacactttgggaggccgaggcaggtggatcgcctgaggtcaggagtttgagaccagcctgaccaacatggtgaaaccccgtgtctctaccaaatacaaaaaattagccgggcgtggtagcacatgcctgtaatcccagctacttgggcggctggggcaggggaattgcttgaacctgggaggtggaggttgcagtgagctgcaattgtgccattgcactccagcctgggcaacaagagcaaaaactccatctcaaaaaaaaaaaaaaaaaaacacagagtatctgaactgaaaaatgaaaattacagtaaattttaacacactgcaatacaaactaacaaaaatggaagagtgagaaaaaatggactgcaaaaaattaatagagcctaagtagcctataatagtaaacaagtgacatatgtgtactttgaatccaagaataagagaaggtcacaaaaggaatttgaggaaacagtggccaataatttcccaaatttttatgaaaacaataactcacagatgctcaagtaagatatgcataatgaaaaccacaccaaagccacatcagtatcacattagtaaaaaccagcaaaaaagagaaaatcttaactcatctgtaggagttctttaaaaagtctaaagaggactttttttgtcagatacatacatgacaaatattttctcccagtatctagttttcttatccatttattaacagtgactttttataaaaagcttttaatttttatcatgttcaatttatcaacgtcttttatgcatattttctatgttctgtataataaatcatttcttatcttcaggacatgaaaatgttattctgtttttttcctagagatgttaaagtttcagctatctatttaggtctacaattcatcacatattaacttttgtatagcataagttagaggtcaaggtacatttttttccccaagatatatccagtccttctaccagactggaaaacattgtaatttatggagaaatagactgggtattcagaaggactttgtctcactagtgaartaattatgagccatggaccagatgctgttcttgtactgttcaaaactttttaaagcaagatccaaaaggataaaattatttctatataacttaagtgcatcccagaaaaaaactcaagaatatttatagaaatacaaaaatatctagtactcaataaggtaattttcagaatggtatccaatcacagagtctcagaaatgtaaagaagcaagaaagtttgaacaataatgctgagaaaaatcaattcattgaaatcaatatagaatggacacaatgggcacaaattttagaaatggtaaatatggacataaaaccatcattataactgtatcatagagtcaaaaattaagtagaggtatgggagatactaaagaagactcaagcttctagatgtgaaaattataatgtctaagataaaaaatatgctgaataagattaacagtagagtacagaaattgcagaagaaaagtgtagtaaatttaagacataatggaaactatccaaaatgagacacacaggaaaaaaaaatttataataaaaaaattaaaagagcatcaagtaaaatatgggacaacttcaagcaacctaacatatgtgtgatttgagtcccctaaggaaaagaaaaagaagggaaagaaaacattggggggaaaaaatggccaaatttttccaagttttataaaaactctaaacccatagatccaagaagctcaacaaaacccaagcatgagaaacatggagaaaaaggcaccaaggcatatcataaccaaattactcaaaatcagcaataaaaggaaactcttaagagcagccaaagatgaggatgagaggccatttctcttgaaaaacaatgacagcaagaagataatgcagcaacttctttaaagtaatgaaaaaaaatatcaacttagaattgtataatcagtaaaaatatcttcaaaaataaaggcaagaaaaatactttttttcagatacataaaagctggaagaattcatcactacattagcaaactgcattaaacagtatgttgaaaggataatatattatgaccatgtgagttttatcccaaaaatgcaaatttggcttaccttgaaaaagcaatttgggttttgtgggttttttgtgttttttttttttgagacggagtctcgtttggtcaccaggctagagtgtggtggcgcgatgtcaactctgcaacctccgcctcccaggttcaagtgattctcctgcctcagcctcccaagtagctgggactacaggtgcacaccaccatgcccagctaatttttgtatttttagtaaagacggggtttcaccatgttggccaggatggtctcaatctcttgacctcgtgatccgtctgcctcagcctcccaaagtgctggaattacaggcatgagccaccacacccgcccagcaattagttttttaaaaaattaatgtaattaaccaaattaataacttaaaaatctaacattattcctaataaaaactctctatttaacaaagaatagaaaggaacttcatcaatttgataaaaagtacattttttaaaaatccagctaacatcttacttaatggtgaaagactcagtgttttccttttcagggctcaggacattatatcccaaaatacggcatcttggcatgaacacaaagatcactctgatcttctcccgccctttcttcctgggtccataaaaagaattctccccaccttctcccctgaagaccctatgtgactggtgtcctgccctatacccagcgggaaggaatgaagacacagaagaatctgaacaaacaggcctttctaagtttcctctatgatcccaatagattatatcttttcagtccaatcatacttctacatgactatttatttgttcatcgcaccwatgaaaaaaaaaatacacagttttccctgggtctttaagtcttcatttctgagggctcttgtgtcagataaaacttcggttaaataaatttgttaggcttctctcttgtcagtctgtcttttgttataggatgtcagccataaaccttgtaatgggcaaggaaaagatatttcttttcctcccctacatccctacaatcaggaatatgacaaagatgtctgcttcaccatttttatccaacattcagctggaggctttagccagttcagtaactcgagcaaagagaaaaggaagatgtaaaagtatctttattcacagacaacatggcagtctgggtaaaaamtctgacaaaatttccaagctactkctactaatagagtccagtaagattaaaagatataaaataaaagtatttttaaaacccactgcatttctagatactagcaccgaaaattgaaattttaaaaattgccatctaccttagcagcaaaaataggaaatatttaggaataaacccagcaaaaaaaaagtgtgtaagatatgtacactagaaactagaaagcactgctgagagaaattaaagagacctatacaaatagagctacagcttgttcacaaaaactccatattgctaagatgccaattctccccaaattgattcacagattccaaacaatacaaatcaaaataccagcaggctcttttgtataaattgacaagctaattctaaaattcatagacaaawgaaaatacttagaggagccaaacaactggaaaagaacacagttcaaaggctaactgttcctgcttttaaggattattattaagctaccataacagaatgtggtactggcatcaacacaagacaaatagatcaatggaacagaatagagaacccagaaatatataaaatacataaaatagagcacccacacatatataaaaaactgatttttgacagaagcaattctgtagaaaaaggatggtctttttgaaaaaaggtacaggaacaactggatatccagatgcaaaaaagaaaaaaaaaaccatacacatactaatccatacctctcaacatacataaaattaactcaaaatacatcatatacttaaaagtaaaactaaaactacaaaaatctagaagaaaaagtagaatatatttgtgaccttggattaaccaaagatttcttagatatgacaccaaaagatgatccatgaaagaaaaacttgctaaagcggacttcaacaaaatattcagaataaatatattacttatattcagaataaataactcttaaaacagtaagaaaacaacttaatttttaaaaaatcaraaaatatttaagcaaatttttcacaaaataagatacacatatgattgcaaaaaaaggcaataaaaagatgcaaaatcattagccattagagaaatctaaattgaaaccacagtaacattctactacatatctattacaatggctaaaatttaaaaagactgcccagcccaagtgctggcatggatgtaaaggaaattgaatgttcacatactattagtgggaatataaaaatggtacaatcactttgaaaaacagtttggcagtttctttaaaagtaaacatacacctacaatacgatccactcctaggtgattacccaaaagaaaagtgcatgtttatattaaaatttgtatacatctgttcatagcagctctatttgtaatacccaaaactgaaaacaattcccacatctgtcatcaggcgaacaaacaaatgaattgtggyacagccataaaaaaaagaatcctagctagcaacaagaagttagaaagtattgatacttgcacaacatggacaattatgctgaacaaaaaggctggatttaaaaaagagtacatactctgtacttccatttatatacaatcctagaaaatgcaaactagtctattatgacaggaagcgtatcagtagttgtctgaagtgggggaagggaagattatagaaggactcaaagaaaactttggggtgtgacattcattttcctcattgctatgatgatcacatagggtatacattatgtttaaacttaccaaatagtatactttaaatacgtgcagtacattggatgtcaactatacctcaataaagcaattttaaaaggagaaactttgaataagagtggtgacaacaggccgggtgcactggcccacgcctgtaatcccaacactttggaaggccaaggcgggtggatcgtttgagctcaggagttcaagaacagcaggggcaacatggcgaaacctcatctctgccaaaagtacagaagttagctgggtgtcttggtgtgaacctgtgttcccagctactcggaaggctgaagtgggaggatcactggagcccagaaagtcaaggctgcggtgagccatgaccacgccactgcactccagccctgggtgacagagcgagactctgtctcaaaaatttaaaaactaaaaaaatataaagagtggtgaaaataaaaaggaaagaaaaaataaagattaagaaaagaagaactattaccaatcagactcccaaaagcataggcaacaaacacaaacaaatgggactatattaaactaaaaagcctcagcacagtaaaggaaacaatcaacagagtgaagagataacatgttgaataagaaaaaatattttcaaactattcatctgacaggagattaatatccagaatatacaagaaactcaaacagaaaaacaaacaaaaaggcaagtgatccaatttaaaaatgggcaaatggtctgaacagacatttccctaaaaaagacaaacaaattgccaaccaatttaggaaaaaatgctcaacatcactaatcatcagggaattacaaatcaaaacaattaggtattatctcattctaaaatggctattatcaaaaagacaagacatagcaaatgctagcaagaatggggagataagggaactcatacactattggtgggaatggaaactagtacagccactatgaagaacagtatggaagtttctcaaaaaactacaaatagaactaccattgctggggcatttttccaaaggaaaagaaatcagtatattgcagagacacctgcaaccctatacttacttactacagcactattcacaatagccaagatatgaaattaaatcaggtgtccgacaacagagataaagaaaatgtggtgtatttatacacaatggagtactattcagccataaaaaagaaggaaatcctgtaatttgcaataacaaggatggaactggyggacattatgttaagtaaaataagccaaaaacagaaagttaaayaccacatgtctcattcatatgaggaagctaaaaaaatgttgatctcatagaagtaaagtagaacagaaaatactagatgctaagaaggggaagcacaaggaagggaaagggagagatttgttaaagaatacaaaattacagctagataagaagagtaaattctagtgttctatagtattgtaaaatgaatacatttaacaataatacatagtttcatatagctagaaagaggatattaaacattcccaacacaaagaaatgataaatatttgaggtgatggatatgctaattaccctgatatgcaacatcattatgtactcaataaatatacacaattattacgtgtcagttttaaaagttaaaaaaaagaaaaatgagagagaaatggtgaacaactccgatttagcacacacttgtttaatgttttccactgtgyaatattcaaagtatcacataatgttagtgcttaagacaaccttgggtctcatttggctctataatccttattttgcacatgagaaaactgaaatccagaaagcaagcacttatgtcatcacaagagctgtgatgcatttatctttatgccctcaccaccattgtgaattacaaattaaataacttactagctacaaaaagggaataaactaagactgacctcctaaatccagggctctttatattacatcacccagcttcttaaattcgctaggtcctttcagaattgtgagaggcattttattatgtataaaatgactgactaaagataagccctattaaaagctcttcaactaaaatttttcatattttaactaatcaaacgcttcatgaagcacattttrtactcgatcaacaaagagtcttttttctaattatgttcaaaaacttcacaactactttattatataaatgcatatttaattcctttataggcaatcaagaggttaaaatatcagctaacaggggcaatctgaccttgatttttcaaataatgaactggctacgtatgaaataatytgtataagaaataagttgtataagaaaacatgatttagtaaataagtattacaaatatactaaatattttgtctgttacattaagccgatggttctcaaacttcagactgcatcagaatcacctgaggagtttggtaaaaagccactgtaaggaaattgggaatgagaaaaaagatgacagtgcactcaagatgaaaaaatatggactttgtggtacaaaaccttccacgttttctaattctagcttttcattgacttcgagctatactgcaactcaaattgttgattaactgctgtagataactgagagcaatgtaaattattctagtctggagacatgcaagaaaattctgtcccatggaggttcaactgactacccccaatagaaagtcagtttgctgaccacttggaaatttagttcaatatcctttactccacataaatttgtgcttctttgaactgtttataatatctgactagttccatcattaatgacttaaataaaatcttcaaaatgtgttcaatacttagataactcatyatttgtatctagataagagtgttaattttacatctctttgaaaccctaagtcagtggggttttttttcacatatggttctaaaaccagcctcattaacatcacctggaaacttgttagaaatgcacattctcaggctacatttagacctacttttctaaccaaacttccaggtaattctgatgcaagctaaaatctgaaagctactggactaaaagagtcctcaaaactgtgataaccattgttttagagttaactattttgattgttttctgttgtaaagtcaaagggttcaccaaatttaatcagtagttttacatgggagtaaaataacctaaaagatttaatgcaaattttaaaactcctgaacagctaaggactgaaaaaaaaaatcaggctaaattatggggtgggaggcaggttatcaatccaggatgttaggatatgaaacagtataagtatatgtatatgtatttgtattacatctattctaaagctgaaactctgcctactttrcacctacagaatggtttactctcaacatatattttgactcataacttcttattttcatttttttagaaagtagacgtttctcatttcacttttccactgttttcaataaaggttaagaaaatgtaacagaagtaaatacctacataattcagacactcaaattctgtttctatactcactaggaattatttagcctagttttcagatctaatcagatctgctggaaattggctcatccctccaattcactaattacttaaatacacacagtgtcaccacttggaaacattactaaaacaaaaaaaacttactaaactgttgagctggtgtcttatccaataatttttaataaattggaaaggtctcttcttaaatacttaagttacaaatatgtaaaataagcaccagaatatgagaagatatggaggatctattgtcaaattataaaagacttttaatattcttgatttttgttttgttttaactgaggtatttcctccagaattgtaatatacacatatttgggttatgtcttcatattcccaatatctccttctaacaaaattttctggtattttaattgtaataaagaccaaacatcagcaggcagagtttcccatctggaaacagatgaaaaattcctaggcctttagcccacaagtgtccagggtaatgaacctctgatccaattccaagtatttactgtgttaactatttttttaatcaaataaataaaacttatacacagtaggatgtgttttatcacctttaagttagaatattaagtgacttacaatgcaaaacatgacaagaactgtacttcaaatgacagttaatattttacaaagagaataaagctggaaatctgaataacatctcaaatgtatgtaataagataaggaggaattgagaaaaaacaataatagtaagttagcaaataagctaacaactattctaaacatgttttcaaaagaagagaacatctttttaaagttaaaaaatggctcatacataatagtgtacaaattgcattttataaaacatttttacatgtcccataccactataaataatttcataaatatccctttcaatggttgcataaaatagcattcagggaagatacctaaaatgtgtcacttttagggtaagggtatgtgactgttcactagtttaaataacgctacagagaactttcatccttttgaattatttacatagaatacactatgagaagtaggcttactagctcaaaggataygaatacatcttgatttttactggaagaaatacctcctctcctactatcacacttgatgcaaaaggagtattactttatctatatagttaagatactgttttcttaataggatttaatttctaaatcttcaaccatatttgcagtttcactaaatttacaattttttcttttaaataaattttgagacgctgcttatctgctgaataggacacaacagaatgaattactttatgtgacataaacagcagagccacagccaaagctaggtttaaaagagaaaaaggtttgaaaacgacaaatattccctactttgtcaaccacacaatgttctcctctggttgatattttatcaatttctgaccatttgcaaacattttatttttattcctaaacttcactggtctcttactttgagatcaccaaggaactggatagttcatgttatcaattataagagaaaagtggcccaatccataccccgacaagagaacagctccacaccaaaggctgctgcccaaaccctactggccagctcctatatggctggtgagcaatggatacttttacaacattaaagatctggcataagccawtcttataataaaaaagacaaaacaaagttacctaaaactagaagcagcagcagctttttaaaagtatatagtctattcaaaagtcaaaatcataaatctatttctttttcccttttctttttaattgacacataataattgtacatattcatggaatacagtgtgctatttcaatgcctgtgtatccagtgtataatgattaaatctggataattaagatatgcagcacctcaaacatttatcattttgtgctgtgaacattcaaaatcttctagctttttgaaaatatacactaaattactgttacccataatcatcctacattgctgtacaacactggaatttattcctctcttctagctataattttgtatctgttaaccaacctctcctagcctctaataaccacaattctactctctacctctatccgctcatgttttagctccyatatatgagtgagaacacagtatttatctttctgtgcctgacttagttcacttagtataatgtcctccaggttcatccatgttgcagagaagcatgaatctatttctgaatgtcaatattttaatccatgtaacaataattttaataattttattataagagagcatgaagtcaagtggacaagaatattggaaaaggaagagacaacagaacaggttcttctagaatttgagcaatggaaatgcaagtttaactaaaaagaaaataatggtagtggtaaaagtataacacaaccttgaaagaacctacctaacatattattcaccaaaaccagtgctacaaactttccccaaccatcaaaattttctccattatattttttgcttgctgatatcaagttagcttccaaagattttaaaacttgtgcaaactcacttacactgaatatctgaaaaaagctattatgtctcctcctcccamcagccaaatcttcctcaagataaatatctcatttttctgaaaactttctcatatccatccatacatggcaattgccattagctattaaaattaagttgaagaatatttaacaatctgaaagaaaattttatgattccatttttttatagagtaatagagaagaattggggcaagtgccctcaatcataagaaactctcctctaagacctatctcacgtgcagagacacacacaggctcaaaataaagggacggaggaagatgtaccaagcaaatggaaagcaaaagaaaataaaagcaggagttgcaatcccagtctctgataaaacagattttaaaccaacaaagatcaaaagaaacaaagaagtccatcacataatggtaaagggatcaattcaacaagaagagctaagtatcctaaatatatatgcatccaatacaggagcacccagattcataaggtaagtcctgagagatctaaaaagagacttacactcccacacaataataatgggagactttaataccccactgtgaatattagacagatcaacgagacggaaggttaacaaggatatccaggacttgaactcagctctgcaccaagcagacctaatagacatctacagaactctccaccccaaatcaacaaaatatacattattctcagcatcacattgcacttattccaaaattgaccacatagtaaagcactcctcagcaaatgtaaaagaacagaaataataaactgtctctcagaccacagtgcaatcaaactagaactcagggttaagaaactcactcaaaactgcacaactacatggaaactgaacaatctgctcctgaatgacgactgggtaaataacaaaatgaaggcagaaataaagatgtactttgaaaccaatgagaacgaagacacaacataccagaatttctgggacatatttaaaacagtgcgtagaaggaaatttacagcactaaatgcccacaagagaaagcaggaaagatcaaaaattgacaccctaacatcacaattaaaagaactagagaagcaagagcaaacaaattcaaaagttagcagaaggcaagaaataactaagatcagaaaagaactgaaggagatagagacacaaaaaacccttcaaaaaaatcaatgaatccaggagctgcttttttgaaaagatcaacaaaattgatagaccactaccaagactaataaagaaggaaagagagaagaatcaaatagatgcaataaaaaatgataaaggggatatcaccaccgatctcaaggaaatacaaactaccatcagagaatactataaacacctctatgcaaataaattaggaaatctggaagaaatggataaattcctggacacatacaccctcccaagactaaacaaggaagaagctgaatctctgaatagaccaataacaggctctgaaattgaggcaataattaagagcctaccaaccaaaaaaactccgagaccagatggattcacagccaaattctatcagaggtacagaaaggagctggtcccattccttttgaaactattccaatcaatagaaaaagagagaattctccctaactcattttatgaggcaarcatcaccctgataccaaagcctggcagagacacagcaaaaaaagagaattttagaccaatatccctgacgaacattgatgcaaaaatcctcaataaaatattggcaaaccgaatccagcagcacatcaaaaagcttatccactaagatcaagtgggcttcatccctgggatgcaaggctggttcaacatacgcaaatcaataaatgtaatccagcatgtaaacagaaccaaagacaaaaaccacatgattatctcaatagatgcaaaaaaggccttcgataaaattcaacagsccttcatgctaaaaactctcaataaactaggtattgatggaacctatctcaaaataataagagctatttatgacaaacccacagccagtatcatactgaatgggcaaaaactgaaagcattccctttgaaaactggcacaagacagggatgccctctctcaccactcctattcaacayagtgttggaagttctggccagggaaatcaggcaagagaaagaaataaaaggtattcgattaggaaacgaggaagtcaaactgtccctgtttgcagatgacatgattgtatatttagaaaatcccatcatctcagcccaaaatctccttaggctgataagcaacttcagcaaagtcgcaggatacaaaatcaatgtgcaaaaatcacaagcattcttatacaccaataacagacagacagagagccaaatcatgagtgtaccctcattcacaattgctacaaagagaataaaatacccaggaatacaacttacaagggatgtgaacgacctcttcaaggagaactacaaaccactgctcaatgaaataaaagatgacacaaacaaattgaagaatattccatgctcatggataggaaraatcagtatcatgaaaatggccatactgctcaaggtaatttatagattcaatgccatccccatcaagctaccaatgactttcttcacagaattggaaaaaactactttaaagttcatatggaaccaaaaaagagcccaaatggccaagacaatcctaagcaaaaagaacaatgctggaggcatcaagttacctgacttcaaactatactacaaggctacagtaaccaaaacagcatggtactggtacaaaaacagagatatagaccaatagaacagaacagagccctcagaaataacaccacacatctacaaccatctgatctttgacaaatttgacaaaaacaagcaatgaggaatttattaaataggaattccctatttaataaatgttgctggggaaactggctagccatatgtagaaagctgaaactggatcctttccttataccttatacaaaaattaattcaagatggattaaagacttaaatgttagacctaaaaccataaaaaccctagaagaaaacctaggcaatacccattcaggacataagcatgggcaaggacttcatgactaaaacaccaaaagcaatggcaacaaaagccaaaatgggatctaattaaactgaagagcttctgcacagcaaaagaaactaccatcagagtgaacaggcaacctacagaatgggagaaaatttttgcaatctactcatctgacaaagggctaatatccagaatctacaaagaactcaaacaaatttacaagaaaaaatcaaacaaccccatcaaaaagtgggcaaaggatatgaacagacacttttcaaaagaagacatttatgcagccaacagacacatgaaaaaatgctcatcatcactggtcatcagagaaatgcaaatcaaaaccacaatgagataccatctcatgccagttagaatggcgatcattaaaaagtcaggaaacaacgggtgctggagaggatgtggagaaatgggaacacttttacattgtgggtgggactgtaaagtagttcaaccattgtggaagacagtgtggcaattcctcaaggatctagaactagaaataccatttgacccagtgatcccattactgggtatatacccaaagaattataaatcatactactataaagacacatgcacacctatgtttactgtggcactattcacaatagcaaagacttggaaccaacccaaatgtccatcaatgatagactggattaagaaaatgtgtcacatatacaccatggaatactatgcagccataaaaaatgatgagttcatgtcctttgtagggacatggatgaagctggaaaccatcattctgagcaaactatagcaaggatggaaaaccaaacactgcatgttcttgctcatagrtgggaattgaacgatgagaactcttgggcacagggcggggaacatcacacactgaggcctgtagtggggtggggggttgggggagggatagcattaggagaaatacctaatgtaaatgatgagttaatgggtgcggcaaaccaacatggcacgtgtatacatatgcaacaaacctgcacrttgtgcacaggtaccctagaacttaaagtataattaaaaaaaattaaattaaattaaaaaaagaaactcttctctgtaataatcacagcaacttgtaacaacctcaattttgcttcatgactgctatgaaaatatggacactagtgtgaaaagacaagaaatacaaaattgtattagaatatatgtacatatgtatgtataatagcctaagatgaagacttcacctgaaaataacaccagctggaggttgaaaagaaaattatctgtaatacaaggtgaaaakatgcccacaagataattatctgtaataataagttttttttaaaaaaaacgtaggccaggcacagtggctcatgcctgtaaacccaacactttgggaggctgaggcaggctcatcagaggtcaggagtttgagaccagcctggccaacatggtgaaaccccatctgtactaaaaatacaaaaattagccggctgcggtagcgcactcctgtagtctcagcaattcaggaggctgaggcaggagaattgcttgaacctgagagacagaggttgcagtgagccgagatcgagatcttgccactgcactacagcctgggcgacagagtgagactgtgtctcaaaaaaaataaataaataagtacactgggccccctgcctaagaaggtttatgggaacaagggtaccctactcaacagaaagaatgtgacatctgagaccaaaaacctaagcttctagctcacattttcttctttaagctagatacaaatgagatgatgaaaaactgtgagcaagcaaccatctcccattattctctagcacagctgcacagcaatttacaaatatttattcacttgcttattatctcttccactacactgaaattcctggagataaggacggcctgtttgttcaccttcaaataggcagtggtaagttcagagcgtggcacacagatgccactcaacaaagattagttatacaaatatatgactcttctatatgcatttttaaaattatctgatggtagagatcactttcttatggtcagtgggctttgagtaatattcaatatttttatccttctcataagaacccagatcaaagaagttatttttatgtacactgtcacagtaacatactccatagttgtgcggcacctcagagataaggtaggccaggatttttcaaaaagcaagttatgactcagtaagggttatgaaatcaatttagctcatgtccaactttttctaaaaaaaaaaaaaaacactaaactgggcatggtagcatgcgcctgtagtcccagctacttgggaggctgaggtgagaggattacctgagcccaggaggttgcgtcaccacactctagcctgagcgacagagtgagaccctgtctcaaaaactgaatattttataaacagctagaaaagtattagaatgtactgtacaatgtaaaagtaagtactatttcatgaaacttttattttatatatataactgtaatattaatacaatattaatacacacacacgcacataaatgtgccaatgcactgcttagagcaagcttgtccaacctgtggcccacgggccgcatgaggcccagggtggctttgaaagcggcccaacacaaattcgtaaactttcttaaacattatgagattttctgtgatttttttttttttttttttagctcatcagctattgttagtatatttcatgtgtggcccaaggcgattcttcttccagtgtgacccagggaagccaaaagattggacaccccagcttagagtgtagagttgtggccaaattttaagaacaagcatcaatctagacaattacgccaatggtaaaagaagcattagtctagacaattataccaattcacaagtattatgaattttctgacttaatatttcaatccttacaggtaaatactaaaaaggtaccccaaaaccaaaaaaaaatacctttaacattgtcaaccaaagtaacatatactcaaccattctttttctcttgtcagataattgagttatgcctgcacaccaccaaactagcatttggctttcactattttaaataactggccataggacatakgagacatctgcacagttacaattaaaaacaaaagctgagtaaagagccttactccttcacctaagccaccacagaatttggtgtttcccctggagaaaattaagaggtaataatgacacttgcctcattgggtattcagagatcttccatggggtgaccttgataataacagattacaagtaactctaagtcaactgaaaacagctttctaaaaarctttttttaagtccacactatctagaaataacctaaaattactgtcaaagctttgcatccatttgctaagtagcatttaacattagtgcttattatcttttgtaaaaacctaagggtgatacactcaaaccacaaatcccattgagagatctccaagaaaattcacagagacagcactgattaacagctacactctcctataaagactcactaatggagatatacaggatatacctggctattaataaactgaatttaatacaatttattgcagaaaaactaaaaatgtaatctggcactacaaatatatgacaaatctgattaacaaaataaaagagtttgctcaaacaagtaaactctaatagtaaaccaactgtctctcccttcagaatttgcccagaaagcaccataaacttgatctaaacaactcaaattctatcactacaaatgttgatgttggctggacatggtagctcatgcctataatcccagcactttgtggggccaaggcggaggaatcacttgaggtcagcagttcgagaccagcctggccaacatggcaaaaccccatctttaccaaaaatacaaaaattagctgggcctggtggcacatgcctgtaatcctagctactcgggaggctgaggcaggagaatagcttgaacccaggaggcgaaggttgtagtgagctgagatcacgccactgcactccagcctgcgcaacagagcgagaccgtgtctcacaaaacaaaacaaaaactgttgatgttttaagaagaagcactactctgaacatctaaattaaatggattctggaaaataaatcagtctagaattttcagaaatgttgaaaagttgaaacagtattcagaatacttacactaggtcattatttcattctaaatatgactggtgtttattttgggaaaagcactcagcgaagaaaccactgaatgaaaatgaatgcagcccacaaaaaaaagatcaagatagaaaaaagtgtcgagaaatgaattggcaatgtaaaatttttaagcagcctccaagaaaaggagtaagtttttaggaaaaatactatcatgcctagaattatttatcaggctttcataactttactgaaggagaatctgtaatatttattcagtctttcaagcatttattctttcagtagccatttacatgtcacataaaaatttagtctactctataatcataaatcaattaaaaacatgcaggctctatatttagtagatagccataatttggctttttggtacaattcaatctcaggtaaactgaaacaatttactctcctagattattccttagctaggtatcttataagaaatcactttatggcctaggagaattatgccactccccattccctatccctcaacgttcacaggctttgcatcacaatctactttgaagacactggagctaaacactcactttatccccttcatatcagtcaccacaagaagcccaagatgggccgggcatggtggctcacgcctgtaatcccagcactttgggaggccgaggcgggtggatcatgaggtcagggattcaagaccagcctggccaatatggtgaaatcccatctctactaaaaatacaaaaattagccgggcatggtggcacgygcctgtagtcccagctactcaggaggctgaggcagaagaatcgcttgaacctgggaggcagtggttgcagtgagccgagatcaygccactgaactccagcctgggtgacagagcaagattccatttcaaaaaaaaaaaaaaaagaaaatgaaaaagaagaccaagatacccaagtcatccttcaccacctagcctcttatcaccataacattctctatatcccctgatttggcctcatatcccaaccatcctctcaggaactcattgtcaattgtctacagattgataaacagtctgacttgttaatcttcaatttaattatctcctctaaattctctcctgaactcaccccattcaagcttttgtcccacctctccatgaaaatgactccattcaaagattaccaatgtcttcaatgttgctcaatggtcaattctcatcttagtcgaaccatcagcaacatttaacaaaactgatcaccccattttcttgaaacatgtttcttaacttggcttttggggaaccatctacctcagctattcttgatggtcacagttgctcttcttggtctactttgctgattccttgtcttcccagcccctcaataatggagagctctggggcttgtgactcgaatctcttcttttcctatattcactctctagtgacaactgccaaatttctcttcaacccagacatctcccctaaactgcctttcgaacacctcaatttgaatgtctaacaggcacctcaagtttaatatgtaaaaaccatatccttgatcccctcttactcccacaagcccccatatccttcagtcttccccactgtagggaaaggcaattacaggattctagctgtttagaccaaaaacctggctgatatcctttactctcatataccatagccaatctgttagccaagttggatctaccttcccaatatatcgcaacacacacttacttattcaattctcatttattctctagatccccagcaagaatataacctacataaagaagggaccatgtctgttttggtcactgtagtatccccaatacctagaatagagcctgacaccaagcagatactcaataaatacatgtagagtgaatgattaataaataaaagattccagatccttgattccattcaaaataacagccatcccatcaaagtaaaacattccctgaggctgaagttaaaacagccttactccctgctaaaaagaacctcttttatttaatgaacacatatattcaccaaccacaaccagtcaaaacaaaatatgcattaagaataaaacatgttaggctgagataggtggatcacgaggtcaggagatcgagaccatcctggctaacacactgaaaccccgtctccactaaaaatayaaaaaattagccagacgtggtggcacatgcctatagtctcagctactcgggaggctgaggcaggagaatcgcctgaacccmggagtcagaggtgcagtgggccgagatcacaccactgcactccagcctgggtgacagagcgagacttcatctcaaaaaaaaaaaaaaaagaataaaacatgttaaatataacagataatgtattatgcatgactcaccaaagaactaaaatccaacataataaacaatgccgtaataatttttgtattattttatgttattaataatttagtaggtattttagttttctgtcctgtacaataccagtcatcaccatacttgacagataacagataatttcccaaataaactttatatcataagcccttatcagtctcttttaaagacagaaagtgattaactctgttaatcaatgctggctaaaaaaawtacaggagcactaaccattttgtaaccaaacctgaacacacaatccctgatatagagacataaacttaataatgacccaacatttagagagaaaagagaaagtaaagaaagaggaagacagagaaaccggggctactttctaaaatagtaatcactaggggaatgaataacctgaaattgtacctttataattgagaggaaggggttaaaaatgtacaattaataaattactggtttttatgaatgaccagtgacatcttctgagaagaccccaatccagctaagcaaagataacctatttctttcaaactgatttgggatatattttcccacagaaacaaaaatatcaactcaataaatggaaattgtacagttaatacttaaagtacatttgggtgaaaaatatttgtgaactggcctgggaacatagccagtaatttttgtactgcttcaataaggaaaaaaaaaatgtgttctgagttccaaacagctgtcttacacataaacttctgaaacacaactagctcatgttctggaaactgtgtatacaggttatatttcaagggattcaatttggcccacagcatttctgaatatgtttaagaatgagtcactttacactagacctcttccactcagatgcagtttcaaagacctctagcttcaaggatcttaatccttaaaaaaaaaaaaaamaaaaaaaaaacaaaaaaaactacagcctgtccagaggtaaatggaaatgttgaacattttataaatctgcagcaaagctaaaagaacagcttcaagctaccaggctacttttcttcatctatgaataaactagagtaaacttcctttatcacagtgattcatatcaatttttaggttatagcacaatgtcactgcttatttgattttgagaccagagtatgttatatactaagattcttctaaagactgcaacacagtattttttttccaaattaagagaagagttcattttttcaataatttaaaaatgctagctaaacttatctgaaaagctccctaagggtcctgaaaaatatggattaagaatcatttatatatagggacatatcagatactataaactttcctctcaaattctattactgcttaccagagcccaggatcttaaaactacaatcaatttcctgtatggtgtctatatttcctcaaattaaaacaccatttctgttttctcttctctataactttctcttctctataacttgtcttgacttatttatgagttattttaatgtgcctctactgaacaactcaaatagctgactttagtgattgaaaatgctgttatccagtcaagaccagcttgactgtggcaaagacatttatgtacgtttcccaggagttaagaaaataaaacaagaagcgtcaatgtttttttagaagagaaacaagaatgaaactgtgttgacctgacgtaactaaagagacccatcactgccccagtgtttcttagatgaattaatcagaagaaaaggacatgctcttgttctttttccaacaccttcctctgatacatcatccactctcacactacaatccaacacaaagatctatttttattggacagctcgttccatttggatgtcctgtcatcaaactcattgcaatatataaagataacactcaacttatccaaaactaaacttaccatttcatcttataaaactattctcctaatttccatttctctatctatgattatcctggtgtctctggctaggaacttgtttaccatttacatcagaaatgccgagactgcctttaaaaatgcaatttctgtcctcttacccaacctgccaaaatcagaaccttaccaagctccttaggcgatcctaatacacactcaagtttcagaacctctatctcagattcatccttaactcatgcagttcatccaatatcacatccttcatctctcaaagcctactattgttgccagagtgcaggatcctaaaaccacaatcaatttcctaaatggtgtctacatttcctcaaattaaaatttctgaggtcaggcatagtggctcatgcctgcaatcctagcacttagggaggctgaagtggaaggattgcttgagctcagtagtctgagaccagcctaggcaacataatgagaccctgtctctacgaaaaataaaaaattagctggatgtgacagcatgcgcctgtaattccagctacttgggaggctgagatggaaagatcacttgagccttgaggttgaggcaacagtgagctatgattgtgccactgcactccagcctgggcaatagagcgagacattttctcaaaaaaaaaaaaaaagaaagaaagaaaaaaaataaaatttctaaaacaccacttttgttttctctgttctataacttgacttatataccataaataaaggtcatcttcctaattctgacactatctaatccctatctctctcttgtcccctatgaattatctactctgattacaaatgttcattcaacatgctaattcctatctcacttactatattcattttagtctgtcattctccaccaccaacagttcaactctccaaaatctataacgttcactttttttcttatccatctattcttcaagggaatgcttaagtcccaaactcgctttttggttctcaacacatgacatcattacaattcaaggcatttttttagcctatcattctctctacatctcctaaacaataatcttattaaatcactttttaaaaataagcagttcagcccttttcaactctagtttataacctaaggtagaaaataacttagtaaacaataaccaaaatataaaaacacattatttttatgatgtggtagatatatttcttgcttcaatattttgtggaggtttcttgttttcacagtatttaagacaagggacaaaatctcataaagcaaaaaagtgaaggaagtgaaatctcagcattgttttaaatgactgaaacatcctggaaaagtacgaagtaatttctacttccggtttttaaaaatatattgtgtccaggaagtcattatttccttaccattaagaatctattcattccattggtctttataactgttatggaatggaaagaacatgaaacttggattcagtaagagtgtattaaatttagaatgggatgactttttgacaagatcctctaactctctaagatccagtctccccatcagtaacatggtagttaccaggtcccatgacttggcaacacttaatagtcagatcayctaaatcctaaaatgttccaggtgctctcaacctgtcttcagattaatcttcctctaggctgccagtgtacacctactgcaaatctacttaatcggccattcattctcttcttgctcagaaaggccagttcctgggaagaaaactcaaacccaggaaacacagctggaataagttagtatcctagtcactgtgctaatgctagcaaaatcataaatctattattcacrggataatgcttagctacttgtgacaaattgaaggttgagaaaatatttgcacaaagaaccatcataccagctgagtcagggccaaggtagaggtcactgctagagaacaagaagcctgtcacatttgcagggaaaaaaaaaaaaaattggtcctaacagcataagttaggaatgcattgtttcatctaagaaaggttgttgcttttctctctggtcaatgtttgatttgcattaatgtaataaatcatgaaagtcaaaatcaatgtgaatcttatccacttacataactagaactaaaacttagataaactacctaataaaaataacaagaccatatatacacagtacaaaagaccagtaataagtacagtacaataccaaggttgtatgaaaaaacagacaactgcttttatgaattaaaattaggcattattattcacatcccacagccaccttctatgtgtgcctgggtcatcatggccataacagaaatatctctgtattttaatttagaatcaactcattatgagaatacaaactgggtaataagttgtactgaagtatgtaaataaattgcataaggagagtttgtaatgatggaagccttcttcaacacaaagctttaaatcaggttttaaaggaaatgactatgaaagcaaagggaaaaacttaggaagaaagaattcttatatcctaaccaatttaaaaatcctgaaaatctcaatagattaacaaagttcaatgtatttgtcttctgaatagcactgaagagattgttaaaatacttcaactagattactatgtctatgagttgaaacagcaactttcagcacaccttttttggttattgctttgtttgcttctccgctgacctgcaatcacatgcaaacactcctatataaagactactgtgagtaccacagactgacccatacagagggttccaaaggtacataatttcacctgctagcaacaaaaagaatagaaaactgtgaattctcaagatgatctcaaagagttttgaagatgactaygatagtctaaataagagttaagagttattttacacttaatcagtttgtttcacattcttttgcaatgagaaaataactaggaaatctggccatgggtaataaagaaaaaaagcgttgcagtcttttcttgcttggtcatctttagcaattcatttatccaaaatttcaagcatgaaatgattaccaagtagcttttgtcataaaatgccatttgcccattaatacacttggctgactacctgaggattacttaaatgtgatttctaccaagaaatcttcctagacctcccccactgcaccctgacccccagtgggaggctcctcagtggtccaccactaagtgattatcactcttgaggcactcaccacactggcttctaacggttgacttacaagtattgcttttttttctcttttgtccctttcccctctctcctactagactctgagctcatctgaagacagactatccccaagttcttacacaaattctgccacagagtagacacttgacaaatgtttgctgaaygagaaagcatagagagagggtgaggacgctaaagaccacagagatcttccagttgttgaacttccacttactatgtaagaaattagaggtacagaagatttaaatactaaagccatggttagaaaacccatttccactactcaaggatgcttccttatgtcagttctttatatacagaatacagaaccctgtttactcttaacaatgtaaaattaagtagtcccagctactgaggagactgaggcagaagaatcgcttgaacccaggaggcggaggttgcaatatgctgaaatcgcaccactgcactccagcctgggcaacagagagagactctatctcaaaaaaaaaaaaaaaaaaaaaggtggctggcaagatggtcaaataggaacagctccagtctgcagttcccaacaaggtcaacacagaagatgggtgatttctacatttctaaccgaggtacgcagctcatctcattgggactggttagagagtgggtacagcccacagacagtgagacaaagcagggtggggcatgagccaaagcaggttggggcattgcctctcccggtaagtgcaaggggtcagggaactccctccactagccaagtgaagccgtgagggactgtggagtgaggaacggttcactccagcccagatactatacttttcccatggtctttgcaatctgcagaccaggagtttccctttggtgcctatgccaccagggccttgggtttcaagcacaaaactggatggccgtttgggcagacaccaagctagctgctggagtgttttttcataccccagtggcacctggaatgcctgtgagacagaaccgttcactccctggaaagggggctgaaggcagggagccaagcagtctagctcagtggatcccacccccatggagcccaccaagctaagacccactggcttgaaactctcgttgccagcacagcagtatgaagtcgacctgggacaccccagcttggtgggggcaggggtgtcgaccattactgaggcttgagtaggcggttctccccctcacagtgtaaacaaagccaccagaaaggtcgaactgggtggggcccaacacagctcagcaaaggcacaatagccagactgactctctacattcctcctctctgggcagggcatctccaaaagaaaggcagcagccccagtcagaggcttatagataaaactcccatctccttgggacagagcacctgggggaaagggtggctctgggcgcagcttcagcagacttamacactcctgcctgccagctctgaagagagcagggagtctcccagcacagtgcttaagctctgctaagcatcagattgcctcctcaagtgsgttgctgacccctgtacctcctgattgggagacacctcccagcaggggtcgacagatacctcatacaggagagatctgactggcatctggaaggtgccccactgagacaaagcttccagaggcaggaacaggcagcaatctttgctgtttgacagcctccactggtaatacccaggcaaacaggctctggggtagacctgcagcaaaccccagcagacctgcagcaggggggcctgactgttagaaggaaaactaacaatcagaaaggaatagcatcaatattaacaaaaaggacgtccacacagaaaccccatccaaaggtcaacatgaaaacacaaaggtagataaatccacaaagatgaggaaaaaccagcacaaaaaggctgaaaattccaaaaaccagaatgcctcttctcctccaaaggatcatcacaactctttgccagtaagggaacaaaactggatggagaatgagtttgacgaattgacagaagtaggcttcagaacatgggtaataacaaactcctccaagctaaaggagcatgttctaacccaatgcaaagaagctaagaactttgaaaaaaggttagatgwattgctaactagaataaccagtttagagaggaacataaatgacctgatggagctaaaaaacacagcacgagaacttcgtgaagcatacacaagtatcaatagccgaatcgatcaagcagaagaaagcgtatccaagattgaagatcaacttaatgaaataaagcatgaagacaagattagagaaaaaagaatcaaaaggaacaaacaaagcctccaagaaatatggggctatgtgaaaagaccaaacctacatttgattagtgtacctgaaagtgacagggagaatggaaccaagctggaaaacactctttaggatattatccaggagaacttcttaaccttaaatgtaaacaagttatatgccacaattaaaagacacagactggcaaattggatggagtcaagactcatcggtgtgctgtattcaggagaccgatcttatgtgctaagacacacataggctcaaaataaagagatggaagaatatttaccaggcaaacggaaagcaaaaaaaaagcaggggttgcaatcctagtctctgataaaacagactttaaaccaacaaagatcaaaagagacgctcacgcctgtaatcccagcactttgggaggccgaggcgggtggatcacgaggtcaggagatcgagaccatcccggctaaaacggtgaaaccccgtctctactaaaaatayaaaaaattagccgggcgtagtggcgggcgcctgtagtcccagctacttgggaggctgaggcaggagaatggcgtgaacccgggaggcggagcttgcagtgagccgagatcccgccactgcactccagcctgggcgacagagcgagactccgtctcaaaaaaaaaagagacaaagaagggcattacataatggtatagggatcaatgcgacaagaagagctaactatcctaaaaacacatgcacccactacaggagcacccagattcataaagcaagttcttagagacctacgaagagatttagactcccacacaataatagtgggagacttgaacacttcacagtcagtatttgacagataaacaagacagaaaattaacaaggatattcaggacttgaactcagctctggaccaagttgacctaataggcatctacagaactctccaccccaaatcaacagaatatacattcttctcagaaccacattgcacttattctaaaattgaccacataattggaagtaaaacactcctcaaaaaatgtaaaagaatggaaatcacaacaaacagtctcccagaccacagtgcaatcaaattagaattcaggattaagaaactcactcaagagcttgcactgagccaggatcgcaccactgcactccagcctggcaacagagcaagactccacctcaaaacaaaaaaaaagaaactcactcaaaaccacgcaactacatggaaactgaacaacctgctcctgaatgactactgggtaagtaacaaaattaaagtataaataaataagttctttgaaaccaatgagaacaaagacacaaatgtaccagaatctctgggacacagctaaagcagtgtttagagaaaaatttatagcactaaatgcccacaagagaaagcaggaaagatctaaaattgatactctaacatcacaattaaaagaactagagaagcaagagcaaacaaattcaaaagctagcagaagacaagaaatacctaagatcagagcagaaatgaaggagacagagacatgaaaaacccttcaaaaaaaaatcaatgaatccaggagctgcttttttgaaaagatcaacaaaatagaccactagccagactaataaagaaaaaaagggataagatacaaatagacacaacaaaaatgataagggggatatcaccactgatctcccacagaaatacaaactaccatcagagaatactataaacacctctatgcaaataaactagaaactctagtaagaaatggataaattcctgaacatatacactctcccaagtctaaaccaggaagaattcgaatccctgaatagatcaataaccagttctaaattgaggcagtaattaatagcctaccaacgaaaaaaagcccaggaccagacgaattcacagccaaatgctaccaaaggtacaaagaggagcagtaaccattcctgctgaaactatttcaaacaacagaaaaagagggactcctcccaaactcattttatgaggccagcatcatcctgataccaaaaccctgcagggacacaataaaaaaagaacatttcaggccaatattcctgaagaacatcaatacgaaaatcctcaataaaacactggcaaaccaaatccagcagcacattaaaaagcctatcctccatgatcaagtcagcttcatccctgggatgcaaggctggttcaacacaggcaaattaataaacgtaatccatcacataaacagaaccaatgacaaaaaccacatgattatctcaatagatgcagaaaaggccttcaataaaattcaacaccccttcatgctaaaaattcagtaaactaagcattgatggaatgtatctcaaaataagaagagttttttatgacaaacccacagtcaatatcataatcaatggccaaaaattggaagcattccctttgaaaaccagcacaagacaaggatgccctctctcaccactcctattcaacacagtattggaagttctggccagggcagaaagaaataaaggtattcacacaggaagagaggaagtcaaattgtctctgtttgcagatgacatgactgtatatgttgtatatttagaaaccccagggtctcagcccaaaatctccttaagctgataagcaatttcagcaaaatctcaggataaaaaaatcaatgtgcaaaaatcacaagcattcctatacaccaataagagacaaacagagagccaaataatacgtgaactcacattcacaattgctacaaagagaataaactacctacgaatacaacttaaaggaatgtgaaggacctcttcaaggagaactacaaaccactgctcaaggaaataaragaggacacaaacaaatggaaaaacattccatactcatggataggaagaatcaacattgtgaaaatggccatactgcccaaagtaatttatagattcaatgccatccccatcaagctaccattgactttcttcacagaattagaaaaaaactactttaattttacatgaaacaaaaaaaaaagcccatatagccaagacaatcctaagcaaaaagaacaaagctagaggcatcatgttacctgacttcaaactatactacaaggctacagtaaccaaaacagcatggtactgctacccaaaacaratatatagaccaatggaacagaacagaggcctcggaaataatgccacacatacaaccatctgatccttgacaaacctgacaaaaacaagcaatgggtaatggattccctatttaataaacggtgttgggaaaactggctagccataagcagaaaactgaaactggaccccttacttaaaccatatacaaaaattaattcaagatggattacagacttaaacataagacctaaaaccataaaaaccctagaagaaaatctaggcagtaccatccaagacataggtatgggcaaagacttcatgactaaaacaccaaaagcaatagcaatgaaagccaaaattgataaatgagacctaattaaattaaagagcttctgcacagcaaaagaaactattaccagagtgaacaggcaacctatagaatgggagaaaatttttgcaatctatccatctaacaaagggctaatatccagaatctacaaagaacttaaacaaatttacaagaaaaaaaaacaaacaaccccaccaagaagtgggcaaagaatatgaacagacacttttcaaaagaagatatttttgcagccaacaaacataagctcatcatcactgctcattagagaaatacaaatgaaaaccacaatgagataccatctcatgctagttagaatggcaattattaaaaagtcaggaaacagcagatgctggagaggatgtggagaaayaggaacacttttacactgttggtgggagtgtaagttagttcaaccactgtgaaagacattgtggtgattcctcaaggatctagaactagaaataccatttgactcagcaatcccattactgggtatatactcaaatcattctactaaaaagacacatgcacacgtatgtttattacagcaatgttcacaatagcaaagacttggaaccaacccaaaygcccatcaatgacagactggatagagaaattgtggcacatatataccatggaatactatgcagccataaaaaggataagttcatgtcctttgcagggacatggatgaagctggaaaccatcatttacagcaaactacgacaggaacagaaaaccaaacaccacatgttctcattcataatttggagttgaacaatgagatcacatggacacagggaggggaacatcacacaccagggcctgtcagcrggtggggatttaggcgagggatagcattaggagaaatacctaatgtagatgacaggttgatgggtgcagcaaaccaccatggcacatgtatacctatgtaaactgcacattctgcacatgtatcccagaacttaaagtataaatttaaaaaagtaaaattaatctttcaaatattaaccatacactcccagataattatctaaaaaaaagaaagcctatgtccctgcaaaaatttccacatgaatgtttacagcagcattattaataacagccaaaatgaggaaactacccaaatgtctctcaactgataaatggataaataaaatatggtacagtttgggcaaccctaacccagaaattcaaaacattttgagcacaaatataactccataaatggaaaattccacacctgacttcttgtgacaagttgcattcagaacacaggcgcacaataaacaatttagtcagtgtccccaagggaaaaaagacccctccaaccctcttcagttggaatatatattttcctacatgcccttattctcctacacaaacactcagacaaagggtaataaaatggcacatgtgcaggtggatatgccaatgggatatgccaatgccaggttccccacaatgcccccacatgaggccaagacctatgtgcatcactyattgtggtttttctgcttattctctactatctggtgtaaagatattgttgaatatgtcacaaaggcttgcctaatacataaagtattgcaaatattcaaaacttcaaaaaatcaaaaatccaaaacattctggtcccacgcatttctgaaaagggaaactcaacatgtatatccatgcaatgaatattatttgactacaaaaaggaactaaatattggtatacactacaacatggatgaaaacattgttaggtgaaaggtagaagacacagaagaccacatattatatgattctatttacataaaatgtacagaacaagccaatccagaaaaaaacatatgattagcagctgcctgtggctaatgtgagccagggatggggtgatggaaatttctaaaattgattgtggctgaccaattctgcaagtatactaaaaattttatggtatrtgaattatatctcaataaagctgctataaaaaatagaaactatactttaaaattgagttatccatcatattaaaatttagaaagtctcattaagaaagggttttcatttccatgcttcaccaatccaagttaagtgtggcataactggtaaacccaaaattcatttcaaattcctaaaatgtcacatttacacaaaaactacttattcaaagaagtttccatattaaatatattttaatattttgagaattgtttgtttatattttatggctatgtggtttcataaacccaaatgcctgattccccaagtatcttgaataactagatttttttgctgtatttaagcaatttctattttgaattttcaattctgtgacttcatgtatttaaaagtaagtcattttactgataaagcatgtatgaacaggaagcaaatccaggaaaggaaagttctactgtgaattatcctgttattctgtggcaagtcttctgcctacaccaaaacccacagatacagaaattcaaagggagctgtgttaatatgcgagcttgactccagcaggaatatacttagtcctttcatgctcaagtcaatgacactgtagtcactcagactcccaagatcaagcccaaaattaaggtggaattcactgcatttcacgtatattaattttttttagattacacatacatcatttcaatgtattttttaatgtgtgattttgctagctatttatctgaattttcaacatgagttttttgattgaatactatacgcttataaatagaactcctgatgttttccttataaggaataacttctgcattcctttaacagaaaagtgagattttttttatgagaaagaggttaaagaaatccaatttagagtcatatgtcatacattcacaacatggggaaaacccttgaatattttacaatattttacaaaattctgagtggctttttcttaattaaaaaaaccactaatttcaactgacaatccaatataataatatatgagaactttgctttatcaggatattctttaaaaacctaagaacagctaaggcaccagagttgacaaaagattatttataaaaataattaattactgacatctcagcagcarcacatttttgtggtttataaaatttggagacaacaaactacccagaaacataccatgagttaatgtgaggatggattagacataaacaaatattttttaaagtctcattctatataaaggacccattcacaggtgacctgcaacaaaaaaacctgtcactcctgatgttgaaaagatttaaattaagactaggggattagttgatgtacagtgaatcccagaaaattcatttgactctaaagtttctatcccgaaacccartgaagattcaaaaagtagattcaatacatttctcatagaatacttttaggcacatagtaggcattgaaatatttataaaatagtcaacaatattgattaaaaaaataargcaaaatgaccaccctctgacatatcaatacttgggctccactcaaatacattggctgtaccaatacaaatctgttctacgatttgtgcttaattcacgagtaaaacatgaatgtgttaaacgataagggcraacattttccaaatactttaattcatactttaaatagtactttgctgcctaaaaggayatttgtatccaaatttggcactatttgatactacaattcatataaatagttcaaaacagtttttgcaaaagggcacccagtcatttctaaaaataaccttaactctgaatacttaaacttcctataaagataaccagatagaactcctaaatctatccaattttatacatataaggaacctcacagtctttcaaacataaccttttgcttaaaatattatagatttttggctctgaatttgtccggcccgatgactcaggctatcagttttttttatttacttattaatgaaatgggaataatacctagtatactcaacctactgggttattagaataatactaatattattattcatgatatgattttgaaaagcacaaaacattcaatacaaccaaaagacacccaagttatctgaaaaaataaaccacccctcattaargttcaagtttcccttttaargcaaatgtgtcatttatttataagttttgttttttttattaaccagtcttgttttcttataaagcagaggaaggagaagagaacatttaaaagagtcaggaagttagtgaatttacaattttccttccagactaaatacatcatatcactactcaattctcccctttacctattcaaactaatttacatagaggaaaggctatagaaacctgcaagcagatgccagctctatagaacatgtatcttccctgccaataaatgggtctacaaaaccaatagggatgatttagaaagcacattggaactttgcttttctattaaatacatctgcagggaaaacaagcaaatgaaaagaaacatagccacaagaaacatcttttaaatgaacacaattttaattttattgtcatttatcttctgacgaaggagatctggattaaaaaaaagagatctggatttaaaaaaaataaacacatctagattcaaattttggctcctttgcttaatagttttatgacccctgaaaagttgttaactttactgaataacagtctccttatgtgtaaataaactttatgagggattaatattacttacctgggggtttatggtaagaatgaaatcaatttaaattaaatagtctatgcaaaacatctgctaaggtgtaggcatttagtgttatttcctttttctacccctactttcaaaaagggtttcaggagctttctcttcattttattttgacctcaactgaaaggaacacagactatcatttataacataaaggacactataggattagtatcagtgtactttttaagagaactcttatttccccctccctccctcagcatagaggacacacacaaagctggaagaagggtcaaaggactaaaagatttcactgatcagttttacttaggatcagtagaatcatcttgtaagttataactgaacagtcttaagagagtgccagaattcaatcagatattttaataacagtaagatttctgtgcttctgccagataggaagaacatgaagaaaaaaaaaaaaaaagagagagagagaaagaagtccatatagttcaaggatctttaaagcttggtgaaaaggtatttaattatcttaacagccaaagaaatagaaaatccaatcaagtattacagacaacattctacaaatgaatagaataggggtatagaccacatggtgaagcagaaattaatttttacatgcctgttatcaataaataaagtttgatatatcttaaatgaactaacaaaaatctgatgaacatcttgctcaaattcttcacgcagcytcaaataattgagaaaattgcttgggataatatacytctgaggagatttaaaatatgaaatatttaggagaatcaaattcatactgttaacattttataataacaaaaccaatcatattttaagtatgtgtaacttataagagaatatgacctattagagtgacaggacaataattccttgtagttctgattaaaattaaaaattgaataactgattgagacttgtgattataagtagaaatcttactagcactaaacatagtattgacatatttaagagaacattacagtcactatatttgtaagtttaatttgtgacatgcataaaattttttcaattctcagaaaagtaattaaaaatcaaatatattaaatgtatagagttttaaatggtttaatgtggttaaatttataaatgactaagtatcattcaaaaacccttaaatgtttaaaatttgatatacttataacaagaataatgtgttttataaacagaacttagaagccaaagataaaactaggtgtttgaatctgtaacattaataaatttaatattaatttttaaaatcaaaataatcttttcatttttttatgtccacaaccactattgctcagaaaacaccaaacacatcacattaaataaagcaaatttaatgacaggttttagaagtgactatttcttttatagaatctgaattcatagaatcctccaactataggtagttattaaataccgagtaactaagtaacttgataaatctaagtaaatgattctttccataggcaaaatgaaatactaatcttgcaacattttgtgctttttcatttacatccaaactaagtcaagagttgtccttccattatcatatgctggatttagtttggatataaatgaaaattttattcctacattcaagtggttgtccattaactatttctattaactttctagtagttgttcattaactattctccaaactttgaaatcagcaaaatatgtaaccatatccatctttggtattttaagcttaattatcataaaagctcttarggaaatttaagcattaatacagaaaatgtatcttttctttgaaaataaccaaatccattttaaaaaggaattgtttatacagtctgggattttacccaagttacaatttttaatgaatgaaaataaatatataatcaatgtaacaagagagcgaatacaatctcaaagcttaatttaacattgctgatgacttaatgaaactgtatttacctcagagccctgatttgataaggctgttcattattttttagggcacacctattatttattcccataataactctaacaaataacaacataataactctaacaaataaaagtaagcaaaaaagaaaaaagaaggtgagagtaagaaaatgtacccattcacttggtgaatattttttctgtacctgccttgtgctaggcagtggcctaggcactggggataaagaggtgaatgagatagacaagggctctactatcctggaacctataagttctaatatgagaaaaataaatgaagaagaaacatcaagtaatgataagttacactctggaaataaaaagagtgatatgatagagcctgagaagccaatttaaactgcagaacaggggaggtctccaaggaagtgatatttaggcaagtggtttggaggtgagaaactatccatacacaaactccttccggcaaatcattcacaaaatttaactagttttattaagttctaggcaagtgctggatctactgagaccaacaaccacattttaggctttttttgcacacaaaatacaaagtatgtcttgtcctcaaagggcacttataatccacatttgaaactgattaatgattaataaagaataagggtctaacactagtaccttaccactaagccactttctaatctaaaaatgagtagattagaaagctgcttatgaaatttctacccagaaatcatgacagcaggcctctcaaatatatagttgctttctcataactagttagtcaaaggtagaaaaacaattaaaattgctttagttagtatggcttactgcctactattcctgtcgttcctacaaaaagaagtgtgaagaaaggggttgtacagtaaagtgggctaagtaggatatctcaggcaccaatttttaactcctccaaagctaggcattgtatatctccatgaaatcaacagaaagaataataatacagattctttcttttgttaaaagatgaacgtttgctcccaaatcctataatttcaaaggtaacagtcagcatttggaaaaggaattaaaatcatctcccttccctaagctttggaacccagttctaaccataactgccaatctagtcacacttacttttgcttcctgataactccctaaaattctgactttcatcctcccatatgtactccaagaatttcttttctcccattctatctagcaaaatcatttattttcaaaattcttccttccttaggacacagtcttccaagaatgttgtcartaatcttaacaggattgaactcagaaacataaaaatgtttaagagataaggaacttcaagttttaacccctgtcaagcatgacacccaagcagctagactgaagtccaggctgtcccatggctttaaactgtacagcacatgagtgactgaggcaaaaactatgtcttcccttcaactatctgatgcagtgccttaagaataagtctattattaaccgataaaactgtagtgtagctttaaaataaagaacacaaggaaacaaatcttccacttgttccaaaataagatgtgaaattatggcagagaactctgccatttcataagtcccatttatactaaaaaccactttgatgtttaacactttatttgtgaaaaggaaaactgatcaaactgatcacgtacatttatatctggatataaattacttcagkatgcagttatcttataattacctatatttctgcaattgataaatgaaaattctgaatccaaactttaatgctagctcatctggttgatttctattcaaaacattaatggaagactgactatgcactatgggtaggcactgagccagtaactgtgaaattaaaaataataataagatttgccttcggggagctgaccatctctacataccacttttttttccttaggagacaaggtctcaccctgttgcccaggctggagtgcagtagcgcaatcatagctcmctgcagccttcaactcctaagccagcctccaactcctgagctcaagctatcttcctacctcagctttccaagtatctatgactacagtacaatgatattacagtatagtcctattacttctgctgatttacagaaattaatcaccaggtaacaaccagaaaatgaaataaatcaatgaggtagtatttcagtactgtaggaaaataatccatttgtttagataaattaaatagaataatatgaaattcaacatgaataaagttaagaaatcaacctttacatagaaaataaaagatctaaaattctacttctatggcacrcaggtttttgtttagaaataaactagaaccaaagaatattaacactcaatatgtttacaataaaaagaaggttcttaattgcagctaattttctcttgaaagcttgtgtcctttctgaaatgctcaccggtactttagagccaagggttcaactaccaacaaaatgggctgtctgagaaaattaaacatgcctacagaaatgttttccttggaagtctgtccaaccagcatcactgatgaaaaaaatccaaccaagctaggggccagcagtaactggagaacgtagtgtcaggcaacaggacagagtgagcaacactgtcacaggtacaggctggcaggtaggcaagtaggcaggcaaacctggcagcagatagcgagatcccagttaaagttgtccaggtaatcatgaaggcaggtaaccaaacacagaaagcaagacaggaactctcatcctacaacaggggcacagaagacctaaacttccccaactctaacaatactggccccaaagtctctatcaagactgacacagaaaatgaggcaatcttataggatactggtagactttagtgacacttagtcattcaagttatcacaatgtgacaactacaaatatgcaaatgaagaactcctaagtcctagttctgcttcaaataagcactgattttctaaaccatacaaaataacaaatttgtgacaagtgagaatgcattgagaatagctatacccgtttcagtgcccagacagttaagggaactaaagaaaattaacacaagtcaagttcagacatttttttagaacagaacagcaattagagcaagcaagaaagtactatccagtgggaataaaaagaaataggagaactattttggactaattttgtaataggaaaaaaaaagattctgaatctcctacaggttattcttgattatccatgtcgcaagaacagtataggagtatggataaaacaaagcaatagataatacacaaatcattatactttgatagatattttaagaagtaaaattttatactaagtttatcttactatttatgttttcttttgaacaacaggaatcagatagtgtgctatttacagttgcttaagagtaagcataagatttcagacaaaaaaatgagagggcttaataatcctttattaaaagatgtacacttcaggaaaaaggaaactaatactagaggaaaatctatgatacatgaataaacagtgaaaagaaaaacaggtatgtaaatgaaaataaataataattgtattaatgacagtaagaattatctgattcagaaagtttttttaaaaatctaaatacgagcaattttgtaaacacaagaagcagaataacaaaaatgacctaaatggttcacaaggagagtaagaatattgaataactgtagactttgttaasatacacatatataaatacaaayatatgtggacatatacatatmyacacacacacacacacacacacacacgcatatttacaaacatatattytaaaataacagaataaacaattttaaaaataactaagctccctgctagtggaggggacaaaacaaatgagaaggaaaaactcaaaaaaatcaccaaaaaagaggaaaaaaaaaaccaacagaaatggaaatgttacattaaaatgctaaaaataatcacaaatatattaataattataataaatctaagtgaaccaaattccctgttatctttaaaagtctgaatttttaagaaatctattgatatgctgttcataagacattcttaaaaaataaggacacaaaaatattgcaaataaaagactttaaaagaggccttcaaggaaagccaatttagctatatttgcatccaacatatagacttaagtagaaataaggaaatggcatataagtacataaggaaagaatgacttttaaaattataaaggaagacataagtctaaacttatatatacttaacaaagagctttgaaatatattagtaaaaaactgtcagtaaaaaaattaatacttacaaataattcatggccaaaggagtaaacaatagaaatcagaaaacacaaaactaatgacaaacatacaaatataaaaacttgcgagatgcagctaagcagtaaaatttagtcttaaaatcttctgttagaaaaaaaggctgaaaattaatgagctaagcatcaaaataagaaaaacaacaaaaaaagtaaaatagaaggaaaaaacccacagccaatatcatactgaatggcccaaaactggaagcattccctttgaaaaccagcacaagacaaggatgccctctctcaccactcctattcaacatagtattggaagttctggccaggacaawcaggcaagagaaagaaataaagggtcttcaaataggaagagaggaagtcaaattgtctctgtttgcagatgacatgattatatatttagaaaaccccatcgtctcagcccaaaatctccttaagttgataagcaacttcagcaaagtctcaggataaaaaatcaatctgccaaaattacaagcattcctatacaccaataatagacaaacagagagccaaatcatgagtgaacttccattcataactgctacaaagagaataaaatacctaggaataaaactcacaagaaatgtgaaggatcttttcaaggagaaccacaaaccactgctcaaggaaataagagaggacacaaacaaatggaaaaacattacatgcttgtggacaggaagaatcaatatcatgaaaatggccatactgcccaaagtaatttacagattcaatgctatccccatgaagctaccattgactttcttcacagaattagaaaaaactactttaagtttcatatggaagcaaaaaagagcccatatagtcaagacaatcctaagcaaaaagaacaaagctggaggcatcatgctacctgacttcaaattatactacaaggctacagtaactaaaacagcatggtactgctacccaaaacagatatatagaccaatggaacagaacagaagcctcagcaataatgccacacatctacaaccatctgatctttgacaaacctgacagaaacaagcaatgggtaatggataccttatttaataaatggtgttgggaaaactggctagccataagcagaaaactgaaactgaaccccttccttacaccatatacaaaaattaactcaagatggattacagacttaaatgtaagacctaaacccataaaaaccctagaagaaaaccaaggcaatatgattcaggacataggcatgggcaaagacttcatggctaaaacaccaaaagcaatggcaacaaaagccaaaattgacaaatgggctccagttaaactaaagagcttctgcacagcaaaaggaactatcaccagagtgaacaggcaacctacagaatgggagaaaatttttgcaatctatccatctgacaaagggctaatatccagaatctacaaggaatttaaacaaatttacaagaaaaaaaaacagacaactccatcaaaaagtaggtgaaggatatgaacaggcaattatcaaaagaagacatttatgtggccaagaaacttatgaaaaaagctcagcatcactggtcattagagaaatgcaaatcaaaaccacaatgagataccatctcatgccagttagaatggcaatcattaaaaagtcaggaaacaacagatgctggagaggatgtagagaaataggaacacttttacactgttggtgggtgtgtaaattacttcaaccattgtggaagacagtgtggcaattcctcaaggatgtagaactagaaataccatttgactcagcaatctcattactgggtatatactcaaaggatattataaatcattctactataaagacacatgcacatgtatgtttattgcagcactgtccacaatagcaaagrcttggaaccaacccaaatgcccatcaatgatagactggataaagaaaatgtgccacatatacaccatggaatactatgcagccataaaaatggatgagttcatttcctttgcagggacatggatgaagctggaaaccatcattctcagcaaactaacacagggacagaaaaccaaataccgcatgttctcactcataagtgggagttgaacaatgagaacacatggacacagggaggggaacatcacacactggggcctggaggtggggtgctaggggagggataaccttagaagaaatatctaatgtaggtgacgggttgatgggtgcagcaaaccaccacggcacatgtatacctatgtaacaaacctgcacattctgcacatgtatcccagaacttaaagtataataataatttaaaaagaaagaaaatataaccttaccaaaattgactccaaaaaatggttttaaagtagagtgctatagtcttcaaagaggttgaatgaaaaatttaaaactcataatgcaaaaaaaaaaaagtcctaaatggtcttagaggaaactgaatgaagcactcaaagaacaaaccaatctagtattacaaaaactgcttcagaaaacctaagaggtgaaaacattcctcaggtcattctaggagactggtataacccttataccaaaacccagaaggacagtaggaggaaggaaaattatgggtctatctcactcacaaccattgacgcaaaactctgaaaaaaatattagcaaatatgatcagccagtgaataaaaacataaaatacaacaaagacttatcccatgaattcaagtggtttaacatgaaaagtacctattaatatcattaaaggagaaatcttatatgattatatctatatagatgtattttaaaagttcaaygaaactcaatatccattcacaattttttaacacatggcaaataaataaatggcaattgaagagaacttccttaacctgatcaaatatacctaacaaaaattaacaccaaatgccatatataataataaaatattaaaatctttaacattaaaatcagaaacaagacaaaaatgtccactaccctcacctttggtcaatattttaaaggaggtccaagtaagacaaagaagaaaaaaaacaaaagtataagcatttttttttcttttctaacaaagaaataaactatcattattggaatactatacaatcacctatttagaaaatctgaaatctgcaggcaaatttttaaaattgataataactcagaagttctaagaaagttagtatcaaaaattaattgcctttcaggctggacatggtaatcatacaggtgattacctgtaatcccagcactttggtaggctgaggtgggcagatcacttgagcccaagagttcgagaccagcctgggcaacatggcgaaacctcatctctaccaaaagtacaaaaattagcccagtgaggtggcacatgcctgtggccccaactactaggggaggctgaggtggaaagatcactgaagtctaggaagttgaggctgcagtgagccatgattgcaccactrcattccagcctgggtaacaaagtgagaccttgtctcagaaaaaatgatctttttaaattaattgccttttawttcatggacaaaaagaagacactatccacaacagtagcaaaaaatgttttaaacaaaagttgtataattatataataaatatattaaagaagacccaaagagatagaaaagtatgatcttagccaaggaccggaaaattcattattttaaacattctctcaaatttaatctacagattcaatgaaattccaatcaaactgaaagaaaaatgttttatgagcaattgcacaggctaattctaaattacacagaagaacaaagggctaagaagagctctcttatgaagaacaagatgagaaaacttgccctatatgataccaaacgtataaaactataaaaattgacaaaatcagtttgtgacatagaaataaagcaaataaagcatcatgacagaaaagagaccccagaagcagaatcctgcttacatggaaatgaacataaaaaaagagctggcctagtcaactattcccagctaagcaattcaggtctctgaactataccaaactatatataaatttcatattccaagaatgacagaaatctcactcatcctatctcaagtttttgagaggaaaaaggtatacattactgaagatatgtaaacaggcaaaacagtagagacagttactttccataaaatcctaacttattcttcttgtgcaatagatataattcacctagacaaagtgtttttgggatccttcataatttttaggtaaaagggtcttgacaccaaaaagtttgagaatagctgcttctgaaaaaataagaaaagcagaaaagttcaaaaaaaaagtgaccattcaaaaaaaaaaaaaaaagaactgttttactggggaaagaaaacatgtcattttgaagcatgaaccattttggaatgcctcctttactagccagaagacaaccttagtagagaagcactcagtggaaaggagcaaactatctcaacatcacaccctatgattcacctcccctaggcgctctctaacttgtttcctccatcaccaccccaccctcccccaggtgaggttcctgccccattaggaagccttccagagctgtgtgtcctgtcatagcactgtcattaaaaggctcagcatacttagataaattcccaccactgtctgagctgctaactagcccaatagaggcttcatagtctctaaagtaagtcagagtagccttctattttgggtaaatcccatttttgttttatatgggggccacaacacttgcatccaattctgaggaccctattttatgccctccttgacctgacctaagtatcccattccctgcttcatacctccaatgtcagaccagcaagacatttgagtattacacttcttaatacaacaatagtcctcatgaaattcacctttcattgctcctattcctcctccctgcatgtgtgggagaatggtggaaatctgtgagtgtagaaaccaaaaggcatatgagagttttgagaaaactgacatttcaactcccaaaagcaagtgctagcccttgagtcasctccatgtaagcccagccaagctcacacacaggcaaaatcccacaaacctgctctgcttagactaatcaaaactggatagaaatgggcaaagctctgtaatacatttgtcagttttaaaaagtattttcttaccattctcccttggtatttaagaatttctttttgaaaattctggcttatcccaggtgtgcttaayggaaacaaaggtaaaaacattaggccatgcttggaccagaatgttaaggccaaagttttctaaggaacataaaggttgcaagttagccccagggttttggcgtagtgatatatacccttgacacaaaatgaataataataattggagtacttagcctttctctctcttgggaaatacattgtccccagagctctctgtttaaacctggaaaagttctgaaagwccatggagtcccaagtttcaagtatgctataaatgccaggagaatgacaaaaggattaccaggatgcacaaagagaagttacaagatgcaaaagatggattttacttacttcaaaattatgcttgggactaaccatgtaacttggaaagagaggggaaagctagctatacttcctttctaccccttagtatatctcagagacataataagttaaataagcttctgtaggctagcctggaaactaaatcatcagcatctttgggaaaatgtgtcatggtacacacccctctgccccctcccaatgactggcaaaccaacatcaggcatatgaccactagctacttagaggatacccaaatagaaacctccagctgctaggaatgggagtgatgggggaatggggaaaacataggaatgaagagggaaaatgtaaaaacaaaaccaccccattatggtaaataaagtaaaagtggttagagtttgccagataactctaatgtgcacatttggcctgtccctccctgctcctgccccaccactgtaccaactaagtgacaggtttctaattcatcatgaccatcatgttccaaatttagaattaattcactcattacttattataatatataccaatatattcctacggacccatactgaatatgaaagacctgctcttgggaaggagaacccaccatgggattacaaggtggcatgggaaaaggagaacacgacatcaggagacctagatggactgtatacagagctgagcatcaggtggatgggtccattatttgagtaataaaacagacttagtcacatggccagactcaatatttcactcaggcctccccaaaccccagccaaaaggacctgactacttggctataagtgtcaatcctatcaggaggctacatttttgaaacaagctttcatcttactgttttgacctgcacctgttattagcatacatattttcccctattgtttcaccttctagtttgttttttcatgaaacttattacaaattctaagtcactatcatatatactcaaaacattaaacacagcaaaaactataaattagcaccaatctgcctttcaaaatatatactagaactcttctcaacataagtgacacctgtactatggtagtacaggttctgaaagtttcttgtcccttctagcatgtcactttacagctctctgggaatgtagcaactgcccccagagaaagcactgttcagtacccagcatctgaacccactttctgtgtttgaagaatctcttacttcatgaggcagagctcactcttcactgtagctgtagaaaatgccacatacggctctgctcaaccttccttgtagctaggacttaggctcaggatataggcccagccaactaatccaagggtccacagattttcaacagaagctagggatgagaagaagctaggaccacaggaattcaggagagggtggcaaaactacattccgtttccagaggcagcaattctggagcttgataaaggagtgtccagcactgatggtcaggcaatgcaagccaatgtctgtccctggaagcaggggtgatatgtcttcacctgaccagctccagagggtgagcatatcagttcctggctccatggcctgcaagccgacttttctataaagtaacaactttcacttaaaagtaacaaccatattcaagtactgtgccaaatcctcaaagaaaaaaattaaaaagatagaatgtctgaccattgggcttttagtatttactaataacaataataaaaggatacaaataatagaatgcaaaattcataagaaagtgatgcaaagatataaacacagttctctgaggtaggacacatcagatcaatgcagttatacaaaaaatgagccaaaaatccacatatttaacttaggatgacaacagttcaaacagtaaacagacatcttgcccttaccttgcattttgtgcaagcatttaaaatacagtaactaagatcaagtcaaaatattgttggtacagtgaagtggtatcttcagaacgcagaaagtaaatttgaattacataatcaatcatgtgggtctttgtattccatcatccccaaataatgtatgcctgaagtctgacagtcaatatacacaggctaaatcctatggaaagaatatataaattattttaagtgttttctgactaaagaaaaagaaataaaatatgcaaatgagtattaatgaatttcctgtaaaattaactgaagtgagaccacctagacacatgacctgaaaaaagtaaggtaaaattggccactgtgttatatccctaaaccatgattctgactatgggattttcacctgactgctagatgcaactcactctacacagtgcctccataacaaagtagagattgtccaactaagattcctagttatattgacttctaaattacacttcaaaaaaggcaagtcctaatactatgttcttctacaaactctccaggcatggcatctagaagcccaaatcagacagaagaaaccagttgcttcacacatttttatctattccccattttagagaatgaaaaaaaaatcactcttatttaagtaatggtacctatggaaactgaagacactaaaatataaaatgctggaaataccaatgtgttctacatatttgctatcctattagatttcctttcatctgtccatagtgttttatctaagtacttaaacttatctttaatcacaataaattttcaaatctttctaatcaaagcttaaaatctacagattcattttcatgtgtaattttgaacttttttggaatctcttatatttttagcatattagttatctgaagatgaaacattcccagaatgaatagtgtgtgagttactgatctagtaaagtatattaaaattaatattcaaactcataaaataaaatccaagaattaaactctatacataagtatataagtaagcctcttaacaaattcttttgtttctatcccgctttgggcatgtcaaataatcagatcagtaagaaaatctttaaaaggttcaaattgttttagcaaaacaagtttatatctttattgattcttttcttccaacatgcttccaatttcaaaacatatattcataaatatttagcctatttcaactgatacactgtaatagaatattattatcttttgtctgtgactaaacagcaaggagatatttgtgaactgggcataaatatgaagtgactacagttttcatgtcaatttgatacaaaacaaaatgaaagactggtaatttttcaatgacccggacatccacaatgaatcaagttaaattatttaaatactctccctaatatatgtccctccatcccaatgaaatcttttttctccaagctttcagctttaattatccagataacctaaccctagctgtattcatttgaccttaagaatccctgtcttttgtatatgtcatgaaaacaagcctcataaacttcacttaagaaggtataatcaccctcatttttaaaaggaaagaaaagcaccagaggttaagcaacttatatgagattattcaaacttctaagagctgagagacctaacacaaatccttttactatcatacttgatttttatttacatatatatgaatatatcatatatacaggcatataaacatatacagggtatattcatggcccatgaaagctaaaaggtacgtatctcatgtaaggagatgaaatcaaggtaatcaatagatccttaggagcaaaagtttacctcttggctatcacacactttcaaaaagcttttagtcttatcaaacacagacattatacgtcatcccctcaaacccattggaactagcyggtgaatctggacttggaatccaaaatttgtttaagaatttcatttttttttaatccttggaatctaactttccatatacatctgaaaagcattacctccaatgcaattaaaattctacagtatctctcaaaatcttcttttcagaagtacctggaatagcaaatccaggcatctactattttgagaaaaagattctgagaatccaacaaacaccacaaaaagtgattacaaaaactgctctgaaaagggtttgggatttccacaaatgaacaaatctgtcaaagaaacggttctgatcactaggtcatcactctgcttttagtcagtttaactctacagttttataagaaacgaggtgccctcttcccccttaagtaaaaattagcaaatctaaagaacgatgactcacttcccaggcatagatagtaatgacctttttttttaatcggggggtgggggggtggatatttctactatagtcacaaactacttcgctaaatgtttagtgagtgtgtaaggggcatggtgctaagcactactggtgataaactccagcattattttatgtaaatatcataggaggtgtctgaaagaacaggtgatcaaaggggatatgtgttagagtagaagggcagggaaggcaggaaaaattcaatgaggaagtgtcatcagacataagcttggaaaactatagtaaacaataatttattgtatatttcaaaatagctagaagagaagaattggaatgttcccaacacaaggaaagatgaaagtataacgtgatggatatctcagttaccctgatttgatcactagggattgtatacatgtatcaaaatatcacatatacccccaaaatgtatacaactattatatatcaattttaaaaaagaaatggacttggaagtttggtaggacactcacacagatggcatgaggtaagtactttacaaacaaagggaataacaaactcagtaattagaaaactgactatatttttaaaacaaataacctacttttgctaaaatgtaggtcacaatttgtccttcactgattttctcaacatcactctccactgcaagaaatccatttctaaactctttcataagctatcactattttccatgcatagaaatgagggttatttgttttaaatatcattatgaacaaagacctagttttgtatctgaaacataataaataatatctccatcccatctcccaaggtctaccacactgccttgaaccttgatagttcaaagcatgtcagtagatgacttagaggcaatcataagcttgacttcctcaagacctctccttttagacagctataaaatttgcctgggaaggcaaagcaaaatctctgagtaacagacctaatcaaagttgacttatttcagtaaatattaccttactttttcccccattttattgcctaagaacctgaactcattcattcactgataaacatttctacagagcttaaatggcacaagctaggaaatctccatgtgaaaatataaagcatttgtttacaggaagaaatttcagaaagcctttgtttacattctaactgatgtgccaacaatcttttaggagagatttagaaagctcagctttaataatgacagaaagctatacccctctggggagatatttaatggcctatagtttatcccagagagatgaaaacagatgtctacataatataaataaaaatacttatgaaattattttaatcagcagtttactcaattttagtaaccttgaaacaacttctgaaattttaagaaaacatatgaagaacagtaaacagtacatgttctacccaaaataactaaatagtccatgaatgatgaaatgagatctatgaattccagaccatcttttagctcacccagaatcattgtagcaaacacttgaaagttatgagattgattttttaatgagaaaatttgcagatatttaaacatgattttaaaccagtttgtcaggaatattcacctaaagaaatgatcacaattttctaaatcagcagttggcaaacttttatttatttatttatttatttatttatttatttatttatttatttattgagagacagtcttgctctgtcacccaggctggagtgcagtggtgcgatcttggctcactgcaacctctgcctcccaggttcaagtgattcccctgcctcagcctcctgagtagctgggattacaggtgcccgccaccatgcccagctaattttttgtatttttagttgagacaggttttcattatgttggccaggcttgcctcgaactcctgacttcaggtgatccacccgcctcagcctcccaaagtgctgggaaggcagacaactacttgctctgcctttacagtaggaaagcagccatagacaatacttacaggcatgagtatggctgtattcaataaamctttatttacaaaagcaaacagaggtctagatttggcctaggggccatagtttgccaacctctgtcctaaattactcagttaaaatcatgatcttttcattgatagggttgacttattcctagacaagttcataatatttattctcccacccaagtctaggaagtggttgtttcctgctgcagaatacaaaaggagaactaatttgaagctcaggttaaattctctagagcctagcaaaattgactttagtgctattatggcttctgagtgacaggccaagtgactaagaattggagaaatatattctgactgagaagagagaagtgggagaaatgatatttagatatttaatcattaaatttcttttcttttttttcctaacctcattaagaattataaaattctgagtcagcactatatattagacacaaaaccgggcmcttcatatatatatttcatgtgatgtaccaaaccatatgtgccagaaattattccacttttcaggtaaggaaactaaggaccaaaaaagaaactttggcttaaggtcacaaagatgcaaaaacatagccaattgctctttccattaactacattgtttctctaaaaattcaatgatttttttttcattctcttgtctatttcaaaaataggactccaactttcatcatcaaatcataaaagatcatttgtaagacatatataatttacaacttaattatacaaaaatcaagatttaaatggacattaggttcccacacttgccagcccacaaacacttatttatcagaycccaaatatgagtggcttttaattttgagaaacgggtcagcctaggccaaaaaaaaaaaatagttgctgattaattgagagttgaaacctttccatatcaaactatactttaagagcatttagataaactcctttctaaagtatgcaaacacactttcttcccttcttaaaaagagtacaatgaagaggttcaaattatcaatgaatcataccatcacatatgcagaagtacagataccacttaccagggataaagatgcatataaagatacaattccaatcttgtaattactagggataaagatgcatgtaaagatacaattccatatcttactgaggtttaggcaattgtcttaccacttacacatactctcatcacagcaccccttgaaggcaaaactgatctctgctttgtccatttgttactaactctaagccttgtttgtcctgtttgatctctgcaacagcttctaaatgccactgctttttcttttaacttcttcccctctctactcccattttattttcatctcttctatattactgtctgtcctgcgacttctgaattttaaaaaatattagtctttcacagacaatatcaaaccaagtagagtatacttttctttctgcaaaatgaagacacacagtaactgtgcataatgtattccccaaatcttcagctcttctctgattttgttgttgcctaaaggggtctgtttcttcattatgaacaactccttatagcttacagaaagatgggagytgggcaaggtgtattttggcagaattaattccctaagacttccagtgtcctaacttattttttaagtgttctaatttacaaaagatttttcctattctaaaaaataaaataagattgtttccagctttgaaattctatgaatctaccagaaatcaatattatatataatatttgattttttgatcttgcattctggtctttcaagagaagcagttttaagcagataaagacaataaaggagatgaagacatttagagggattcygaagagacttataattatttttaagaactctagaggctaacagagccaacttattttactttaaggctaaatgttttccttttcttttattatacaaacatataatattaataccaaactcatgtttatgagctatgattagcatcatctttggctcacagatctagtgaagaaagggaaagaattctcagagtaactgggaataagaagaaaaatagtattaaggaggatgttacacatctggatgaaataggctaagttccaatgagctgtasttaaaaaaaaattaaaagaaaaagaaaaaggacaccctacattatacttgatcctgctaaatggaaaaaaaatatgagagatggttatatgacactggcaaattatctaacctctctgagactccaattcttcaaatgtcaaatgtgaatagtaacagcagcctcctcaagatgttataaaaggattagttactgtccgaaagttacttagcctagagcatgacacattataggggtttaattaataatagccatcatgattattatggttcaaattcttttccatagaaatactgctaaatcagaactttcatctattcatgactcaacaaatattaactgagcagttattatgtcctaggggcctaccaagtgctggtcatagaagtgaatgacataaaacctcctacttgtagagcatgcaatcagtgattagcacaggtcaaggtaaggaatgaagagatagtgtgtttaggtgtctataagtttgggtcataacactatacaatctcctgggacgtgtgtgtgtgtgtgtgtgtgtgtgtgtacacatatatacatgtatgtatacatatatatacatatatatatatatataatcttgtccctgtcataacattatacaatcttctgggatgggacacatggtatcctcccagtcaatgttcacctaagtcactaagtgctaagtacatagtgtatgttcaaaaaatatttgttacataaactgttcaatgatatgaataatttgtatgcttagtctgttttgctgactaaagcactatataaagtccactggaatactcagcaactcattattattatcaaaaccttgcctctatgaaaaatctatattggattaatatttattttcttgaattgaaacatacagaagaaagaaaataaaaaggggtaatctgaatgcttctgctaagaagcaaattcctccagttcagtgttactctgtttcatttattcagcaagtagttattgtagactcactttctaccagcactgctgtaagtgctgccataataatatctatcaacaatataggtatctgccaatgtaaataataatgcttttaagtttagaaagtgtcttgacatattaatttaattcccaaaacaacactgtgaaaaagtattattatcccttttcctagatgaagaaatgaggctgggaagacatttacacaaagtcatacaactagtaagcaccagagctgagtctcaaacccagatcttcttgttccaaatccatcatccttctcagtgcctccactgagattcatttcatcacacagtaatgaattcctggctgagcatctctataccagtaaacaaataatactaatatatttgcttataaaaattcatcctcttccacaatttgagggaaaaaacaccatttatctctccctttaaaaacacaggaatagcgtatccacatcacgatacgtgtctaagattatatgagaaaatactgcaagaactctttcaatcctcasaactacgtacagcatggcatatttcagtttctaccccccaaaaaggaacttagaggagaaccaactgattctatctctgatagcttatgcttttgaaagcagttttactgtttgttcacatggtttaatgaaatttacagattagtttaaaaattggcttgcccaagaaagatgagagccaggaccatttctgatcttttcwacagcataatcattcaatttgaaacaggaccagtcaaagaaattttttaaataaaccacattaaggaagatgacagaaaaaaaagataagagctagcaatgaaaacatgaaatgattaacactggtaaattaggaacacttttttcctagtaatagcagtgccacagtcaacatactcatactaagaaaaaaaaaagaaaaccttctgaaagcatcaggtatgtctgaatggcaaaaaattgaacagtaattgtccaaaatctctgaagtacttatcagttatgaccttctactccagcactccccaacctttttggcataagggaccggtttcatggaagacaatttttccacaaaaaattcaggggcaggtgatagtttcaggtctcataaggaacctgcaacctagatccctccacatgcagagttcacaatagggttcatgcacctttaagaatcaaatgcagccactcatctgacaagagaaggagctcaggcagtaatgctcactcacccaccactcacctcctgctatgcagcccagtatctaacaggccacagactggtaccagaccacggcccagggtctgaggacccctgttctactctaccagagtaccccactgatatagaaaactatagtgaatatgttgtcagcccagctcccctcaagattgaaaactctgatggtacctgggaagggaactaatatttcacaagtacgtacctgtaccaagtcccacattaaacatttcacattcaagacctccattagcctttccagtgccctatcttaatatagaatactatcttcattttacagaggaaaaaactggatctcccataaaccagtaaactcagcctaagtaaatggctatagaataccacagagaagatgctttcaaacatcaactccaaaacctgtattcttttcaatctaccacaatgctgattacataaaggttctcacccctgatttctaattaggagaattatctcaagagacttggaaaacatttattctgtaagaaactacgcctgtgtaattgggtcatgacaagcttctgaaatgtaagttgcaaagaactgagttacctatatgttgatagctgtggccatcaggagatctatgttatgatccaattatactagggaaaaaaattattgcaacattgaagaagtctgtaaaagacaggccaagactttaaaattaaaacattggatattgattttcaagtttcaagttcagttcaaatttatttttaactaccgtgtgctcagtgctraggatataacaatgaataaatgacaatctgtgtcccctaggaacttccagtgaagggaacagcctcatactttcaataaaatatggttcattacatgctagaaggatttgcagggagcttaggagagggagagcttggaggacaagaaagggctctgagcagcactacttctaggagcctatcccacaacactcagacatgtacacaaaatatatcaagatgcagcattattcatagaagcaaaaacatcggaaataatctaatatccatcaataaagaaaggatgaataataagttagggcacatttatactacrgagctattaaaaatgctaatacatggacatggaatggtcttacatgcctgtcaactgtcatactaccaattgaaaaaagccagagggataaaacaaaaaaaattcctcctatttttgctttaatatgtataaatttattcagaataccctaagtatatacaagagctaaagagtcttttaacaactagagaaattacttgcccaaagtcaaggaagcaattaatgaccagggactggtcatttactaaacaaaacatattacagaattaatgttttaccatttggtaacatttcccaccagtatgtttagaattcttaattatttaagttgttagatcacttttggagggaaaaaatatatacacaaamacacacacacacacacacacacacaccccctacacagtctccccatacttagtgaaaggttttattagtacactgtttaaacaactttaacattacttgaaggcaaagtaccttaaaaggttctttcatgcaatctttgctcaggttttcctgtttacaatactcaagtccctttagaatacggaatacagaacatgacataagatagtaaatggtaagatgaaaacagagatgtcctttatccctggacctccagtattgctaaagagcaaagactactactggcagaagcctgatttaatgttaaaagctttcctgggcaaaacagaaataagaactagaattattgtttagatacagaattaaagaagactgattttaggagctcaaacagatcttagatcatctaatagaaccttttcaatttagagaagaggaaactggcgcccagaggaaaaagatcacccataacaaataattaccactaagaaaacacagacaggaaagtctaaaagtatccacactccaagtccattgtcttctctggtacccagacatcaacacttaaacctaattattgaggaaaattactttaatttagacttgattacccaaatgggctttctctaagggatgaaattactgctcaaatcttcttttacaaatgtaaacatagcctaaaatatttactttactactatcaattatttaaacaaaacaatgtttataattttctcatattttacagcaatatggttatcatgagacagaaaatacagcatgttataatccaggctgattcaggagattaaaagaaaatttaaaatccgcaatctctggtttccagaatgaaatggcaaaaatggtcyacttagtgcaatcaacaagttttactcaaaggtgaaactactttatcacagcaatacttttgttaattgaaaccactttatcataagcctacattcattattataaaatkttcagatttctgggataatcattgaggtgggaaaggcaataagaactgaacttatgaaacgcaattcaaaagaataattctgtttttaaaactgtacaacaataatttttatccaactgtgttccagaagccacagaatgttaaataatatcacatttaaaacaaggcaagaagagaactttttaaaaaatgtaacaatgtggtctttcaggggccctgcatacgttaatagctttatgattttctaagaagggggcatggtatgaagtttcccaaacatattcaaccacagaaccatttttttcacaatgctccctaatatctactaaaacctatctttggcataggccacatgttgtcatcatttggctctagactgtacaaagtccttggttcactggtgctatatgaagggttatgaaaaggaataatatttaagtagtagcttagccctgcaatcttcttttcatactttggcggagagatgagaaggaattgaaggtgaccaatttcaggcagtgaaaatgactctccatagacaatgtatgaaaacacaatgtacattattcatgaacataaaattcgtatgtcttaaagttcaaaccactgcactaattattctcacacttcattacataatattctcttagaattgytgttaatcaaaaaattataagctgggtgcagtggagcgcaactgtastccaagctactaggaaggcttggtgcagtaggatcacttgagcccaggagtttgaagcttcagtgaattatgaccacacctgtgaataaccactgtactccagcctgggcaacacatctcttaaaatatatrtgtgtgtgtgtgtgtgtatgtatacgtacatatacatgtatgtgtgtatatacatacacacacacaatttgataaaagcttttaacatcaaatatatacacatatatatgtatatagacgtatatatgtgtacatatacgtatacacacacagacatatatrtagttccagaaacatgtatatatttttaaaacataacatcgataacaaaagcaccaaaaatggtaaataaaggctcagctaatagcctaaacagaacacaaaggtactgtgaatttctgactatatttgttttgacatattttcttaactacactgaatctgatctgaattcaaaggccagatctttttgacaaaaaaaaaaaatgttctataaacatgagggataatacttgggtgataaaactcaggatagatctcaacaataaaggttgagaagctctcaaattcataccacatgttagagatcttgaaaggtcacattaaaggagatgaaacaaaggacaaaatgttcaaagcaagtgtttgatgtctaaattgttacaggtgtgctgttgtgactcaattactttctgaactgtcagtgtgagtctgatacagggaagacacattaactgacccctgatctagtgctctcctctgctcatatgcattttatacagtaaaaaggccaaaatattgcccaaacaaaattctacattcaaataattcctgggtcacctcttactttaccctcattttgtggatttaagactctgcctctggttcctcatctgttaaatatgaactatttcacaaaagttttcaaagactagtaaataaaataacattaacaaaaaaactaaaaatgttagagttttatttgtcccaaattgagaacatacgtctttactttgatcacgttattcaatggcagtctgcttcaaattcaattaaaagcattaaagggattttccaaatgggataaaaatagagcaagaagatagcttatcatgaagggcctattctaaaacctgactcttacatcagtaaacacaggctcaggccagactacctaggctgcatgctgggtctgttcataagctgtggactccatgcttaagttcttggtgcctgggtttccactgctaaaaagtgatcagctattgtaaggaccaagttaattagcataaataaagccctttacttggtgcctggtatggtgaatgttatctattttattatcatcatcaaaatgataatgtcccattatcattttggaacaaaacaaaagctttgtttcttctgaggtaaaaagatgccattcgtccttagcactagaagcatgtaattgagtatacctccttttcacagtgttaatcacactggagctgtgtctccaatacagttgagagagggaggagaatgcctcccacttcacattctattctgatctctctgcctgtctacctaaattcagtcatgacttaagaagcactttgatactttacatgtttcagcagcatttctgcaaatagttcagaatatgttaatttcaccttggttgtatttctgactttccagagaagtagcaggccttatttaaaaactaaaccataatacatttatcttccttaatctcttcgtaaatttgcacatttcaagtggaatcatggcaaactacattcccaaagaatttctttcagctttgtagttcaataatgtaactgttcttaataattacagcactgaaatcttcctacatgatgataggacgctaaatatgctgtgtatatatatgtcatatatatacatatatatgacactaaatatgtgwatatatatatgcagagatgtgtgtatgcctaaattgtcagagaaaatctatatctgtgtgtgcttatttatagacaaagttaattcattcctgactttttatcatatagtcacatctttagtcacattgtgctggttcactctgttccacatatatttactgcactcccaaccatctgtctctcaggtatgtgacagcagtcacacgggagaatgcatagtggaatgaagatgggttcaaaccctgttacctctcctgaccaaaaaaaaaaaaaaaaaatgcttcaggtagattggaatgcccagcaccatctttgtaaatgaagagaggcatatgaaaaagatgtatcatacttattattggtagagcaggtagttaatttaattcatgaactgtcgtgatgttgagttccaccacccctttcccttctccaccactcctacatataatttcaaggtcaaatgccatgaatacatactctctcaattttaagataggtaaaaatttaacttccagaattagctctactccaagggtctccaaaactctgcctcaattctaacaaacttagcaaacactgaatacatacctcaaaataacattcacaaaaacaaggggtctgactatttatgtagcatattaagaagaattcaataataaatgtttgaaatgttttatctagatagatcatctaaaccagcacttattttttagagaattcaaacatggagctggcaccaattcaatctttttgacacaatttacaaaatcataaagcaaaatataatgacacaaaagccttttggctggtaagtactcatctgttttgaaaaatcatcatcatcataatccattatttctaagaagggcaatactaagttaatggatttctgaccacccctaaggtggaaaggctcaatcacaaccacttgccaatttatctatataacagcagagaaaactaaacttgtctttaaaactggctaatgactcttccatcacctacctacttcaagtgaagctaatacccagagccaggtcactgaagactcagcaacaaaaattcactgaagaagaaatagccatggaaacagccactcccctgcatttaccatccaaacactctgagacacacatagaaactgtattttaagaatccacagtcagtcgggcacggtggctcacacctgtaatcccagcactttgggaggccaagcctggcagatgacctgaggtcggcagttcgagaccagcctgaccaacatggagaaaccctgtctctactaaaaatacgaaattagccggatgtagtggcgcatgcttataatcccagctactcaggaggctgaggcaggagaatcacttaaacctgggaggtggaggttgcggtgagccgaggttgcaccattgtactccagcctgggcaacaagagcaaaactccttctcaaaaaaataaaaataagaaagaatccagtcagtctaattcatgcagaaaaaaaatccctaaaaggagcatttacattattatcatgttggttagtatacctagtatttgcataaatatacactgtaagttctctttattcattttcatgactaattgtagtatttttataatatgatatctgtttccggaaacaaaataccactgtacgacactgggccaataggaaagggattttaatttacaatgagctgtcaagtctattacttgaaatcaactgggtcaattgggtcaatagcgttcctgtaacttaggagttaccagaacattatctgaagttcacctgccgtcagaaaagaacataaaacctcttactggtgagcacttcttttttcagtgtaaattaatattgaaagagaaattacttcattctactgctgatgaagaataatattcatgtatatttctctgaagactttaagatcattatagacccagtacttcagagggcaaaacaacagctggaaaaatctgcaaaggaaaaaaagaaaaacttccagctgaccaggcaaaatcattctacagaaggcaacattaatcttcataactattttgtacggatacgctaacagtctagcttaacctgcaaaactgacagctaagccyagcactggttctttcaggacctcatctctgattccaaatctgccatgaccttgtgcacagctctaagttactattacatattttaaatggctmattttaaatggctaaataggtaatgttaacctactttaccagaaataaatgcaagtctctatctttgtatctctgtaactcctttccccttcctgatgtgcagtactctttccccagtctcaatccacatataccattggctttcctcagagttacttacttcacctaccaacccatctctataaaagtataaagatagggctgggcatggtggttcacgcctgtaatcccagcactttaggaggccgaggcgggcaaaatcacttgaggtcaggagttggagactggcctgaccaacacagtgaaacgccgtctctactaaaaatacaaaaattagccaggcattgtttgggggcacctgtaatgccagctacttgggaggctgaggcaggagaatcgcttgaacctgggaggcagaggttgcagtgagctcagattgcaccactgtactccagctggggtgacagagtgagactccatctcaaaaaaagaaagaaaatgtttagcaacctttatgcttcttaaaatctttctaatctttttctccaaactttctctgaagcgctatttctcaaactctatttctccaaaatgtggggctcccccatcatgctgcctcccaacactctcctgctgtcttaccccttattctcatgtttcctctcctcacagtatcccaatgacatatatacctggatctaacactcagatccacagccttggctctaaggcccctatgagttcatccctcgtattttgcaactattggatcaaagacaatcaattccctgtttatgtctagttaattcctacattagctctcatttgctgagcatctgttatcaaccaagcactaggcaagatcctttgtggggagagtaggaaaaatacatggataaataaaaaatagtcacatatgatttttgcacttaaaagttaatttcacacaaaatagcacctcttatcatcttctgcctaatccagcttgcccagtttaccctttgcctgtttcagcctccattctgacaaacattcatcagtctcatccgtgttcactgtgactgctgcattcccaccccacacctagcctttctatctatctccactctctattagagtggttttctaatatacaaatctaaaaatgcctttccatgctcaaaaccccctccaactagtatgttttcagaaaagtgtgcaaactaagtctagcacaaaggaagcttcttaatctgcccttgccttaacatgtaccaacaatattaaactttgtggtacatgccttaccatgtaccaacaatattttgcctataaataaatcatactctgagatctgcaaaagacagcatttttttctcttttctgtgcctcgctgttaggttgcacacttgtccctttttctaccaacacttattaaaccttcgaaactcagatagagtttggcttctcccaggagtttcctggaacttgcctccagaacccaagtgtcccctctccgcactcacagcatcctgtgcacacctctattgcaatgcaactctcagtacattgtgacttacgtgtccgtctctcccaagcgaattcaagctccttgggagatgtattctaatatgtaattcaggtgattagcatactgcctagcttaaagcagacactttttacaaaaagatgctctcttagaagaagcaatttagactaagaatttgtccgataattgaaaatggcagttaaagttagaaatcataaaaactgatgtatattttaataggtctatattaatgtaagacacctagaagtatattcatttaccaatcttttgacatcaggccaacacctttactttgagcttaggtctgcaaattaatgatccacagtatctttcctgcataattcattggctatgatggccagtttggttttctttaaagtgggacaaaaacttgaagacactcacaaaataattggagtggcacatctttttagatatttgttgaaagagtttctgtcatctatatctccctcatctaatttaacaagatctttaagtgacatattttatcagctcttccccaaagaattcaatttacatttttatagcaaaaaaaaatattttcacactcatgttttatcaatttacatagtactgaatacacacttagaaagacaaataaagagggcaaaaaggtttaggaatgtacacaaccaactcctagtcagcctatgactgtaggtggtgaggtgagtagtgagggcataagaacagtctgtgaggtcatcagtcagcatgtcctatccagcaaatggaagacatcagttaatccagaaagctgaataaacagaagttggttgaaagcttctaggataaatgtttactgaaagaacagagagaaaaaatgggggaccaatggatcttctccacccttccataaccaccaacaaataggagaggtatatatagcaaagtgatgatgtcatctatccctttaaattattcaatgactccccatagtttgcatttcatttccaactcctatgtatacaagtccctccttgaactaccacctgcctacattcttacactacacacacacacacccccttcatgttcctccaactgttctggtttactcttttctcaaacacacttttccctcagcttaggatttttcacttctctacctaattaattcttattcatctttaaagcttcaactcaagcatcacttcctctgagaagtcctccctaatgattcctctcctcctgataaaggtagactcccctgcttaggagcaccacagcaagctgctatatcaaagttgacatgtgtactggcttccctgggtcagttccagattatgtctgctgccccagtgtaagtattcataacatcccctttcattctcaaaaagtgtcccaattttgacaataaatcccaatggtcaccctagacattgcatgatccaaagaggactaaacaatggtctgtgcccttatttttaaagacagtaataataatcagaacactgaatttctcaacagtttggacaataaattatatatggtcaccctatgtatatacctctatcacagcacttatcacactatcctacaaatgtttacttctctatctccttcaaagtctatagtctcaaggagaaaaggtttgtcttatttatctcaatatctacacagcagagctcgaaatcaacacattttaaacatattcaatgtttgttgacttttatcaatcaactcagaagacaatgcttctctaaatagctgtagcataaccacttatttataaacacttgaataataggcgatttatcagccttgactaatgcctatatagtaattataaaatgttataatattaatctcaagatgaaaaacagcagtaacaaaatcacatctgacatagtagctcaattcattcaaataatataatgaaccttcatattaagtcatatattcttaccaacatcctgctaaaaggtgcttttattaaattcattttagaaatggaaaaacaataacttttatagttacatttttaaataaagaggatattatcaagggccctgaaaatactaagattcttctacttcaatgtctacaatgcattttacaaaacatggtttttacgtatctgcaaaaacatacataacccccccaaaaaattattgtacatttaaaaagaaaatgcagaaaacagcttaaccattctcttccttaggatgctatcaaaagctatttctgcctaggaaaaacttgtttctacataaacaaatttgcatgaacaagcaaagctatttcatatttcagcttaataacaactgtcagacattttccagataatgtaattcacggaggaaacatccaggcaaaaaatacgatttcaagaccttggattatttggtcccatgcaatttattactaattacaagtcaccaagaaaatgaaaaactgttttctggataaacaaattcacagtcagcaaaagcttgattagagaatgagacaaccgactacaaaaataattacaaaattataacttagctatggaattaaaaccaagcacatttctaaaatcaatattaagggagtagggggacagaaatgaccccaaaaaagtaattcctctctaaccactgaaaaaaaacaaaagaaaccacattttagtaaacaagtcaggaaataaaaggaagacaaaaagactaaatagtaaaagaaataattcaaattttttagttaattaaatttttgataactttcattttcagaatatagatacactcacatactcaagttaccaaaggtgaggcaagttactgcaacctctaaataagtagctttacaactttctgatggaatctcaatttttagattttcttgcaactaattacaagctttggtgatcaaagtaaatataaagttaaggcaaaatgagtactctccccttcagcttccatagttatatctcaaacaaccatattttaatgactgtggttacttatgaactgtcattaccttacagggcaatagattgagatttcccaaacgaaagagagcacaacagcttcagcaagccagagcagtggccaggaaagattttaatctgtaatggaatcacccagctttcatttgtaactgctaacctgaaggattttacctataaataaatcatacaagcattatacatataaaaatgttagcccagcagtggcccacacctgtaatcccagcactttagaggctgaggtgggaggatcgcttgagcccaggagttccagactagcctgagaaacacagtgagactctgtctctacaaaaatggaaaaaaaattagctgggcatggcagcgcacgcctgtaatcccagctactcaagagcctaaggcaggagaatcccttgagcccagaggtcgaggctgtagtgagctgtgatcatgtcactgcactccagcctaggcaacagagtaagaccttgtctcgaaatataataaaaataataatattaatatcatcccaacttggaccttcaggtggggggagggggagaagaggaaggagaaagggcagagatgatgaacataacaggttattaacaccaactgtgtacctacaatgtgccaagcggtgtgacaatcctagagacacaaccataaaacaaattccctgccctcaaaatttaaacaaactttcttaaaagatcaggtgtctgcaggatctgaatacaggtctgtctgattccaaacatataatcctctcctacaacacactgcccaacagagggaatcccttcagcaaattttctaagaatgagagggagagaggaaccaactcccccactaagacatgtggggggaaaaatgagtttcctccctgaaacagcttcagaaggggcaatcaaaacaagaaagcttgaccgtgatggttaattttataagtcaacttggctgggccatggtgcgcagatatctaatcaaacattattctagatgtttctgtgggggtgtttttaaatataatttgaggaaagctcatttctttccataatgtgggtgggcctcattgaaacagttgaaggcctgaataggacaacagactgactcccccacaagcaaaaaaaaaattttccagcaaaaggcttttatacttgaactgcaatgtcagctcttccctgaatctctagcctgccaacccaccctgcagctttttgacttgccagtctccataatcctgtgagccaactccttacatttttctctgtatatatacacatcctattggttctgtttctctggacaactctaatatgccagctaagttaaatataggatatggaaaaaggataccttcagaaatatttcatatcaatattctgtttatttcaaccgtcctccagctacagactttcaaccatctgagggacaggcttcaagggttctaatggatgaactctcaatagttctcattctagattaagagtaagaatttcgtttggtaggccagacgcagtggcacactcctgtaatcccagcactttgggaggccgaggtgggtagatcacctgaggtcaggagtttgagaccagcctggccaacatggtgaaaccccgtctctackaaaaaaagaaaaattaagccaggcatggtggtgcgtgcctgtaattccagctactcaggaggctgaggtgggagaatcgcttgaactcgggagacggaagttgcagtaagctgagatcacaccacagcactccagcctgggcaacagagcaagactccgtctcaaaaaaatgctaataatgcagtcagagttagactccatctcaaaactaaataaataaagaattgtattaggtaataagagtcaaaacccagtaactcaaactaaaactcttctgattgccacatctgcaaatgggacaatctcctgagggagctccagttcactaatgctactactcacagaactcgttatacagagaaggagccagcaagataaaaattccacaagtgtcatagtctctatggaaaaacataagcctcgtctcaaacttgattgggtacatgattaactaaaaaaagatatcactgcctcaaatcattcacaaatttacataaatatgcaaaatcacaaccagtgaaattatttttttcttgaactccaattttctttttccagtgtaaccattttatagaaaagagtcaaaattttacatggtttgtctgttaatgttgcctctttttctttaaatagttcttataattatatacaatcatctatatatcactactagaaacccagtatacaataaaatattaacagaatttatcaaccatattgtagtaaggtttaagaatacttaacaaaaagtgataatccaaacaccagattatattgtaaggcaatttaattaggacttcaccagaacttataaaatcccagaactgcttaaaactgtaagatcagagtaatctgctcatctcattaaacaaaaagcaataatttaaacttccaatttcagaaaactctgccacccaacaaaaatatgtttgtcatcatttatatactacaacattatctaccaaagcttttcaaaggtggaaaattacccaatagatgagaggaactgaccctttgactctaactaaaaatataacatactaccatatagtctaaccatacatcaaatgaatctcttttcaactaatatgttttttaagaggaacaacaggaaaccacatattggctggtgttttaggacaggaaacatattcaaatggattctgtggaggcctagaactcaaaatcctatttttaactgggtgtgtacatgagttttttcaaaggattatatataagcaagataatgaacttgacatctccactgtctcaccttcacagagagcaagcctgttgaggctcaataatctaagacatcagaaagacattatgccacatgggaaaatggttaagtttcctttaagtacatgtttattatttttagtaagactactcattaaaatatgtttcacttcaaattcattatacccagtgtttgaaagcatattttaagtaacacattagaatatcatatacacaatagtcgaacttaaggaaaacatctcaggcctatgcaaatgcyrtataatcacaatttaaaatgaattggagggtctccttccccataatacttacaaggttagccacaaatgtgggatcaattttaccaaggtttaagaaatatgcacttaatgaattcaactgtcaaaagttcatccattttcttaaagtaacaccttcttcagtgttacataaatttacactattaaaccaaattttttttctgtgacatgttgtcctccaaataaaagtacattaaaagactaattattagaatttggggcagcattttaaaaagtgtttttgttaacttccttatgttgttattgctgatcattccaattgtgtcccaccactatcttttaatgtaattaaagaagtaatacatgcttattgtagaaaattaagtaaattcagaaaagtatacattcatttaacattatcactgttctctcaatccagaaattaccagagttgacattttgatgtatgtgtttttaatctttgtcctaggtgcaaatacacatatttttaaagtaaaaatatgacagaaatgcatattcagcatttaaccagactttttactatgaagtatttacatctttaagtaatcttagaaaacatgagtaatacagctttatcctattatactatatgcatttatcgtaatgaatttaaccatatccctattactggatatgtgagttgctttaacttttaccaactcatttaaataacacattgatgtagtctttactaacaaacactgatttagaaagtaataaaaaccactcagaagtcatatcaaaaaagcctataagcacataaaaaatcttcaatctcaacaatatatcaagtagaaattataacagttattttcacctaccaaactgaaaactacaaagcatataaataaaactaagtactggcgcagggattgtgagaaaactattccaatgcagtgctgattataaactaatacaccctttctgaataacaattccggcaataacaatataattcaccctttctgaattatatataaagggctttaaaataattttatttttaattaatttaaatataatttaataaaattataaataatattataaattaataaaattatatwtttttaggaatctatcctaaataataggtaattctagacgctaagcaagaaactgtatataatacagatatgaaaatcatagatttcrggcccagcccttctttttcttttttgaaacagggtcttrctctgttgcccaggctggagtgtggtggctcaatcacagctcactgcagcctcaatcttccagccagcctttatttttcaaaagacttacttacaggtttgtttgttttagtgctcagtgctcaatgataagatttctaaaaggaaatagatgctctggacatagaatattatataacacctggtgtataatttaaattactgtattttattattccacctacagaataaacttctaaaaataaacacattctaggtaatggtagataaggtgtcattcaaacatcctacaataagttttgcctttccccctgagaaatgggttatttaaaaaaataataattttatacatatataatatcaattaacaatgaaaagtgcaaatttatgtctttctcttcctttacaaaacaattttgcacatcaattttacccaaaacaagtacttcgtaaaggaatccatcaaaataacactactcaaaaacagatctttttttttttttttgagccggagtctagctctgtcgcccaggctggagtgcagtggcgccctctcagctcactgcaacttccgcctcccgggttcacgccattctcctgcctcagcctcccgagtagctgggactacaggcgcccgcaaccacgcccagctaatttttttgtatttttagtagagaggggttttcacagtgttcgccaggatggtctcgatttcctgacctcgtgatccgcccgccacagcctcccaaagtgttggaattacaggcgtgagccaccgcgcccggcctcaaaaacagatcttaaaaactaaccaataaacctgcttttccctctcctctgtggaccctaaccatgaaaagaaaactcttcacaagcctgaaaaggtacctctgactgtgagtactatttaagattgttatattgaagattagacaattttctgatatgaatgtagcctccatgaggctgtatacttacatatttttaaaagaggaggagtaaaaagaaatttttggaggagaaatccgaggtgaataaaagagaaaagaccatcttactatacagcaacagactcaacatgcaggtcactcagtttcatagggtcatgccagttcaaaggcatcaagacagaaataccaaagacctaatccgcaagattctcactgcttattcctgtaaagaaaccttcatggtcatgactctattcacctttttgacccttgccaaccactctatgtccgaatctagccctatatatttcaactggcatggaaaacaacttggaagattagctttccccggcacaaaactcatctgacttataaaagagggcaggagactaacagatctgtgagcagtttcatttaccattatccataaatacttggtgaacagttttaactccacaaatactttttaaaaataccaatgaaatagattaagtaagcaaagaacaaaactttcctcctaaaatataaaatttcctgatatcttcatactgtatttcgctgtcttctttgtaaggatatgtgcatgagaaagagtaagttaggctgaaaaccgggaactgtaaaaaaaaaaaaattatcaatatttcaatcatgttgaactgtgctatgaagctatttccagagcaaaagtgagtgaagcaattaatatgtcagcaactatattacaaaacatttctttctttattcttagtttcctcagcagggtgttttaacatatagttaaacccatactttcaaaagtcaagttgctctaaaaatccactctataaaattgtgctcccatggacttaatattttactcattttaaggtttctactataatctatagaattattgttctcaagaacaatttaacataaatttttcattttgatatttcaacaaaagatgtccagaattttctctttgaaatcatagcacaaatatttatgattatggtatagtacaaatatgtttaagacacagagaattacaggatggtaaagccgagaaacaatcttagtgataaattacaagtaagacagcctcaattacaggtaagaaattcaaggcttcaagaggcacacttgtccaacctgacagaatatcaagtacctctcgatgttaccattattattactagttaatgatatttawtagtaatatagactatatagtaatatgctccaacagacaatacatagtaaactaaataaatatctgcttcaaatcactcatcttatagatggttacagtacagataatagcatgtaggcacaggaaatctatatcgaaatattgaaggatgagaaaaaattttaaagtagtgaagctgtccgtgaacaattccaatcaaagtaaaagaataaggaaagtgacaatataagagaagtaggatagaaataagcatcagattattagaaaaggaacaggattccttcacgctataaaaagaccaatgtaaagatgaaactcagcatcaatgccacttgtacctttaaagaaaccctatgttggcaggacatggtggctcacacctacaatcccagcattttgggagggtgaggcaagagggtcacttgagcccaggagttcaagaccagcctagacaatatagcaagaccctgaatctacaaaaaaaaaaaaaaaaaawgtaattatccaggcactgtggcacacacctgtagtcccagctacttgggaggctggggcaggaagatcccttgtgcgcaggagttcaaggctgcagtgagctttgatcgtgccactgaactccagcctgagcaacagggcaagaccctgtctctaaaaggaaataaagaaaccctatgctgaatcaaacactcatgcttcatgtgtagcaattttagattacattaagagaagtgcggtgtcccacgcaagggagttgttcagccatcctctcagccacataaacctattcttcctcagttatacatttcattcttcttgaatcctactgtctcctcagcttcatgtgttcttcctctctatgaaacacataaaatggcagatagcatttgttgctcccacatcatgccacttaacttttagaccatatcaccaaccagaagaaaattctttatgccattgctctctagactttcctgtagtgtgctatccttttgatatcttaaatttaatatattccaagccatactcctatattcttcttcaagtctcctatattcttttttaaaagcatttgtaagaaatgtccagaagtaagtctacagaaaaagcaagtcaattactgctttccagaggatgaagaaggaaggggaattgggaatgacaattcacagacacagggtctctttctaggatgatgaaaaagttctagaatcagataaaagtgatggctgcacaacactgtgaatatactaaaaaccactgaattgtgcacttcaaagtggtgaactttgttacctgaattttatcttaataaaaaattgcaaattaaaattaaataaaaagaagagtgagtgcaccacctccctacacacaccagcatgcccctccttctaactttccttttaccttccaaagtaataaacyctccatcggtagaattattcaagcagaagctgaaacatcatctgtcaggagtatgctactgaagggcttcctgaagtgactgggaaatgacgctagattaccttcaagtatatttcatctctaaatgtctatgtcacaaactaaagagatgagaaccaggagaaaactgtaaaagtgaccagaagaaaaactataaagcataacttgaaaagttttcttccttttcaaaaccatagctatagaatataatgaagcaaaagaacaaaaagaaaataggtccaaatgagagcatagaaaatcaagaaaaatatcaggtaaattagataacagcataaaaagcaacaatctatagtaatgtttgttttgtttatacagaatttatcccacatctaactatatttctctatgaaaattcctaaacttgttttcaagtggtagagaaagtgttagaaaaaaatctaatgcagatgagatttcaatcaaattacttgtaatgggcatattaactgggttaacaaggtaaacgacacatggataacataacacaaagtgattttcctccaaatttggcatcttatctttcaagtacatgaacccaacaattagtgtcatttgtgagaaagtttagagggaacacaaagtatgtatgatccaaaaagcaagcaactgctgggcacagtggctcatgcctttaatctcagcacttcgggaggccaaggcaggagggtcgcttgaacccaggagttcaagacaagcctagacaacatagtgagacttcatctctacaaaaaaaaaaaaaataataacaggcatggtggcgcttgcctgtagtcctagctgcatgggaggctgaggcaggagaattacttgagccccagaggtcagggctgcagtgagccatgactgcatcactgcactacagccagggtgacagagcaagacmttgtctcaaaaaaaattaattaaattaacaaaaaacaagaaactttaaatatttctattacaaataaataccagtaaacatctgaaataatctgctgtcaaaagaatccctttttaaacactaaatgatcactgttcagtttaaaagtatagctatacctctggattttagaaaaggggttcattcaacaaatcttcattatttgattttacaaagtatattaaaatatttgacatatttcatttacctggttatgaagcayaggtcataaaacataaaaatttaaaaggaaatccaatttaaatgttataccatcggctgggcacagtggttcacgcctataatctcagcactttgggaggccaacgcggtcagatcacttgaggtcaggagttcgagactagcctggccaacatggtaaaaaccctgtctctactaaaaatataaaaattagtctggaatagttgtgcatgcctgttgtcccagctactcagagggctgaggcctgagaatctcttgaacccaggaggtggaggtttcagtgagctgagatcgtgccactgcactccaacctgggtgacagagcaaagctccctctcaaaaaacaaaaaacaaaaaacaaacaaaaaaaaagttgtaccatcaaagttatccaagaaaagcaagttaaatcatatgaccattcttatactaagtttattaatttacacttgcaaaagaatgaaagaaatgaaatttctgattccattaaaaacttcttcctcccaactttttataactaaaaacttaaaccacacaaagagcctaggatgtgactttttaatgacccaaatgccttgagttaaggataataatccactttgggatccagaaacagagtrttcatgcactttacaagattataccttatttcatcttcagagaatattattccacccaaccagatatagcagcccatctggaaaggaaatttattacatgttgcttccctaacatgctatggccagccactttcagaagccagaagattgtacttcaaattcatattccaaagagtgatctcttgatcagcggcatcggcaccacttgagagcttgttagaaatgtaaaatctaaggttcccctccagacatactgttaacgtggttttcctgtattatttcagaatatgaaattctattatagaggtaaacaaaactaatgggatggatgaaacacttaagaagtgataatcatagatggtaaataaactaacaacttatgagacagaggcaacactcaggctgggccaagtattgataatgagaatgcaagctggtgaaatgaaggcagtcagcagatgcgtaataaataggtaagctgggagtaagacatgacaacaataaaataaatagaaattatgataaaatgaatgagatttacttatagacaaaaagcagtggaaataccaagtcaccattatgcctggactgatagctacattacttccatatcagtcatctactgaagacaccaaggatggtcccatggctcatcagcaggcaaactagcaaagctacggctgtacctaagtgtatttgtcacatctcttcaacagaacaagtgtgtatcatcgacccaggaaatcattagtctatggagtcttggctcaaacatcagctctggtcctcataaccacatcattaatggggaagggttatgtgaaagaaagatgggacataggaacattgtttatccaggacaggtagcgtggtccttccaacctggtttgaacytgaagtgtgttaacttactccatagctttcctcttgcttctggatttgtgtttaactggtttggtaaatcatgtgattcaagcattttaatttgttttctgagtcttctattccataacctctgagatagcttgcctgctggtgtacttgtagctcaaccattgtatcaaggtaatttcccatagaatacctactgaatcagaatcttgatgctaacaagatctcccaagtgattcatatgcatattaaagtttaagaagcactgacaaaactgttataaaggaagcctccgcaaagacaaaaagytggatctcaacagaactattccctgaaaaccatcctgaacaaaaaaacttcatatatccatgaatgccctaactatgactcggagcccccaaaaagggagagaatacaagaagatccattttcaacaactatcatgtaaggtttgaagaagctctggtgcccttgctgattatttgaattctaatcctgtaaagctccatatgatttgagaaaacacaaaatatagcacaatgtacctcaatattaactctgcaatatccttcttactgtgagttagaaaaatctttttcagatatgctgtttcaagaataacaatccattgtaacacaatagtatttgaggggaaaaaaaaataccaatccaaaggacataagaaacagagaaaggttgtgacttccttaatgaggctgcagcaaccttagaaagatcatcaaagcacagagttgggaacagcctgagagcttccttaatgggctgtacacgtcccaccgaccagcagctccttacttcatcagctcctcattttatgtatttgttgtatttgttatatttgcattgtccctgacacatattaggggctccataaatgttctgaattagtagaaaaaaatgacatgtcaccctctcttgttttgattcatctaagacaaatttactttaattcaatcctttcattttgaaaaattcctgaaaatgaaggcataattccatctcgaattagcatggtccataacattctcccatgccatatctcaaagttggattttaatttgctattattaatcccattctaatatttcatgaccctatgaaacataacaatctatctaataagaaataactgtctgtgaaagataggaaagtcatactaactgatggctggcaatacagtctgaccatttttaaaaatcaaggtatatgtacaagtacaaggtatatgctacacaggaaagatcaactattattctgatgtttttctaagtccagatttaagacatcttatggaaatatctatgtaaaacatctataaaaagaactgaagtagtcactgaggacaatattacacatacaaagatgataaataagatctataacaaaaaactaaaggtgctaggaatttttaacctagtacagaataaagtgacagccaggaaaagaatgtaaaagttctaaaaatcatttatttaaagaatacattccctgttgcttctttaagaggaagtatgtttaagcttcaaaggaaaagactgaggttaggaattgcaacttcccattccataaataaagttttatgaaaagaataaagaaacacagatagaaaatggttgcatgtattcctttccaaataatctatcaaatccctttcactatatgcatttagtacaaccaagtgccactaaaggactcacaggacattaaaaattttggcatagttttttatactgttttttatggattttaaatacaatgtgtttaagaattgactctacaaactcacagaggaaaggggtaaccttacagatttttgtgtcttcttcagctaacagcatgagagaacacacatgataagccttcaataaatactttaattggatctaataaggtattaccaccctctgcagcaaaaaaaatcttaattggagaataacctaaacactatggccacyaccatgaccagtagaaagcagctctcaaattttccaagtgaatccacttgcatatttaacaatggaagcagcaagaaagagtaattgtgttattcattacaaagggctaagaatgaatcttctgtttgcaaacttaatccactccaagaagtcctgttaactgcccaatcaaatgcaatacattatctttgtttcacaagtcttatgcttgatctaatttgttttagaaatcttattcttgatgaaatgcattaaatgtaggtaatgtttcattatttgctagataaaattgtcattatatgaaaattaagaggcaaaatacttattgttataagcaatcatagcacaaattagttgaacttcaaaatatcattcccaaaaagctggtttgttcacatataaacagacacatttcaatgataaatcctttaaaatccattaaaccaactagtgcacagttatgttttgtgcagcacaggacccaaatacaggctggtgtcccacttggttgactgggtagtggtctacttgataaattttcataagctgctatcccttgtattaaaaagttagtcactgggtttaacaactccttgaagagttcatttcagttattcctgcctttctcaatgtgaaacgatttaatcttattgctttcttcctaaagggtagaaagatgatgttcaagggggatgcgaatggcaaagtttaggagctcactggataggcttgggggaaaggcacctttaaagaccatctagagtagggcagtgggggttggggaggaataggaaggcaggaggagataatcacaaaggaaggtggtaaagcactgcaaagaaacttactttcaaactgaattgacatctgtagtttattttaaactacagtttaacttaacatgacccattctgacccagaacttctgccttacactaataaaatgaaagtctgcctgctaacatctgtaaataatttcatagattattactttatttcagaatagtatttcataatcagaacaatgtcagatttctctttaaatatttctatgtaaatttatattttagagccttatatggaaggtcccaaaatgaaaataacagacagtgattttagattttgaggagaaaatttacaggaatatatcaaattccaagtctatcatatatacacactgtgtaagctagaagcccctagaatgtggtctaaaactacacattctgccaccataaccttccagattccccaaggagagcatgccagcatctcaggactgagctgtgggcaagtacactttgaaaaagcaccccaggagattctggtactcaaccaaccacctcctgcccctattgccattatccactaataacattctaccacccactgctgatgtactttgtgctattcttccataccaaatgttaactaagtgaagtcattagagcatgtgaattccattggcatttatccagtttttaagaggtaaaaataaatccatgaatggcaaatcaatgttatttctttcaaaaaattcattttaaagctatgtaacaaattttgaactcagactgtttacagtcaaagcttttcaaagtatttaagtcagctaatatatttccataaattaaattttcaccaccaactagcagtaccccccaaaaaaagttccaacaaaattcctcacaatccacttacacttaataactcagatttttttaagaaagtaaatcgaatattattcccagattaccaaaactctcccattgtacattatacttcataccttaaagtgtgtacattcagaaaatattatttatgaataattttaggtaaaactaaagtaattacatttcaaactaacactcctggttttcagtactcacaatactcatactccagttcattggaacgtatctcacaattcccgaacttcttcagctttaatattactcactattgatgtatgccattataaagcacatttaagaaatgtaattgatatctctcaaactctgaacttttaaaatcacctgacaacaggtgattttaaaggtatcaacaatcttgaatcccttacaaaaactcctactagttgtcaagtctattctacatacaattaggccctagtactaaaaacaaatttagaaaacaaaatggagaaaacacacttaccttaataggagcactactaaacttaattttcctatttgctgggatttcttcttcttctggcaatccaacaatttccgagtactccatatcaggctgatagtaactgttctcatcactatcttcctcctcatcctgctcagtgcctgtctctccccagtctgaattatacctggatctcaccctatacacattatagtcactgtgcatgtacacatgggaaccatcaaaattatttgaatcttcaggtacttcttttccacaactggatgcagaagcatcaggagaggtgaaatyaccacctgcaagttctttcctctgttgctttgctgcctcccttccaaccaaattagcttcagcatcttctaacagttggctttgtggtgaagggatttcggactttggcaytgccttactttcagcacaaggttcttcaggaccatctttgtcaatgctgtcgggagtctgttgattagatgtggagtcctcgggttccttgctctgctggatctcttcaccaggtatcgaagctagagaggtacttttagaagccacttctggtactggagttgcattactcttgtgagcatcctctgtatcaacacctcgcttgtttgaaggaggccaggaattagaatccttcaggtgaccaaatgtgtcaagatttgtaacagtaacagatggtaaattcaagggataatgcccagtcactgagtattcattgttttcagccttctcagaaatgatggcactgggagaatcagtgttctcaaatactgcactcagttgactcacagttggggagacagcctcagttcgggagctaaggctgtccaaggaatcagtactgcctctgttggacttggaacctccccattcatcctgaggttcactccctccagctttytctttctttggggaatagcggttgttctgtcctgattcatgcacacttctctcaaacatctttcgagtctcagtgaacttggaatatgaagggccatcgtacatagtgtcaaatctactaattcgttcagaaacagaagactccaacttaacaactgagccatctgttttttccagaaattctttgggcttcattcttctctgaggagatgaatgtccacctttcccccttgttttggcaatgactgcagcattctcgttgggttccatacccatctgcataaataggtttttaattctgttgacattggagccatatttcctccccctgctctgctgggagccctcaccttcttttgttttttgttccccatctgacttrggtttgtcaaaggtacttttcagtgcctgaaactcagttcgatatgcattcctgtgaggagaggcacttctgagagtggttcgttcacctgaagactcagttttcaacattttcacttcaggggtgaaaagccaatgttcataatgatcaaagaaaaaaaccaaaaaccaagatacctctcttctctaatcaccagtattgggtcaagaaaagtacctctcaaatggtatacggtgtcagtgatcgtcccaacaggtgtattaggaacttagtcacagtcaagagttacacagaatgattttttcaaagcaagactagaggttcatctgcaatagaaaagaatgaatttctgaattcatttacttatttgaatttatgtctagtcaaataacatacatttttttttccaaatggcttagccacgtggcaaacagaagagaytactcattgaaatgggaagttaaaagtcaaraagttatcattctgattggtctttggtaaaaaaaaaaaaaaaaaagttccaaacacaatttggagatacctatcaaaatctcacacacacacaaacacatacacacactcacaaatacaagctacacmtaagtatatttgaaagcaatactttagcccaagttttggtcrcttttgtgaatgccctttaaaaagaaaccagcagttcatcgatctttaagaaatcatcaaactgtccagaaaatcaacttcatttaggattctccacaattaggtagaacttattctttctaagtacaattaagtttggaatctatgtttacaaactccaaaacatgcctacagcggcatattttactttttttggtccaatgttctcatctacagcatccccaaagcaatactaatgcaatttcagatcaaaacaaggagaaaaaaagttcctgaatagcaataagtttcactaagttcagttataacaagtatttggaagtttcctaacagtggttattattaattatggagtgggatgcagactaccaagggaataaatgcgtaagaatgtgacaatcagaaagcaaatatactgtgacaccccttttcacagccctgatttgtttattctttcttgcctctaacttactacagttcaacacgcaacgcaatgcatgcttgctggtctctttaagcccacagcaggattttatatcaataagccagcaatcaaatacttcaagatatgctgaggagcagacaatgcaggcagttctaaagatttttcattttatttttgttttgttttgatattagaccgagccacatcaccctcacgcacaatcagctgaggaggcacacactttcacttaaaccgtctccaaactcggctcctggcccagcacgcatgcatggcccatgcagacaaacaagaaaggctttggagtgtggtgcctgtttttttckttttttgtaaagcatcgacaatctccttttaccctgaccattctttttaaagccacaaacaccctcccctctcccctacacacaccccccattccctcccccgccaattccaacccaaggaggcgggggcgggggagatggggccgccgggggattcaaaacctgccctcacaaaagacaaacataaataacaccaacttgagaggcagccgattcccaagcccggttcgggacgcaatccctcggccctggggcaggaccgggagagcaggtgacgccaagcgctatggtaggaggtcgcagtctagctttgtgccaagaagcacctgaagtcctaacacattggctgcagctcccggcggctgccaggcggatcccactgtgacacggagagagacgagctccctggccacatttaaaaaaatagaaaagaaaaaaaattacagggtaatgaaaataaatccctttgtttttcctcccaatgtgccaggaaacaatagatcccactgataatgcctccgatcttcaacctattgctcctccaccacaacccacccccacccccagcctgcaactcagcctttgtacaagccgattttttcctcctctccaccctccccaactcctcgccccgcgctcagcctcccccttacccgagcgggagcgccgcgggcggggagggtcgggccgccgcggctcccaccccctcctcgcaggcgccccccgccccacggtggacgcggcggctcggctcggcgccggcccgctgggtacaccgcaacccgctcctcacggcgcagcgcgtagggcggctgcggcggccgcttccactcgcgcgtcggcccccaggcgctccctgcccgcggcgggcggccccgggaggcgcgctgcgctccccaacgccattgcgggcgggcggcggcccgagcagcgacgcgcccgcacgctcgggccggcctggggccaggggtgccggccggggaaggggtttggcccacgtgcggtcgccacgccgggccgtttcggcggccgcggtgtaatggaggagaggccgcgggggtgaggaaggccggggtaacaggtgcctcacctcggctgatgggattaactctagggccgcagagagagggagcccggcagcaaaatcccgggagagggagagagagggagcctctggcggccaaggaagggcgaaaagcaccggcccgaggcgaggccgccccaccccctcggccgtgggcgaggggcctctccggcctggggcaaggccccttcctgttcgggtgttggctccggaacttggttctggggctgaccgctgctggggccccacttagtctgagtctgcagttaactccgtgaccccaaggcatccaagtcccaggccactctgctgacctggaaggccaagacgtaggcccaagtctggtgtggccttcacctaagccactgcgcctggcctactactcaccttgaccttaagatctcactgccaaagagaaagggatgaggaggtcttctacctttcctgtctagggagagtttttcagctcactcccccccgaaccccgcccttttctaaaggctcagtactccctcttacacccccaagtaccggaagtgttaccaccttcctgcaagatataaaactgatcatgactgtcaatacagatgtttaaaccaatccttccaaaaagcctagggagcaggaactcttaaaaaataatttttcaagaaggtaaaaacatgacaatggtagaaatataaaatgaacattggtcaaaatttttataactcttttaattaggaagggaaccccagcaagatactgcaacccattcacgtgagactgtgaagagtagacatagaggcaagaagaggcaaatctgcttactattctatagagcactgaaatgtaatgtttattattatctgctttacagggcggtaaccagttgtatctgtaaagtaacaaatttgcattctgtagataaaactcatttacattaccaaacgtttctacagcttactgagtagtaaaatagcctagtgaaagtcagtctaagtaaggtgcagacgactgtaaatttcacaacactccggagtcctgtagataacatccagcattccattgaaaggacaaacagtaatcttttgctcatttcaaagtctttcacaagttttcccaacataactatttttagccccatttcactgatggaaaaactaaggtttaggttttgtaacttacccgcttctttattggctattaatagtaaatgattatggctgaatatgaacccaggcaagtccgtacacaaattctatatactctgggagcaaaatcttttcatttcagaaggattttgtaactactcaatactcagttctatgtattttttaattttaagcagcaagggcttttttttcctttaagcatcaccaaattctgggtcctttcccaagaaattggcattctctgtctacgaagtggatgtcacttctataagcataaacagatgtaacaggcaatgtgagggggctgtggttccaggctccacttttggaaagaacatttgtgctgtctgggataatctagtggaaaagttcctgtcatttatttgcagtatggaaaccaggttttttaggcgaataacctaaataaatgcagaatctaatcactgagttctgtctgtagaagagggggcagagttggcaataaagacagtcttacacctctttgcagaaagatgattcatacagaaaagcaccctaaaggatttggttggtttgagttttatcttttgaaaatctgaaacttctggaaaagttcatactgaaggaatgatagagttttaaacccgatggtgagaatttaagattcctagatttcctataatggaccttccatttccaacacttacttgaatgtttgaagggtctattagactgctaatccaatacatgcggctatttaactttaattaaaattaaatacaatttaaaattcagttccttagtcacacaagccgcatttgaaaggcttgatggctacatgtgcctagtggccactctgttgcacagtgtagatacgcaacatttccatcacagaaagttctatcaaacagtgttgttctagaccacattttcacttctatgaactttataagggttaacttagttcaatagatcattaatgtattaggcattagaggtcatacattttatatgttccaactggaaaggtggtgaaaagtgaacttcattactgacatgcaaaaaatccaaaatgtgtttggggtgggggagttctcagttttcatatatgataccttaacctttcataaattatatagaatattgtgggctgttattttcatttcctttgcaaccaataataccatgattagtattaaccatgtggtcacaaggttagaggataaacaaaaagtacaaagtatattctatattgttttaggggttttctcaatgtatttttaagttttcgtgatggacattctaagaactattcaaagaattaagttattcatgtgtgtatgtgaatcattgggtgcagctgtgaaattaagcccaaactaagcctgaatcaaattttaagactagggaaaactggctaagctggtactaaagactgcccatcacactttcatttctaacaggaagatacctagctggttgtgtactaatggaagttcctgaagggagagaaaagaccagaacaaactaaaaggtctctagacttaacttctttatggagaaggcaaagtaatgggagagcaatttcagtaggtaattttacacataattgtagcgtaaaaggacatgttattcataccactgttttcttaccgatatgcataatgttttgatagtgacgaggcagctttttaattaaaagtttaattataactacttatttcacatttgtaagtatcacagaatgctttgttgacttcagtcttgaatgttgatattcaattttcttaaaggtctctttaaaataaatatctgtatttgaggataaaagtttaagtttacttttgagtcttataatatttcacacaaactccatcatagaggtagaatatacttctctaaaatagtcctcaggctcacattcagattcaaagatatctatgatcagtcttattttgtgatgttagctataaaattaacattaaaggtgtcatttctaccccaataaattgataatgattcagcatggctttctacctacactcatggcttggacatgccactgaaaatttaaaccatcatctctgtccatttcccattctacaagtatcttggattttcagctttaaaagttcataaggttgagtatttagttttacttgccatgagtaatgaactgtagaactcttcgggattcctttaggtcatttttaagttactaatatcttatctctacaaataaacaacaacaaatttacacagtgtgtttaggctaaagtgatacaacttctctttctttgctattattactttgtccacccacacaaaacacaggaaaccaagagttttattggaccagacattggtataatgttttcattgctgtcacagcttctgaggttgaaacaacagctgctataaccattagttttcagttttgtagtggtgcatgttacacttttaaagacaagtatgaggcatttatttgtttctacagaagctcatttttctttcaacagattagcccctctagcaggactctagttgtggttttctgtctgcaaatcctccacctacaagttgcacctgaactcaaattggcatgttgctgatcttacttcagaataatttattcataatctattatttcgaagtaggctctgttccatattattttgaagtagctctattccatagcattagccttggtgaattaactattaaagtaaataaataagcatccatgtttgtctacaattaaacaggagatttctgtgactttatttccattttcaatctagttctagtaataaaccttcttggtgaggtccacaatagtcccattttatacaaaatttacattataacagaatgcattttaagaacatcgtaatatttaatttgtgtatgcagtcatcagcttttggaaataattcaatgataaatttgctctgaagttactagtacatttttcataggttcttaaacagccataatccatgttcatccagcatagtaatttattaccattactttaacgcattgtttcaaataaagtttgaaaatgtatcacaatcccttacattgtttgcacaccattaaatttctcagttggatcaataatgaacaagtgcttatccccatccatcagaaggcagatcttgagctggtagcattctcattcttgtccctggacggtactcaacatcgtgattacatctggaaatgttgcatgtcttagactctccttaagtaaatgatactacgaagttataatcacttaactagtatttttttattagattctaaatgcatggatggatcacatactttagaaaggctttttggcattattagaagaaaaaattttcaaacaaattgtaacattttagatttctaaaaatatatatagacaagatgaaataaacagtctggaaaatcttgtatctgaatcctgttattactttttttaattgaacaaaacactgttacatttaagttgctctttggcatggaattctctgagcacagcaatcccagacacaatgatgggttaacaattatttggtgaacatggatatttcacagagaggtcaagatgtcagtttgggcatcaattagatccagattccgtgggataacccggactgcacatcgaggtcttcagcctttgcctctgataattctctggactacaagccaagtgtttgtttccttataccaagttacttttaaaggaaagctatggacaccaaggttatatgtgtatatgcaaaatgacaagatgcttttactttcaatattgaattttgaccaaaaaccataaaagctaatctaaatatttattttgtgaatacagaaacagcatgtggacagttaaaagcaatacctagctgcgtcctcaaaggacatgaaattcatatctgatgataccaaaaatagaaataaacatattaatgtgaaatgaaatggaattgatatgaattaaaattgtaaaagaagcttaaatgtatcatttttttaaagaaaaacgagatatcatttttatgaggaatgcaaagttggcctgttgtagctttaaagggaaagaaaccaaagtctatggatttttttaaattacactttgttctagaatctaacgatctagtctgacattattttgtgtagctggaatcattttcttataataaattacatgtctgtgagtgcagtgtactataatgtaatttatgcaaagcgtacatattttgttattgctttttgaactcatctcaagagcctcaaaaattaagcaaggccagcaacataccaaatgatagactaccacatgcttacccaaaggagagttggaccaaggccaagtgaagcatttagatgcataaataaatagtcgtttattatgcgatgtagctttattttccaaaaatctaacactaagcttaaaattgacactgagatactcttggatgactactgacctagaaacatccatatttagagaaaggctcagtttccaaaatatttgtacatcattatcacctcattaaaactgttctgatctcttctgtgggattttcaaatcacaagattattgcatattacaatgattttattttgctttaaatgaaattgttcccaagtatggagaatatgacttctctaaaagattctaaccatatatttgggttgtaaagtctaagaaataaaacgactatataattcagaactgaccaagggatcaataaaaataacacaacatgcttccagtagacagtactatcttgtaagattacctatgaaatttgtaaaaatcaaatatgcaattgatattgaatagttcttggcaggatttacactttgaaaaaaaaggaaactgccatgtaggttagattaaaataaaaa

SEQ ID NO: 96444 - DNA, 20020 bp, Homo sapiens
gggctcaagtgatccacctacctcagcctcccaaagtgctggaattacaggcatgagctgccgggtccaacctcctcttgtcttatttaatcaatttagctaatttattcttacgttagaatgtttgacgttggcgtagaaagataaatactgctttttgtacgttgattttttgtcctgcaactttactgaatgtgttcatccattccaaaagctttttttttcaggagtccctagtatttttcctaaatggaagatcatatcatctacaaagataacttgacttcttcctttccaatttagatgtccttcatatatttctcttacctgatttctctggctaggacttctagtactctgttggataaagtggtgaaaatgggcatccctgtcttattccagatcttagaggaaaggtgttgagctttccctattcagtatgatactagctgtggctttgtcacatgtggcttttgttgtgttgggctatgttctttctatacctaggattttgagagtttttatcaggaaaggggtattgaattttatccaatgctttttggcatctagcttatttgtatttctagaaatatttatatttgtatttcttctatttgagctgtaaataattactatttggaaggttttcttctctctttctcactctctttccatctctctgtccctctttctgtctgcctttgtctttctctctgcctctttctttttctgactttttctctctctccttttttgctttcattaaagttatatatgtactaaatcaatacacactcattatgctttttagcataatatctgttttaaatcatcacaagaatgcatttcttttgaacatcacctgacatctgaagaaaagacaccaaatctcctttcctagccaccataaataaatctcttgaccatttatttacttgattttttttcctgtttgtgtccacataaatacactagatcatccatatcacatagtgtatatggctttgtcttcttttatcacaacctgtgatcagcatttttcactttgttattaaagctgtgaacccagaaaaatctgagacagctctaagttgatttagaaagtttattttgtcaagattgaggatgctgccatgacagacacatgctccatgcatgtgtggaagctgatgctccacagcctcaggaagtcctggtgacatgaacccaaggtggtcagggcaaaacttgattttatacattttaggaagatatgagacattgatcaataacgtaagaagtacattgggcacttctaaaagtggtcaggtcactgccctggttactcacaggccaaaacccaacaagtctgtatgctcccatctctttttcttctacgcatgcctatgtcctgtcaacaaaaagaagtgaactctgtagaacatttgaagagatttattctgagccaaataggaaatatgagtgtccatggcccatgacagagccctcaggaggtcctgaagacatgtgcccaaggtggtcagggtgcagcctggttttatacattttagggaggcaggagacatcaatcaaatacatttaagaaagacattggtttggtccagaaagctggaacaactcaaagccagaggggttgggtttctctaaagacctgggatcaatagaaagaaatggctgattttggcggggcatggtggctcacacctgtcatcccagcactttgggaggccaaggagggtggatcatgaggtcaggagatggagcccatcctggctaacacggtgaaaccccatctctactaaaaatacaaaaaaaaatagctggctgtggtggtgggcgcttctagtcccagctactggggaggctaaggcaggagaatggcatgaacctgtgaggcggagcttgcagtgaaccgagattgagcctctgaactccagcctgtgcgacagagagactctgtctcaaaaaaaaaaaaaaagaaaagaaaagaaaagaaaaagaaaagaaagaaagaagagaaatattcagtttaatataaaggattgtggaggccaggcacagtggctcatgcctataatcccaacactttgggaggccaaggcgggtggccttgaggtcaggagtttgagaccagcctggccaacatggtgaaaccccatctctaccaaaaatacaaaaattagctggatgtggtggtgcgtgcctgtaagcccagttactcggggggccgaggcaggagaatcgcttgaacctaggaggcagaggttgcagtaagctgagatgtcgccactgtactccagcctgggcaacaaagcaagactccatctcacaaaaaaaaacaaaataaaataaaataaaataaagattgtggaggcccaagttcttatttgcagaagaagccttcaggtactaggcttcagagaggagaagaggtagacaatgtttcttatcagacctaaagtctgtgtggatgttaataccagagaggtatcatgaggcatgttcaacccctgcttcccatcatggcctgaaacagtctcttaggttaaattttaaaagagctctgactaggccgggcacagtggctcacacctgtaatcccagcactttgggaggccgaggcaggcggatcacgaggtcaggagtttgagacctctggccaacatagtgaaaccccgtctccactaaaaatacaaaaaattagccgaatgtgttggtatgtgcctgtaatctcagctactcgaaaggctgaggcaggagaatcacgtcaacccaggaggcggaggttgcagtgagctgagatcgtgccattgcactctagcctgggcaacaatacgagactctgtctcaaaaaaaaaaaaaaaaaagagctctgactaaggaggaagtccattcagatggttgagggacctcagaatttcatttttgttttacaatcactgtttattttcattcttaaaattttttattattatttatttttattaagacagagtctggccctgtctcccaggctggaatggagttgtacagtctcggctcactgcaacctctgcctcctgggctcaagtgatcctccagcctcagtgactacaaatagctaagactacaggtgcgctatttttgtatttttgtagagaggggattttgccatgttgcccaggctggtcgcgaactcctcacctcaagtgatcctcctaccttggcctcccaaggtaatgggatgacaggcgttaagccaccacatgtggcctaccactgtgtattttcagaacatttcatcacctcacaaaaaaatcctgtactcacagcagtcactcccttttcccctgtgctaacatccatcacccaaaaacttatttttggtttgtttattatttaattttttaaattattttttgtaaagatagggtcttgttatgttgcccaggctggtctgaaactcctgaactcaagcagttctcccagctgggcctcccaaagtgctgggattccaggcatgagccaccatacctggccacaaaattattttgtatcatcatatattttcctactctagacatttatgtaaatgaaatcatgcaatatgtggggttttttgtgaatggtttattttacttagcatgatgtttctgaggttcaactgtgttgtagaaacgtttcattcctttccatggctgaatatattccattgtgtggactcaggtttgaattttatcttcaaacaatgcatccaagaaggataaggccaggcacagtggctctcacctgtaatcccagcactttgggagaccgaggcaggcagatcacttgaggtcaggagtccagcctggcccacatggtgaaacctcatctctactaaaaatataaaaattagccaggcatgatggcccacatctgtaatcccagctgaggaggctgaggcaggagaattgcttgaacctgggaggtgaaggttgcagcgagctgagattgtgccactgcactctcgcctgggtgacagagtaagactctgtctccaaaaaaaaaaaaaaaaaaaaaggaagaagggtggacacctagctggccacattatattcaaacctgtattccattgtttccaaacacaccaatatttcgtgtaccacaaagattctaaaatgtgctgccccatgtacaagacttcacactgttgtgcttacacattttgtcttctccctgcttagagagctttatttttcagtccttgaaagagtctttttgggctaatgttggcaagtatacctacaatgtatatttgctttgaagtagatggatccaccaatctagtacatatgtaaaacgggatatataaatgccaactacatccactaatgccttcccaaaacaacttcacatcgaaagcctgactgctcagaaaccttctttacctcattgccattgatgttaatatattgtttacccagtctggttttctgtgccatgaagaatgtcagtattataaactgggggagctttaagcaacaggaatttatcctgtcccagccctggagatcaagagtttcagatcaaggtttctcagggaaatgttccctccagaagatctaggggaggcttctccctgcctctgccaactcctgggggccccaggtgtccctgagcttgtggccacatcactccagtctctgcctctgtctctatgtggccttctcctctgtgtctgtgtctcctcttctgtctcttagaatgctgtcattagacttagagtccatccttctccatgatgatcttgagatattaattgcatctacaaggaccccttttttaaaataaggtcccattcacataatctggaaatcaggatgtggatatatcttttaggaggactacactgcaatctactgcaattgaatccacttctttctggatgctctaggggaggctccttcctgcctctcccagttaccgggggctccaggcatccctgggcttgtggccacatcactccagtctctgcctccatctccatatggccttctcctctgtgtccatgtctcctcttctatctcttagaaggacatctgtcattgaatttagggctaccctaatccaggattgtctcaaagtccttaacttgattatgtctgcaaaccccctatttccaaataaagtctcatttataggctctgggagatatgacatgaacatgttttggggtcaccattcaatacattgcagttgtatccactttcttcttgagcctctaggggaggattcttcctgccgctcccagcgcatgggggttgcagacttccctgggcttgtggccacatcactccagtctctgcttctgtctccacgtggccttctcctctgtgtctgtgtctcttcttctgtctcttagaaggatatctgtcgttgcgtttagggccaccctaatccaggattatctcaaggtccttaacttgattacatctgcaaaaaccctatttccaaataaagtctaatttataggctctgggagacatgacatgaacatgttttggggtcaccattcaatacattgcagttgtatccactttcttcttgaggctctaggggaggatccttcctgccactcccagtgcctgggggttccagacgtccctgcgcttgtggccacatcattcctgtctctgactccatctccacatggccttctcctctatggaatgaggactcttataaggacaagagccatttgcagtgaaggacccaacttaaaccaatgcacactaaccaacaacaaggttaataaaaaatataaaatcaaacctctaaaggggaactacatgagattgaatgttttaatgtcactaaaacagagagaaagagagagagggggaaagagagagagagaaattgagatactcggggggagagaaacttaaaacaagtgaaacaagcagaaaggttaaatcacccaagctgagcatttatttctggtttttaaccactttcttttgtttctgttcaaacacaggtgggaagggcatgggaggatgggaaggtgggatctgcatgcctgggatcttccgctggcccggggtgctcccagccagccgagtgattggcgagcccacgagtctgatggacgtgttccccaccgtggtccagctggtgggcggcgaggtgccccaggacaggtacagaacaacccaaagaaacaattcagctttgcacagacatagcaacacttgtggcaaatgaaaatgtcaccttggctttgcagtaaggcatccctgaaattgttccccgaccaaaccgagggtcgggctgcttattctcatggcccaataacgagatgcaaatgaaagaggaaagaaaggagttttatttctgtaaccagatacgggggagaagggctggaaatgatcactagaccaactccaaattacaaagttttccagagcttctatatcttctaagctgtatgtccacatgtaagtgtgttttcatgtaaatacatacgtaattcaatttcctttcatctgtaactaaggtctgagtcctgaggaccttcctctggagcctcagtaaattgacttaatctaaatgggtccaggtgctggggtgattacccttatcttgtcttctgctaagcatggaggtttggggagttcctttagacccccaataaaacttcatcctaaatgggtccagttaagaattccttccttgtcttgtcatgcttcaaggcctaggagagcactgggccaaactcttggtgggcttttgttagattccagcctttgtataagggcctgggtctttcagctttttttcctttttcttttttttattgagaccgagtctcactctgtcacccaggatggagtgcagtggtgcaatctaggctcactgcaaccctcctgggttcagccctcctgggttcaagggatcctcctgcttcagcctccctagtagctgggattacaaccatgtgccaccacaactggctaatttttgtatttttagttgagatggggtttcaccgtgttggccagggtggtctcaaactcctgacctctggtgatccacccaccttgacctccagaagtgctgggattacaggtgtgagccaccgtacccggccaattaattacttttaaacaaacaggtgatgtttggtgatgactaacgtgagtagctgctgcatgcttcttctaagcgtgctaacgcacacacatgccttccatccatctgcattcacacccagactttccctccactgatacaatataaggagagtgcagcacctggggctgggactgatggatgctggagggacaaatgtccaaagtccctgttccaaccctgagccatgccatgttccttcctgcgttgtgattgacagccaggaccttctgcccttgcttctggtgacagcccagcattcagaccacgattcctgatgcattactgtgagaagtttctgcactcagccaggcggcatcaatgggacagtgagtaggggagccccttcctaacactctttgggaaagagtccctctctgcaggaaagcaccatgccctagaacaggctgggaatggagctgcattccagattccatctccatgtctccacacttctgtttttctccaggagcttttaaaatttagtttttgtcaatatgtatccttctcattccagtgacatgccttctgagatcacctgtcaatcgtcttaaaacaatgggaagggggttgttacctgtagtttaagcaccttgtatggtctgtatttcattctttttttccctgcactgtatgaagtgcaacttttatcatcacacacacatgtatgtgcatgcatacacatgcacacacacatgcttgcacacacatgtgttcaagacttttctaatcctctttttttcttattttttgtaataatttttttgacactagtctttctttgtctctcaggctggagtgcggtggcgtgatcttggctcactgcacctgcagtctcctgggttcaagcgattctcctgactcagcctcctgtgtagctgagattacaggtgcccactaccacacctggctaacttcttgtatttttagtaaagagagggtttcaccacgttgggcaggctggtctcgaactcctggcctcaagtgacccacctgcttttggcctcccaaagagttgggattacaggcctgagccaccatgcctggcctccagtttttcttattaaactgaaacaaggtctcagtatgctgcccaggctggtctcaaactcctgggctcaagcgatccacccatcttgacctcccaaaaagctgaaattataggtgtgagccactatgcccagccttttgtagtccattttatgcatctagatgtgcttccaaatgttttacccacctgaccttaacacaatttcatcttctttgtaaacaattataactttgtaatataaacaaacacatgcttactgaatactttttgcttccctaaattttcttggtcttttgactccaatgtcctctcaaaagagctatgaaatcatttgcaagtttaaaaaagaaaaaaaatgccacagaagtattaatcatctctgcatttgatggttcattacctttaaaacactaggtctgtccacactgaaatatgctacatttctctatttagttaattcttcatatttaaaaaagtatttatttcattaagaacttgtcctcttgttaagtaattgcattatttttttgtttgtttttgttctttcttttttttttttttttgagacagtcttgttctgtcccccaggctggaatgcagtgtttccatcttggctcactgcaacctctgccttccaggctcaagcagtcctcccacctcagcctcccaagtagctgggactacaggtgcatgccaccgtgcccagctaactttttacttttcatagagatgggggtctccctacattgcctaggctggcatcgaactcctgagctcctgcaatcctcttgtctcagcctcccaaagtgctggaactgcaggcatgagccactgcacctggacttcattgtgttttatttatttatttttgagtttttgagacagtctcactctgtcacccaggctatagtgcagtggctggtctcgaactcctgacgaggcgaagtgatcctcccgcccaccttggcctcccaaagtgctgggattacaggcttgagacaccattcgtggccttcattgtcttttaattgcttgtatatgtatggctatgtttaccagagctttataggatctttctgtcattctctgtcattttaaaaaaatccagctcttggatttacttaacaattgtattctttaattttataaatgattgatttccgcttctatctttgtgttcagacaagagagttctacctgtttgactttatcaaattctctttttttcctttatgcttccgtttctgtagctttgtcttgtcttgatgtttttcatcttttctggacttgcttgacagacatggttttctttggtctttttccaaggtttgataagatctgtatcctcttatgattcagttggctaaagatttctcaaaagaattgtctagatatctccaggtgtctgaatcaacagtgaattttttttttttttttttgagacagagtcttgctccgtcacccaggctagagtgcagtagcgtgatctcagctcattgcaacctccgcctcccaggttcaagcaattattctgcctcagccacctaagtagctgggattataggcacctgccaccacagcaagcaatttttttttttttaaagacagcttctcactctgtcacccaggctggagtgcagtggtatgatctcggctccctgcaacctctgtcgcccaggttcaagttattgtcctgcctcagcctcctgaatagctgggattacaggcccctgccactgtgcctggctactttttgtagttttagtagagacagggtttcaccatcttggccaggtgggtctcaaactcctgatctcaggtgacctgcctgcctcggcctcccaaagtgctgggattgcagacatgagccaccatgcctggccaaaaaaatatcatttacagtctcttttatttgatggcattacaatagatttttttttcttagtctctcttccttttctttctttttttttaattttgagacagagtctcattctgttgcccaggctggagtgcagcagctcaatcttggctcactgcaacctctgcctcccctgttcaagagattctcctgcctcagcctcctgagtaactaggattacaggcgtgcatcccctcgccaggctaattttgtatattttttataataagttgaacttgaaccacttgaatgccctgaacctactttttccttctattttttttaatttcttttcatttttctagaggtggtatctcactatgttgcataggttggtctcaaactcctgggctcaatcaatcctcctccctcagcctcccaaagtgctgggattatacacataagccaccccacccaaccttctttcaattagtagcctaatctggaattgttttattgctacatttttggttttttatttacttttatgtttattttaattttttaaatttttattatttattgagatgacatctcactgtgtcatctaggctggagtccagtagcatgatctcagctcactgcagcctctgcctcctgggctcaagtgatccacctgctgcgccctcccaaagtattgggattacaggcatgaaccaccacatctggcccattttttgttatttatgtatttatttacttatttaatcttgaaatggagtttccctctgtcacccaggctggagtgcagtggtatgatcttcactcacttcaatctttgcctcccaggttcaaatgattctcatgcctcatcctcactagtagctgggattataggtgtgtctggctaatttttatatttttagtaaagacagggtttcatcatgtcagctaggctggtctcaaactcctgacctcaggtgatctgcctgccttggcctccactatttttcattttttaaattacatattatagatgttgccttttaagtttttaaaaacattttcatcaatagcacagcctgacctaccattgtttctgctcaacagctcagataactgggttccttgacaccatgactgtgcattactcacctgtctcctcttggtcattggataatgttttttttttggaggtcgacagatggagagtgcctttctactgcctgtgtgtcctcaatactgctctgattggccttctccagtccactgctcatcccatggctattgtgcctgctgagtgcatccccaaaatgatccactgcatgaagttcatggcaagtccaaattcctgtggggagcttggaataccttatttctgaagccagccctgccctacctctgaaacttcagccctgccctacctctgaaaccttactcctgataaccagagctctgcaatgtccaagctccaactgtcccgagcccagtgatctgaggacaggctcgtcttgtcgctgcctcacggcctttgtacgaacaattccaaccacatggaatgcactcagaggactggacctccacatggctggctcactgttgatgtgcatgtcctaagtcaaatattaccttctcaagcaggcttctgggatgaaaaccaaatcccctgaactgcactcacacgaacctccactgttaactatccatcacccatcatgtgaaccaactgtacttaatttggagcacttacacctggccacaattttctgttttgttttgttttgttttgttttactttaaatagatgtggggtcttgctgtgttgcccaggcttatctgaaactcttgtatgcaggcagtcctcctacctcacactccctgagtgctggattataggcgtgactgcatatcagtcactctaattaatctatctatctatctatctatctatctatctatctataatccatccattcattcatctccctatccatctatgaattatatttatctatttatctatgaatatctgtctatccttccatgtatctatgaatgatagttttctatttatctgtgaatatctctttccgtccatctgtctatccatccatccctatctatctatctatctatcatctatcatctgtgaatgatgtctatctacttatctatgaatgatatttatctgtggtctatctacctatctatctatctaatctatctatcatctgtgaatgacagggtcttcccctgttcctcaggctgcatacagcgcactggcataatcacagctcactgcagcctcaatttcctggtctcaagtgatcctcctacctcagtctcctgagtagctgggactatgggcgtgagtgcatgcccatccggtctatctatctatctatctatctatctatctatctatctgtctgtctatctatctatctatcatctatcatctgtgaatgatgtctatctacttatctatgaatgatatttatctgtggttatctatctatctatatcatctgtgaatgacagggtcttcctctgttcctcaggctgcagtgcactggcataatcacagctcactgcagcctcaatctcctgggctcaagtgatcctcctacctcagcctcctgagtagctgggactatgggtgtgagtgcatgcccatctggtctatgtatctatctatctatgaatgacagggtctcactctattgcctagcatggagtgcagtggcatgatcatagctcactgtagctttgaccccctggactcaagcaattccaacctcagcttcctgagtagctagtactatggcatacacaccacactgagctaattttaatttttttttttaatggaggccaggcataatggctcatgcctgtaatcccagcactttgcgaggctaaggtgagcacataatgaggtcaggagtttaagaccagcttggccaacataaggaaaccccgtctctatgaaaaataaaaaaaaaatttagccaagcatggtggcaggcacgtgtaatcccagctactcaggaggctgaggcaggagaatcacttgaacctgggagatggaggttgcaatgagccaagattgcaccactgcactctagcctgggtgacagaccaagactcttgcacaaaaaaaagaaaaattaccttttagccctatgaagatgccattcaccagcaaggcaccctatttctctatgccaactctgtaattattatctttccaccaggaggaacaatgtggaactccactttgtgacgcctgtgttccagccagagggagccggtgcctgctatggaagaaaggtctgcctgtgctttggggaaaaagtagtccaccacgatctacctttgctctttgacctctcaagagacccttctgagacccacatcctcacaccagcctcagagcccgtgttctatcaggtgatggaacgagtccagcaggtgatgcgggaacaccagcggacactcagcccagttcctctgcagctggacaggctgggcaatatctggagaccgtggctgcagccctgctgtggcccattccccctctgctagtgccttagggaagatgacccacaataaatgtctgcagtgaaaagctggagccctgattcctaaatttgtcactcaaattgaaacaaaccagctggccatagtggctgtcatcccagcactttaggaggccaccacaggaggatcactcccgtgatcaaaaccaacctgggcaacatgatgaaactctagctctacaaaacaaaaataaaaaaaaaattagcctgcatggtggcacacgcctgtagttctagcttctcaggaggctaaggcaggaggatcatttgagcacaggagttggaggctgcactgagctatgattgtaccactgcaccccagcctgggcaacacagcaagaccctgtctcaaaaaagaaagaaaacaaaaaatgaaacaaacttcagtgtcaggttaaggcatctatgtgcataaggatgaatcgtttctccctgacagaaacaaagaaaggcgagaaaaagtagaaatgaacaataaacactggccgggtgcagtggcttactcctgtaatcccaacactttgggatgcagagacgggcagatcatttggggtcaggagttcaagaccagcctggccaacatggtgaaactccgtctctatcaaaaaaagaaaaaaaaaaaaaaggctggcatggtggcgtacacctgtaatcccacctactcaggaggctgagacaggagaattgctggaagccaggaggcagaggttgcagtgagctgagatcacaccactgcactccagcatgggtgacagaacaagactatgtctcaccaaaaaaaaaataaataaacaaacattaataatgcactgttgaatgatcactcagacacccaaactggagaggtaaagtatctcctggagtaggggaggattctgtcaatggatcctaactcagtccagaagaggccgccctgtagcccaaaacagcacaagtcccagcaaaggtgtctctgtgacctacagatttgcacatgaacaggagataggttccaaagataaaaactggcactgatgtggctttgtctgtggtgctcatttatagtgtctgtttatcgtttacaaccacaaggatgtacagtcctttccattggaattgttttcagtccccagtgccccaggtaattagggcaaattcaggctttggaatctgtgctgcacaggcagtgttctccccagctctgaactgcaaggtcattgmaaaatcaggctttgccttacttaatatgtctaggctgctagaatgaaaataccataaagtgggtatcatcaagaatatttatttattgcagttttagaggctggatgtccaacacccgggcatgacagaatctgtgtctgggtagaacctgttttttggttcacagctaccgccttcttcccctgtcttcagacagtcatccatctacgtcctagtctccgattcttggttttttgtttgtttggttttttttttgagacggaatcttgctctgttgtccaggctggagtgcaatggtgcaatctcagctcactgcaacctctgcctcaggttcaagtgattctcctgtctcagcctcccaaggagctgagacaataggctacttgctccatgctcgactaatttttgtattatttagtagaggcaggtttttgccatgttgcccaggctgctctggaactcctgacctcaagtaatcttcccgccttggcctcccaaattgctgggattacaggcatgagtcactgcacccagccctaatctactcttcttataaggaccccactcctattggaatagggcccactcttgtgacctcattttaaaggatgactaaaaaccttattcctgtgaatttgagggcaacacaattcagttcccaacatattctctcctgggagtaaggaggtctttccaatagttctttctgtctccagattcaagaacagttccctcctcccactattccaagcctaggtatatgataagcaatgccccaccttgtcaccacttcaagaacatgtcctcaaattatccaatccacatcagcctccaagaattcaggctgtgcacagagaccaaaaaagtcaaatccatctccagccaattctcttgggtcaagaaagaaatagtaggccaggtgcgatgactcacatctgtagtcccagcactttagggcactaagatggcttgaggccaggagtttcagaccagctggggtgacatagcgagaccttgcctccacataacatttaaataattaggtgaggtgacacgtgcctatagtcccacctacttgggaggctgaggtgggaggatcacttgagtctctggcctccgaatgtgttcaaggctgcactgaactatgattgtgccactacactctagtctgggtgacagggtgagatcttgtctctaaaaagaaaggaagaaggaaaggaaagaagcaaaaagaaaaaggaagggagagagggagggagggatggcaggaggaaccagttaacccctaaggctttccccatagccatggcttatggaacaagaccagcactttgggtcagctgtgccagatgttcctggcccatagagtcgcctttaagatcttcagcatccactggggagagtcacatctgtgtccacacttgtccacactcttgaccttgatgctttgaagccaaagtccccaatggaggctccatgtgctgaaagtcatgtgagacctcagggtcagggcttacccaccctttccattcccacaacctcccccaaatatgacttctggtacaccagcttctactgcccccaggccccatttccaaatcctgggcacccaagacagctcagtgtgtttatataatttacctaagtgcacccaaggctcttttctctctagttctcaggatctctagttctcaggaatctcaactcccagcagtacaggatttcttccaaggatcaaatctccactccacccctgctaaacctccctgcagaactgcttatgggctgtctcctgcccgctccttccaggccttttcctggccttctccatctgtgtgataatggctcagcaagaaatcccagttcaaagccctcaaggataaaaaagttattttttaaatttttattttagagacagggtcttgctctgtcacccagtctggagtgcagtggtacaatcacagctcactgcaacctcaaattcctgtgctcatgtgactctcccacttcagcctctcaagtagctgggactactggcacaccaccatattcggctttttttttttttttttttgtagaaatagggtctctctgtgttgcccaggctgttctcaaactcctgcttttaagcaatccttccccttcagtctcccaaagtgctgggattacaggtgtaagccaccatgcctagtctgataaaagctctttcagagtaacagggcaaagagagaagcaataaacagtgctcaaggactagctctgtctggacatggtggctcacgcctataatccctgcactttgggaggccgaggcggatggatcacctgaggtcaggagatcaataccagcctggccaatatggtgaaactctgtctctactaaaaataaaaaaattagctaggtgtggtgatgtgtgcctgtagtcccagctacttaggaggctgaggcagaagaatcgcttgaacttgggaggcggaggttgctgtgagccaacattgcaccactgcacttcagactaggcaatggagcataataaatgtaaatgatcctaatttgccaattaaaagttaatggtcttttttctaaatagaattcccagcaccattttgggagattccaattcaatcaattgagggagtcgggggctcctgactgtattgtcttgaacaagcagccccattatcccatgccaggggagtgtggggcagctctctcatatatgaaaatcctaactcagtgaatttaaggagggacttctgattctatgttttcaacacaaacttctaccccacctccctggccttactgactctatttggtaagcatagagaactagttacaaagggggaaaaaaaaggcataactgttggaggcataataatggtgaggaggacctggatttacctcctacctatacacttaatatagagtcttctggatggtcaggcacagtggctcacttgtaatccagtactttgggaggccaaagcaggaggactccttgaggccaagagtttgagaccagcttaggcaacatagtgggacctagtctctacagaaaaaataaattaataaaaatgggtcaggggtggtgatgcacaccggtagttccacttccttaagaggtggtgatagcctcacccttgacagccagagccttagaagaaaaaagtactgttatcttgaagactatggaattattttgcccctgaacagtgcaagaggacctaagcaaccccctttgagggaaaatgggtcacctgggctggaggtagagatgtgatattgttttgtaagctaggatttcctacaaaatatggatttatactttgagcagatcttgcattgtgaggggatgtgaggggatgaggtacgaaatgaaggggcttgagaaaatcagtgactagggttcaagagagttaaagacaaaaaggttcactgcagcctcaactctcagccttgatctttctagaggtcaaaagagttaaaaacaaaacatacaaacaaaaaaagggggacccaaagatacaaagaaaagaattacatgacagccgctccatccgggagggaggtggggggcagcccccgccccaccagccgccctgtccaggagggaggtggggggcagcctccacccggccaccgccccatccgggaggtggggggtgcctctacccggccaccccgtctgggaagtgaggagcccctctgcccggccaccaccccgtctgggaggtgtacccaacagctcattgaaaacgggccatgatgacaatggcagttttgtcgaatagaaaagggggaaatgtggggaaaagaaagaaagatcagattgttactgtgtctgtgtggaaagaggtagacatgggagactccattttgttctgtactaagaaaaattcttctgccttgggatgctgttaatctataaccttacccccaaccccgtgctctctgaaacatgtgctgtgtccactcagggttaaatggattaagggcggtgcaagatgtgctttgttaaacagatgcttgaaggcagcatgctcgtgaagagtcatcaccactccctaatctcaagtacccagggacacaaacactgcggaaggccgcagggtcctctgcctaggaaaaccagagacccttgttcacatgtttatctgctgaccttccctccactattgtcctatgaccctgccaaattcccctctccaagaaacacccaagaatgatcaataaatactattttaaaaaaaatgcaagttacctccctgctatcctggcgttttcctaattactgtaataaatctgtctttctctacctacaaaaaaaaaaaaaagaaaagaaaagaattacatgagagggtaatgagcaaaactgcatcactcaaaaacaaaaggatgagtcacagaaaagacggggaggggtccagggcacagtggttaatcaaaaggagtaatttcaacatcagtctgatggaaggaataaagataaaaatagcagttggaattagccaggcttggtggtggccacctgtagtcccagctactcgggaggctaatgcaggagaatcgcttcaacccaggtggaggtggaggctgcactgagctgggatcgcaccactgcactccagcctgggccacagagtgagaccctatcttaaaataataataatggtaataaaaggaaaaaaaaaagagtccatctagcattccccatcccaaacttagagtacaagtccagcatctggaacagacatttcaaacaccaagttttgagaaactgaaattgcagcttgattgctctgggcaggtcataagacccttcccaacaaaaagaaaagagactccgtgtgctcaaacctaactgggtttgtttatttgtttatttatttattttattctttgagacagagtgtcactctgtagcccaggctggagtgcagtggcgcaaactccacctcccagattcaagcaattctcctgccttagcctcaccaatagctgggactacacacgtgagctaccacgcctggctaatttttgtatttttagtagagacaggatttcaccatgttggccaagctggtctggaactcctgacctcaggtgacctactcctcttggcctcccaaattgctgggatcctaggc

SEQ ID NO: 96445 - DNA, 13197 bp, Homo sapiens
gacgctgcacccacacggttcctggacccagtgtagacgctgcacccacacggttcctggagtccaatgtgtgcgtgaaaatgccccgcagcagggctgaggctgaggaacggcgtcccctgaaatctctgcatcagggctcaaacacctggcaggcccacccgcagcccccaatgccgccttggcagctggtcagagctggcctgtgcttcagcagaaaaaggcacctccactgaggcattccagcctcctgcagtagaaaaagtgtcctcccaatgagcaaagggcccctcctcttcctcagatggcgtctgggtgtcgagggacccactggggcccctgccgaggggtcctgtggtgagggcgcgcctgctgcccctcttccccccagctccactgctcaagcttggcctgtctgcacccagcacccccgggtgtcctcctgggagggctggaccttgtctcttggcagcaccgtggggccctcagagccctccatctagttccgggcagggcagggccccttcccaacaccatcggctgcctctggtcactcccacccaggggcacagggaatctctgaacaccccttccctggggagcaggaagacttgaaacctccttggccaggccagggcggtttctactgtgcccaccagacccccaggctaagccagcagggagactggaaggcccagtgtccagcccctgccctgcctcagggtggctgctcgccctctcccctcccaccccacctggacagcctcggtcctcagggcgctgtagggagtgaggcacctgtgggatggagcctcagcgtgggtgggagagatgctgcagggcccaggtgcggagccgcgtgtgaacgggcaggcggcccgcagcgtctccgtcacgagaaggaagtggatgctcgtgacaacagaagaactcggttcgggggaagaacttggttgttcaggggaagaactcggaccattctctgtgtgtctctctctgtgctttcggtaggtgctgctccgtggctgctgcatttacaagtgacttttaaagaacagaagctggaaggaaacctggggctcaggattcagggagggggccctgcaaggtgggaggggcccggccagggcccaggctgtgcaaggaacttcaggcccagtgaagctagagggtccacaaaggctgggcaggggccaccctgaaggggtgctcagagagttcaggcaagctctccctcccctgccatccaggtcctcccagcccctgccctcttagccccccttcagggcctcctcaacccgcgggtgttccagattccacagcctggcccatatcttccagggagagtgttcgggtgcccgggcacccactgtggccccaccccagcttccatcaaagcctccctccctgtcctgggccactcggcctggggagaagcggcaccctctccccagagcctgatcctccacttcatgtggacctgtaggtgttggcaagtgggcaagaggccgccatagcctgggaagagggggcacctggacgccccacctacagctgggtaccccagaagctgccgggctctacctggacaccctccagctcaggagatggggtggggttgagtttggtctaaacagcaagacctcaggctcagctgggaaatgccacggcgccaggccccacatccagcatgtcctgtggctcagggttcctggaggcacctccacagtacctgctcctcccggtgggaagtcaggtgcgcggtcctccctctccaacccgcacccgggctctgaaaattgctctgaggcctgcagctgtcacacttgcgttcattcacccacccagcagcatgaattcagtcctggaggcgcccagaggacagagcccctgcatccatccatgtcctgagcaaggtggcgaggaggcggacatcagacacatccactaatgccttcggcagggggccagtgccaagaggggcagccgtgctgagtgggagtgtgggggctgcaccagaccgggtggccagggaggcgtccctcaagctgagaccgcgtggaggaggtgagccctgtgaagtgggggggcagagtggccggggtgggtgagcctgggggccacgaggggaccagtggagggcctggcaggcatgggatggcattaggtggaaacaggtggaggtggagactcgcgatctctgaaataaagccgctgctagcaggctggtgctcagcaggcagtgctggaagtgtgagaaggggccaggctaggccaggatgaggagtggagcctcctctgcccacctaggggcgtcaactcccacccctgggcggtccccaccccagccctcagcgctcatggcctttcagacccggctgggtccatgagcccagtgggacgccggggctgcctggctgggatctgcgcctgcctcccagccctttcccgctgccctggcagggctgcccccagagggcacgggagatggggttggggtctgtcctgcgtgggaggcagggccccttcgagttgtgttgtggggtggggttttctctagccccccttccccttccagcaattccagagcgtcctggtgggctcctctgtttccaagcaacagaaggcaccccgcctgggcccgggctcctgggggtcctggtaaccccacgccgctgcttccgtgggtggggcccacagaggggtcccttgagtcatcttgggccttttttggttctttggtcatgaggaccccagggaggccccgtctgtgtctggaatgcctggtgcggttaccttgtcaagcctggagaggccgggaatgcgctcacttcgggaaaaaagacaatgcagggcctttgccgggaactgctaggagacccccggcctgggggcgcggtcagggcgggcagcttggcaactcgcctagggctgcgcgggacaagtcacctcagtgataaatcagagtttgtgaactctatggcctgggcggccgaaggcgaacgcaggctccttccctctgtggagttcccccgtcgcccctcagcccccagcgcggggacaccggggcctaggccggctctccttccgggccgacacccccgccgtcctccccgtcgcccgctcccctgcagacgccgcgggggtgccgggggagcgcgtttgctgctctgacccgcccgcgcccgggccggagcccgctgcgttcacggtgcaccccccggacagcccgggcgcggtaggagccccacaaatacaggctgaacgagtaaaacaaacttgaatggcctctgccaaaccccgcgctctcggttttccagcgcggagcgtcggcgccgatgccggcagccttcctcgcgggacatctgctcgcgggccaggaggtggcatcgcggacctctccaggcagcggggccgccgggcggcggagcccaggcaaagacatcgcggtcggaggcgctcggaccttcccgggaggagggggagttgcctcggtggtttccgagagggcggcaccgggggacgcaggagaaaaggtgcgggcgggggccggagaggggacggggcccggagtgggcgccgggaagcgtaggaggtgaagccaccggacccacgcgcagctcggcgaggaggagggcgggaaagcgcgtggggcgcaggccggggagccgggtaggacgcggcacctgcggagcgcgccaagacttccacggcttacaagaacgtgggagagggacccccccttacccggctcctctgcgcccccaactcaccctggcccctcatcccgcgcccctgagccctggagagccgcgcgctccgcagccagtgacacgccagccccacccgcgaccccacgcgttccctcggcagcccagggaggaccggggggcgcagacagacccagggtttatcgggccgcagcgcagcgcctccaggtccatgtttcctcagccataaaacagcgctagcgacgccccctgccccgcccctccaggctgtgagaagagccagagcctgtcccgagcgcggcttcctcccgccgttccgcccgcgcgcgcctcctgggcctcagttcgggcgacccgcacccctcccggcccgcccagggtctgcccggccgcgcagagtgggggatcccagggcgacagcagcccccgcccccaactccccctgcccgccccccccggccccgcagttcccgcgtctcagctcagagcccgagccttgggcgcgggcgccgtcgccttggggtgctgggaggggcccgaacccgacccgggagggcccttcctcgtgtctcctccgagggagcggggcgcaggacaggccggggcgggtctcggggccggacgggcgctgggggttcccgggccaggctccgcgggggccgatcaccggtggggcggccgcgcccaatcgaatcccaatcccagtcgaatcgagtgcggagtcgacgggggaagcgaaccccccgtgaacgcggggctgcacctcagtggagccggaagccgccggggcagccccgagcgcgcacacacccggcggccgcaccactgccccggagtttggccgcaggtggcttttccaagccgccatccaggagcggccgacggcgccaagtccccgcctcgacctgcacaaaacgaaaacggacgctggaggggggcgagggggcggacgtgagaccccggccccgaaccccgggcgccgccttcctccgcggcacaggcccgagagaggccacgcagcggcgttccctgcgcacagactcgggctccccacgagccgtgggccacagccacagccgccccgtgtccctaaatcaatacgagacgtcaccacagacgtcggagcgtttgctcgcggccgccgtgcgcggggctcggagtcatctcaccgcccggtctgcgggatggatgagcgagcggctcccggtgccgtgggggcgggggggacaccggccccccgcgcgcgtctaaggccgcgtttctgccgctgcgcccccagcccgcacccacgttcgggccctggacagggcttccgcgctgaggccgtcctggtctctgttctcccggccggggattcgcgagaggcggcccgtgggcgaagtcgtgggcccaggtcacatcctgggggacccccagcgggagacctggaggccgatgacggggaagtgccgagccgcgcgtgtggtcccgggacccgcctccccgccccgctcccgcctgcctcactcctccaccgcgccggccgcgtgtcggcgaaaccagaggcagctccgtgcgagcctcgcccggccgtgaggcccgtggattccgtggactcgaggcccgcgtcctccgccctcctgtggccccgacctgcccggagcgcgttccccgccggcgtccgctgccgctcacacccaccccagccacgggcggcggagcagtcgcgactgggacgcgggccgggactcttccccgagtggggcgctccgagcgcgcgggcgggtcctcaaatctgcattctttccgttaataaaatacgttctcgtattttttcctgatttcgcatgaaaacctttgcctaactacactcccatccaagctggatttatttcgtccccggggagataaatcggggcgaatttacagcccgggaggcacctgccgcgctaatgggcccttcatggagtgcgcggccggcgggggcgcgcgggcggggggggggcgccggccaatggccggaccgcggggtccgcagccaatcagcgcgcgcgccgcgccccggggagcccccgttatcagcgcgtccgtcccgcgcggcgccgctccgaccggccccggagccgccgccgccgccgcccgcccgcccgccccgcgccggagccgcccgcccgccccccgcgccccgcgccccgcgctgcagccgacgcccgcccgggccgcgcgcaaacttcccgggccggcgggcaggggcggcggcggcggggcccggatgggagcccgggccggcggcggcggcgcccatggacactaaccgcccgggcgcgttcgtgctgagcagtgccccgctggccgcgctgcacaacatggccgagatgaagacgtcgctgttcccctacgcgctgcagggtccggccggcttcaaggcgcccgcgctggggggcctgggcgcgcagctcccgctcgggaccccgcacggcatcagcgacatcctgggccggcccgtgggcgcggcgggcgggggcctcctgggggggctgccccggctcaacgggctcgcgtcgtccgccggcgtttacttcgggcccgcggccgctgtggcgcgcggctaccccaagcccctggccgagctgccggggcgcccgcccatcttctggcccggcgtggtgcagggcgcgccctggagggacccgcgtctggctggcccgggtgagtggcccgcgcggggggtgcggggcgggtgggcgcggagggggaccccgccggccgctgacctccctcccttcccctcccttgcagccccggccggcggcgtcctggacaaggacgggaagaagaagcactcgcgcccgaccttctcgggccagcagatcttcgcgctggagaaaaccttcgagcagaccaagtacctggcgggcccggagcgcgcgcgtctcgcctactcgctgggcatgaccgagagccaggtgaaggtgagcgcggcggggctcgggagagcagagccgggggcccgcgtcctgcgaacggccccagcgccagccccgggccccgcggccgcctgaccgccccgtccactcccaggtctggttccagaaccgccggaccaagtggcgcaagcggcacgcggyggagatggcgtcggccaagaagaagcaggactcggacgccgagaagctgaaggtgggcggctcggacgcggaggacgacgacgaatacaaccggcccctggaccccaactcggacgacgagaagatcacgcggctgctcaagaagcacaaaccctcgaacttggcgctggtcagcccgtgcggcggcggcgcgggggacgccttgtgaggacccgcggggtgggggcgaatctatttttgcagaatccgggggcggccccgggtgggcgcgagtcgctttgtatcatcaataaattatttaacgggtccccgtcggagccgtcgctccggagcctgcgccgcgtgtttcttccgtctcgaacccggagcgaggcggcccctccccggccccggcttcgcccctgcgcccgcctcgggtcctccgggttcccggtgcggaggctgcgggccccgggcaggcgcgaggaggcggcgaaggcgcagggaaggggcccggcccgcgggaaggaaccgcagcgacagccgccaggagcccgggacggagccggggacggagcagcaggtacggcccggcccgcctcgcctcggggcggattcggacgcgcttgggggttcccgaaagggcgggtgagccgcgtacccgcctcgagtccccgcgggaggtttttcttcttccgttttcccgctttggggccacgtactcgttgccaccgggcacccgttcccgctcggccgagggcttcgctctgattatttccaaagtccctctgcgcatcagcggatcccataggcccgccctgggctcagccggtggaaccgggtctgatccgctgcacggaggcccttcggtcaccatcccgccagatcttcccgcggtggaaagcagtttcttccgaactaggaccgcaaagagaaatccgaaataattccgcccgcggagcggcggggcctcccgtgggtcacgcggggtcagggagccggaggccccctgggcaaggcccgcagcgcccagccgggggctcgggggacccgtctcctgccctgaaatgccgccagctccgcggggctgtgactgcggctgacaaaacccctccagcctcccgcagcctctgtggccggggctgcccatcgctgcatcttaatgggcgtggctgttgagttttaatttttaaaaattaaatgtaaataatgatatcactgcggtggtacgatttctcttggcatttgcggaagcgttaaagggaaatagaaagggcttaaactcggcgcgttttgttttaggctcttagcagccttctttacaaggaagcaactcgaagggcagaagcaacgcttttctgtggggagcccctctcagctcagctcagagcagaggggcttcttaaagttttgaggaaggcaaagcgttgatataatcccgttttaaaatgttgagggataaatcctttattacagtagaaagtccaaaaggctgtgtttctcctctcaatgaacggcttagtgttttgtgacagcgtgtgatacagtgaaattccaggatttctaatgagcttgatctcaaataacaggctatacaggaggccgctcccctgagttagcatttcaaaggtggcaggagaagggaaaggaagaaaaagcaacacgggactattttcaccacggtcaattttattgcttaggaaccagaccggtcacttccaaaggcccctcagaacgaccaacagctgaaacccgcggggcggactccgtgttgaaccgcggacagcggcaaccacagcagcgacacggacctgtgcttccaccaagaacagattccgcagcggacagcagtcacttgcagtggtagtatttatcccacacaaacacccagctaatgccttcacccggtccaggaactctgtagtgttctaaagtaaaatcaataaaacatacatttgtgtttcatcaacagactctctaatcaccttctaatgctgtacttactgctataggagaaaaatatttgcaacaaggttatgacatgggttgtctgtagcggagcaatgaggaaatgtacagttttgtttctctttaatatttttatatacagcccatgttaaaagcagtttctattggaagcaaactaggctatttctatttctcccatgatattattgttgtaacgtaggatacttggcaccataaaacagtaacaaaagacagacaaacggtttacaaaattcttaaaaggtacacccaggctagctataaacttcacattcagttcttaatattacacagaagaacggcatgggagtaacggcccgctggtgcagacgtgctgtggggccgattttacccacgatggcgaggccatgtgtgttttttacgaatttgtgtgttgatggacacacagctgagctcctagactccaatgccgcctgctgatgggactctcctgtgcgttcatactggaaagtatatttagcataagttttggtaagatttataaattatttttaaaaagtatatatttatatatatttatatatatataaaaatggaaagcagctgcagtgtgattcaaaaaccatgtgacacggcgcagagtcagtgccgcggaaggagcatcggcagagacagacccccttgccatgctcagggccacgctgccggccggcagagggagtgcccgtctcggcttccccagcccctggacacacctccacctggcagagggggtccctggacacagtggggggtctctgtgctgaagaagcccctccactggcaatcattaaaaactgaaaactgtgaagtctacggtacagaccctctttgctgtctattagagttttgacaacaggactgtgacttatttaaaaaaaaaaaaaaaaaccaatatttctacttaatgtcacatagacagacgagacagtgaggtatgtgaggctgctccggaatggtccggaggctgaagcgaagtgtggggctggccgtctagcaggtggcgcttgggcgggttctcgatgcagctttcaagagtgcgtattcggtccacggctacagggaggctcacgaagtgtcctctcgtggcgctggcatctcttccctgtcacggaattcgtaatttgttaaaggaacaaacgcaccaggaaaagctgcgtaaaagctgaactggagggaggagtcatatttaccaccacgtcactgcacgacacaacacttgtgcacatgggcatgaggtttacctgccccgggcatgattcggaaggccaggaacacgggctgcagcaggaagagaggacggtgtcagcacggcgcacgcgggacagcacagcacatgccgccgcctcccgttgcacccccagaccctgcgtctcaccagggcagccatgaaccgggctgggaggagctgatggccagcagaggcagctcggcccttgtgcacagccacggcagcgcaggggttgggggccccgtgaatgtggaactggagccaggccggccatgagaggttttgcaaggaaggtgttatttccaggtaaaaaaattaatggaaaaactgatgtaaaagaatggctaaataggccccaaatgaagcggggaaggaaggctctcccgtcctcggctctgccgcacctggcaggtccagcgtcttatccgggtgtgtttggggctcacagctctgggcctccaacgtggaagaagctaactcatttattggctgaaaatgagatttgatctgtctcctgtgcacactctcgaggtgcagttgcctgaataaacgatctgtgccagtgctgccccttggcacacggtggggagcgccctcaccccggctcctcggctgacagtgagcctgccccaagaaggccattaaaacactgaagctgcatatttgcaaaacagccttcagaaacaatcagctgtggacatttttttacaaatattaaattatgtattttattctattgtaacgtcatttctgccttcttcctacttacccacctagcttatgatattttattaaaattaaataaaaacagaccaacttggcctactctgtagtcagactaagaagacaggagaacaggagaggagagactggccaacccccgcccacctgcctgccagccccagcacccgcccacccactggccccagccccccggccccctagcttccccttggtcccccagcctggcccctggacctcagtctatgtcaccttgtggtctcccatgcagacgttgggcccaatgtggtcataggtgacaaccttctcctcgctctccgactggaaaggggaaacagacaggtgagtgtggggaggtggggcaccctgggtccagttgggagctgactggcaggaacatcagggttttgtgggggcagagagatggggatgtcggcccctgccagtacctccccagcctctgccacccgccctgcctggcccctgagagagaggccagctcatggaccaaaggctctggtgatgtggcagcgcctcagcaccttgaccctggcccttttggacaacaggtatctgcctctaggaggggtcgcgtggggagccgcgggtgctggcccggctcccaagctcccctctcccggacatgctcctgggctctcaggggagttgcaggggaccctgttcacaggagtgtgtgcgccccagctttctgtgcaggtgtgctcctctgagtgcggcagcccatctagttccaatcttcccactttgatttgtttttgactgttctattaacctagaactcagtgttcaaacgagaacagacaccgaattccacaccactacacaaagcaatctgtgcacagtaattcacggctgtgtgcgcacttcccagcaggtgcctgtattccgggcgcctccggaaggggtttgctgctggtcagcactcggctctggttgggctggaattttatatccacagctggagcatctgagactatccaggtaaaactgagttatctttaatgcagtgggaagctcaaggtcagatttactttccagcatgggcgcctgccagaaagaatgagaaaacaagcttcggcaccgcatgcatgagcaccttcccgcctctcgcgggtgaagcggcgcctccgcagaagtggagaaacattcatcaaacgcagcgtggtaatttacaaaggcagcataaaattgtggattttcaactgcataatctttggacagataaacaaattacggcgggcacaggcagcgtgcggcacacctcactgaacacttgtcaccgaggctccccaagcagcaccgcccgcgtcccgagccccttttggtgttttagggctccggaggcagaacggagcttggtgacgaggtgacggcgcgtgtcatgatggatgaggctgcggagcgcgcccggcgcccgtctgcttgtcctgcacacccgctgcccactgggtggccccatggggagagcctgtccaaactccagccccagaaggcaggggctgtcaaaggccgccaggtgtgtgttgtgaggctctgtcccccaccctgagcataaagtgtcaagtcccggatccagagaacccgagaggctgtgagtgaatggaaaacgggctgcaacgctgccctgctctgagctggtggagccctggcagcggcagcacaatgtggggaggccacagccctgccagccttctgcccttgggcgctgctcaccaatctgcactcgcgtgacctccgacgttttcccaggggatggcatctgtgcccgagtccccgggaggctcctgccccgctggtggcagccctgggctccacatgcctgacccgctctcagcactggcagatgggagcacccaccatgtggcaccgagggactggcgtgcctaccagtgagcccagccagaggggcagtggcaggtccacagccaggctccaggccgagcccactcctgggcttttgggcttgtggccagcacactttcctcaatgatgggcacaggccctgcccacaggccagaggtggggctgcggaggagccaggctggctgcagaccccagggacttctggccaaggggccccgcctccagcccaggcccccaccaggcaggctcctcacagcacagccagggacggagggcaggctgcacccagggtgctccaggatgtaggaaggaacagtaaggaacccggcccggcagacagagccacatggcagaggccagcagggtgcatctcagggaccagggctgcagaggtccccgccctgctgagggcacacctgcacccaggtgtttgctgtgcctggggtctggtgccgtctggcacagacacagatgggcagtgagggacaactggagcctcacacagctggtgttgaag

SEQ ID NO: 96446 - DNA, 109299 bp, Homo sapiens
tgggctggtggcacaggggtaaaagaatttaccaagacggttgtagataaagaaaggcagatttattaaaggaagtataaaagtacattgccgggctgggcgtggtggctcgtgcctataatcccagcactttgggaggccgaggcgggtggatcacctgaggtcaggagttcaagaccagctttatcaacatggagaaaccccgtctctactaaaaatacaaaattagccgggtgtagtggtgcatgcctgcaatcccagctactcgggaggctgaggcaggagaactgcttgaacccaggaggtggaggttgcagtgagccgagatcacgccattgcactccagcctgggaaacaagagcaaaactccgtctcaaaaaaaaaaaaagtacattgccagggagcaacaggcaggaccagcagaagaggagctgactgaaaggaaacaaagacttgttggagatttgatggcatagtgtttatgctgtatgctgaagagggctttgtgcagtactgataatgccagtgttgcagtgagctaacttgcaggtgtctggtgatagcttgggcgcaggaagattgtgagttatttgcacaggagggctacgtgtcctggaccatgaagaaaggccgacttgtagcttatctgcttcttctttttgctttcccctcctcacaccaacctgactccttttccataattaggactgcacattagccaatcaatatatctggcattccatcatttccctatagccagaggcctcccgagtgctcctccagtgtgctccattcacagccctatggtgcttgcatcacagggagcactcagcctcctagcaagaatgggtgtagctgggaagaacacatgtgtggggcagtggggcagctagaacagtgatccaagccctccactggcttcatctctatattagtctgttttcacgctgctgatgaagacctatctgagactgggtagtttataaagaaaaagaggtttaatggattcacagtaccatgtggctcagggtggcgggggggtgctcacaatcatggtggaaggcaaaagtcatgtcttacatggtggcaggcaagagataatgagaaccaagcaaaaagggaaacctcttataaaaccatcagatctcatgagacttattcactaccacgagaacaatatgggggaaaccgcccccatgatccaattatcttccactgggcccctcccacaacacgtgggaactatgagagctacaaattcaagatgagatctgggtggggacaaagccaaaccatatgaatctccatccttcatctcaaagataccacctaccaatggcttcccacttctctctccaaagaacaaatgtgcagaaaaagctcttagcacttaagcagtgcaacttctaaagcaagtgcagggagctgtggatgtcttttgggagaggagatacaatggacatggctagagtcacatggactccctggtgattaaacagcattcattgaaggtgaactcatgtggtacaccttggggtacaaagagatttcagaatttgtccctgttcctagaagcaaacacccaagcagaggaactaagacatacacacttgaacaaccaattcttttggaatttctttttttttttttttggagatagagtctcactctgtcaccaggctggagtgcagtggcacgatctaggctcactgcaacctccggctccctggttcaagcgattctcctgcttcagcttcctgagtagctgggactacaggcgtgtgccaccatgcccagctaatttttgtatttttagtagagacagggtttcactatgttggccaggatgatcttgatctcttgacctcgtgatccgcccaccttggcctcccaaagtgctgagattacaggcgtgagccaccgcgcccagcctggaatttcttattacatttctctccaaaaggtatcttgggagtttcttatagggatacgattacagcctagttccaaattgtctcacttttccatcttaaaaaagaaaccataggaactgtaattgtcagtgaaactaggaatagagaacatctacaaactccaacttatgtatctgtggcccaaaccaccctaatccagcataaccagtttgggaagccacagatgggagactggcttggtgggcacagtagggcagattagagaacatataggggttccaggggtagcaaatttcaaatcattagcaaatatcaaccctcagatgcctgagaaggacccaccctaagagggaatggctatgaatgcaatagagaacaaacatggtgggatgtgtgttggggaggggtggaagacatggaaagggcattggggcctgtagagggaaagatttaagaatcagcctgacttagttatttcagcttagaattagaataggccagtagtccatgactcacctcccccatcttctcacccaaattcctataaataaccagaaaagaatggaaattcggccaggcgtggtggctcacgcctgtaatcccagcactttgggaggctgaggtgggcagatcacgaggtcaagagatcgagaccatcctggccaacatggtgaaatgccatctctactaaaaatacaaaaattagctgggcatggtggcgcacacctgtagtcccagctacttgggaggctgaggcaggagaatcgcttgaacccaggaggcagaggtggcagtgagcagagatagcgccactgcactctagcctggtgacagagcaagactctgtctcaaacaaacacacaaagaatggaaattcatgccaccagtgaaagctaggattgatgatggatttattgccagaacttgggaagaatttttactaaagccctataaaagtggtcaaataaaaaaaattaaatgaaaatcaaatccacaaagattagaaaccagtcttagccaattttggtgagttgagcactctcatatacatttgatgggaatgtaaattggcatgaactttctggaaagcattttataatagcatatgcattaataggtttaaaaatattcatacctggtggcccagaagttgaattttaggaatttattctaaggaaataaccaggggtgaggttaagtatttatacaaaggaatgcttgttccaggttatttataatagcaaaaataaaagagtatattctagattatttcccccatgttgaaataatttttaaaagtatagtgtattcagaggacagaatattatacaggcagtaaaaatgtaattttaagtgtcctatttggaagaaataaaaacatataaataaagaagcctggagacatcctacatctgataacatggcagactaaatagttgggctgattcgtctgccaaaaacaacagaaatgataaaataaataataaaatctaaagatatcaggtaacaaaatagtaatgaattataagataacatcaaagtaaagaataatacctagagaaatcatcttgcagagatttgattttttaaaactatgcctaaagtttactcaaggaagagcatctgataagagagctttccccccataaaccaaggactgcaaaagtgtggattatcagaagagatccggtacattcagggtggtatggccatagacaagggctgggttatcaatgtaagggtgagagataagtctcctctcccgtacccctaccaccaggagccagcaaggcaatttgtcttagtgccacgctggacaaccacaaaaccacaaagatttgtggttgagaagttgcaaccacaaatcacccctcaatatttgcagcccaaattcatattactattatagcatggttcaaaaatcctcaaattataaatttggtttacaatgaccttggactggtgatgctgacaagaaaaaaatttacatggaagaaaaacaatatcaaccctctctagataaattcactttatcctggaactcaaagaaatttcacaaaaatgtttccaaggaaaatgagcagcctgtcacacaaggaaacaaggtactgtggtatgttcgaggaaggtatgtttgaggaatgcccccaattaatgtcctggggacattatttaatgctctagggacattatataatgtccccagaactcataaatcaataagaaagagataaacagcttaatagaaacacaaagaaaagtccgttcacagaaaagggaaggcaagaagttaatgaaagtaggaataatgactgacctcacttataatgaagaacatgcaaattaaaaaatgaggtaacatttacttcacctgtcaattggcaaaaattaaagctggataatggcagagatgatgagatatgggaaatggatgctgttaggtactgctggtggaagtggcaccatcaaaaacagtggaaatagcagatcacagaaagatatctgaggggacttcagatctcagaattatcaggctcaactatatttactatgtacaaagaaaagcttaaacatatcggtaaattcttttaaaagatcgatctagaatatttggaaaaaatcaaatagaaattctagaaatggaaaaaatatattaattaaaacaaaaatatgggtggccaagtggggaggattgctcgagcccaggagtttaagactagcctgggcaacatagtgagaccctgtccttacaaaacattttttaaagattagctgggtgtggtggctcatgcctgtagtcccagctatttgggaagctgaggtggattgcttgaacccaggagttggaagctgtagtgagctatgatagcaccgctgtactccagcctaggtgacacagcaagacctcgtctcttaaaaaacaaaacaaaacaaaacaaaaaaacaacaactgtggattttgtagcacattagaaacagctgaaaagtggattattaataaaaaggtgaagacataaacccaagtcaaatatgggcagacaagaaaaatatgaaagtgggacagagacatggaggataaagtgagatggtctaacacctatgttatattctaggagttcatttactctataagtgtatatttttagcaaatattgtaccagacactttgcaaagtgctggagaagagtaagacaagagggtttcctgtttcctgagtggattctggagtaacactgggccacccagttgagacagactgccttcaggctggacgcggtggcttgcgcctgcagtcctagcactttgggaggccaaggggggaagatcgcttgagtccagaagttggagaccagattgggcaacatagagagatccccctctctgcaaaaaattgaaaaaaagtcccagctacccaggagactgaggtgggaggattgcttgaactcagggcttcgaggttgcagtgagctatgatctcaccactgcactccatcctgggagacagaacaagacttctctctctctttctcaaaaaacacaaacaaacaaacaaacaaaaaccccccacaaaaaacagctccgatgctggctcctccaggaagccttccctgactacacatacacacacgcacgcacactacccggggtcaggagcctcttaagtgagccggttagatccagtgcgccccctatctcctctgcccctacgcctcgcgcaaggccctcgcagccggaatagtcgcgcattgaccgactggactctaaagccccttggggcaggtgctgtgtccagtagtgtatctggcgatgcaccgagtcctttccacggagggcaagcaggtgaaatggcacggaagtggaaggggcctagccacagagcgcctcgagctgggcagtcaatcctggggaagccctggtggtcttcgcctcgccgggttcggaacagcaggctgggatcagcaaccatcgagacgcatccgccgagacctccgagcatcctagagaggacacggaagcgagtctttccttacgcacctgtctaacagcgtccgcagctcacttccggaccgcggatagcactggcgaccctagcgggtgagaggcccttcagggccgcggcgggtgagagcctcttcagggccgcagcgggtggcgggcgaagtggtaaacgggcgcggggacgggttttggtgccgctacggggctcggcggcagcggggttgcagtagagcccgtctccctccgctcagccccggctgagggcggcaagtctctcaggagctgccttcagcggccccgaggccctgcgggtctggacgctgaggggccgccgcgctgtaggctcaggtaggagcgaggctgatcccgctctgccaggcttggcttagtgcagggctggccacgaacccgaagagatcttgaaccaaagcagaactctgtgcaaagtgaaagtaatcacataggacacttatttaaagaatagtgatgagccagcctggtcaacatagcgagaccctgtctctacaaaaattgaaaagtagccgggcgtggtggcacgcgcctgaggtcccagctactcgggaggctgaggcaggaggatcgcctgagcccaggagttcaaggttgcactgacttacattcatgccgctgcactccagcctgggcaacatggggagaccctgtctctacaaaaataaataattagctggtcatggtggcactcgccagtagtcccagctactcgggaggctgaggtgggaggatcgcttgatcctaggaggcaaaggctgcagtgatcgcaccactggtctccagctggggtgataaaaccctgagatcctgtctcagaaacaaaacaaaagagtcacaatgggtggggggagataaagaatagcaatggggcaatttctatttgtcaaatggcagagataaaagatgaatgaggatctttcttgcctccagggaatctgttagagggagacacatgggtaaacatttgcactgtagtgcattaaatgcactagtggagtgaaccaatgcaatagctagaaaggaatgaaagagaaatctcaatgttgcagagtcaatgaatagactgaaaatataaacttggtttaagtgggggtagataaatacacaaactcacaatagaatatttagcagaagctttggggtgtgcctcctgccagctgcccattctctgctccagtcaggtgatctttccgttttctgacaagcaggatctccttcccctggtgctttggacttccaagtctgtcttcccagtctaggtcttccgcataatccacttggaggtaaataggactcattctccagtctacttcaagcctcttcttttccttgagtacttggacttagattagttttctctctttttgacttcacatttttttttcaatctgtaccatgtattttgggaggcagttatcatctagtctcttttttttcttctgagaagtaggaggagtagcactcatcctacagaagtgttttaagtattagatgaaatatgtgttcacatgctttctaaagagtaaagcctgtacaagttagaaatctttaggtcatttgtcataatggtatatatgttgctccattgtctttttcaggttgagcgcaccatcacatctaagccatcagcaagtttgttggttttaatctccaaaatacgtcttgattttgtctgactctttgccaccaccctgatctaagcccttatcatctgcttgaatcactgtaagtgccatttccctcttgccacctctagcctattccctgtcaacacacaggcagaatgacttttataaaacatgtagttcctcgctaaagtaagaaataagaataaagttcataattctttctgtggcgcaggctctgggtgatctggtttctgtctgcctctgccacctcttctggtgcagctctgctcgtcactgctgaagccacmctgggatatggcttgttcttggacacccagagtaatttcttagcctcagggcttttgcctggaatgctcttagaatgactgactcattctcatccttgagtcagcctggtatcatgtctttagaaaagccttcttcaagtcagttgccccctgttaacagagcaccctacttattttctttctagaacttgtctccacttgcagtttttaaaagagttgcttccatttgactttttctgtctgctgtaccagcatatgagtttcaggagggtaagctcccagtgtgtcttgttttctattttatttgttgtttctgcctgcctcttgtgtgtgtatatgtgtgtgtttgtgtgttgcatgtatgtttcctttagtattggaagagtaggccctggtgactcacccagttataacccattatatattattctctgattgtagtgttattctccagtgagatcctaagttatttgtgggtataaaagcaaaatcttagacattttctgtttagtctctgtacctaatagttgcttagyaaatgattactatgttgaattgacctgacttttgggatctgtgttcagtcttttgaaaatgccttgtaaaaggtaattactgtgttctccagtggaatattccttgatgtagagacagaactgggatgggctgacctttcatgtgtctcttgttctcaaaagggtcattgatgcagtcattctcagtctcctcggagggagtctgaagatgcttaaagagcatccagagatggcggaagctcctcagcagcagttgggtattcctgtggtgaaactggagaaagagttgccatggggcagaggaagggaggaccctagtccagagacttttcggctgaggtttcggcagttccgctaccaggaggcagctggaccccaggaagctcttagggagctccaggarctctgtcgtcggtggctgaggcccgagttgcacaccaaggagcagatcctggagctgctggtgctggagcagttcctcactatcctgccccgygagttctacgcctggatccgggagcatggcccagagagtggcaaggccctggccgccatggtggaggacctgacagaaagagcactggaggccaaggcggtgggtgaggaggggatccaggtctggcgcccttggcgtgggcagggaatgttaaagaatccaaagatttgaggaagcagtaggagtggacgaggtgtggagccgccctcctctgccctcagactccctgaggttctttttggagagcagtggcgttttcagcaagaaaggccattcccaggggagatgctgccatgcagaagggcctgaagcctctgtttggtcatgagggcagaggcctggccatatttcccttgtgggcatcaggcaaaaagaaggcagttgtgattgtttttggggtccctcatagacctgaccctgctttggacagagatgcctctgggaaggcagagaatcccacctggggaatatttttccggaaaagggttgtccatggcagtactgtttctctgtggctcatagggctcctgtaacaattctctggtgctgctctaatgacaccaagtgatttggcaccgcacgtgcttccttgaggttccagccatatttcggtcactttgtggtacagccccctgatggatgactgggaaaggagagcaggactgatgacaccgtcttgctcacaagcccccgtccttctgtagttcagcctcccgtgcacactctcgtcaccctgacttcctgtcttcagaatcctaagagaattttttcctactcaactcaggagcttaaaagtggacccagaaatgccttgtttttgtgagtacttctcagtgagagagtcctcctgatttttcttgctctttttaatttattatttttgagacagggtcagtcaacagcctaggctggagtgcagtggcacaatcctagcttactgcagccttgagctcctggctcagttgatcctcccacctcagcctcctgagtagctgagaccacaggcatgcatgcctggctaatttttttattttttgtagagatggagtctcgccatgttgcccaggcttcctggctctctttaaagcaactatttctcactggcctgttcactgcagggtctaggctttgcattttttattttcagctttttcaattaggaatttttttttctagtagtgagtatattgtgttaaaatcctcagcaggataatatttgggcttggtgatggcaggtagaggggacccttgtcaaatggcgtggacagataaaagttgctcagggcctgatgcatgagtttagcttccttttcacttcctcactaatgtcctggggaagagctcarctgatttttccttcctctcccctgmagctggaatggttcttttcttggttctctttttagattttagttcaactcccttcataacagccttgcccaggcctcattctaatcggtgttgggaactgttcttaggttccatgccacaggcagggagagcaggaggaaacagcactttgcagaggcgcttgggagccaggcatccagctggggccagtggaggtcaagcctgaatgggggatgccccctggggaaggagttcaaggtccagacccaggtaccgaggagcagctcagtcaggaccctggagatgagacacgggccttccaggagcaaggtgagtaagacgcagatagtggggatgtcaggtcataggaaacagtgctgtgcagccaactctcttcagaaacccagcaatggagcaactaagttacccacgaggtgtaattgtgaattttcttggctacttcctccaccttaggaaatagatgaagtgaaattgtttcttctccctttaccctctggtgtctggaggggatatctgggatcatgctttcttattatttctcttttctttccctcagatcccttctagaaactaccaagaaatattcagctgacttgcaggaatactttttcagtaggcagataaaccatatcccccaaagtaatatgtagctttctttctttctttctttcttttttgagatggggtctcactctgtcacccaggttggagtgcagtggcgcgatctcagctcactgcaacctttgcctcctgggttgaagcaattctcctgcttcagcctcccaagtagctgggcctacaggcatgtgccaccatgccctgttaatttttttgtatttttagtggagacggggtttcaccatgttagccaggatggtctcgatctcctgacctcgtgatctgtccacctcagcctcccaaagtgctgggattacaggcatgagccaccgcgcccagcccacgtagctttattttgktattgaatctcataggaggttattcccagagtgtgactgggtagcatgggtagccctggacggacagggccgggacaatcttgccagctgagaacaggagacacccaggccccagctgagaatagggcaagggacacccaggcccctgtgcatgggaaagtgtggtaccagagtgaaaagggattctgtctggagtcttctggttcctgaggttgtgmgcatctggtagggsacacatttgaacgagctaacagcataacatcactgatccttctgatctttctcatgctttttgtccctgctcagcactacctgttctgcaggcgggtcctggcctccccgcagtgaatcccagagaccaagagatggcagctgggttctttactgctggatcgcaggtgagctctgactccctttgcagaaatcatgaccgttgctttgattgaggttcaccttccccaaggtttctctgcacaacagtgttcccttcccrccccaagttgagtcattctcccttcctagtcccggtggacctgatggtgtggtttcctccactgaaccatcagccgcagttgttaatttacatcgaaccttatgtctgtcgcccaggctggagtgcagtggcacggtcttggctcactgcaggctccgcctcctgggttcacatcattctcctgcctcagcctcccaagcagctgggactacaggcacctgccacctcgcctggctaattttttgtatttttagtagagacggggtttcaccgtgttagccaggatggtctcgatctcctgatcttgtgatccacccacttcggcctcccaaagtgctgggattacaggcatgagccaccgcgcccagccacagatggactcttacaactgttacagatagaaaccccctagggctatctaggctgtgctgattggccccgagataaccctttgtgggtgccgtttatgggtacttctgctgctgatttttctgttttggaaactttcctgtcccctaacctcagcaggaatgtggctgactcagggttggggctttcagaagcattgagcagggtggtctctttggccatacaggccacactaggagttggacctcgttaacattactcatctgccacaaatgaggtaactgaagcatagatggggtgctctcttttccacagggtgctgagcactagtagcagggaggtgggggctttccagtggggcaccttcctcaaggaggcgagtctaaaagagttctttgaagaagaaaaggtgtttggcagaaaaaagaaggggatcaagtctggtcctgctcaagccgtatttgggcaaggctggatgccagcatcatttcccttttcctgttctccaaggatgtactttggaggggatgaggaatgacatcagtgctttttaatttggttggatcctcccttgtaccataatagttcttcgtggtgcagtgagtgagaaattgaggatgcatttattttatcacagccttgttcttaagacagggcttggccgaatgtgaactttgttcttgatgagaaggtaaatagcggctgccaggctctgtcaagcatgaggtgtgagtgggaggmtgctgcagagtggaaatgaggtgacttagttgttaggggcaagctgagccccagccacagaggctcacaactgcagtggctcaaacaagtggattactcccattcaactgttgggaggaagctggttgggaggaagttggattacagacatgagccactgtctctggcctaggattctttctttattcatagcaatctcctattgttgcaggggttggggccatttaaagatatggccctggccttccctgaggaggagtggaggcatgtgaccccagcccagatagactgctttggggagtatgtggaaccgcaggactgcagggtctctccaggtaagactgtctccacccacaggtgaggaactggggagttctgaaagctcaggtcaggggtcctgccgtagctctggcrctcctggcaaaggaaggggacttcatggcaggcgggtaaatgggtccagcacggaccatggggcacgaggagctgctttcctgtgtcaatagaggagccaaatgatggagcaggaaaacatgaggccattattctggctgtatggagacaggtcggtcatgaggacccccaaacacctacattgtgtccatgattaaagacactgagggcttgagaacaagatacgaacagcaaaagatggggcatctgagcttgttcagatatttattgagtgctccctgcatgtgggccctgtgttagtggttttctcttgcggcaggaagtgggcaggactaacgtgcacgaaagcgttggagctcacggtgtgcacgtaggagggcacgagggggcttcgcgatgggagaggttggagtggcccgagtcacagaggaagcagagctgcgctgggactcaggtggtggctgggtttgacctgggctcagagcctggggggatgcggccattgtgtgtgacagcagctcatgggaggaggagcagcgagagagagcccacaggggctgccagcagagcgcactgcggggctttggggctgccagggcaagggacagtatggagagtctgcatgcgtggaatcaggatgccggcggggagaggaaacactgtggctggagcggcctgtccttgttctttgattttcttcttttttgtttcataacttctttgtgagttgtacactgaccacccatctgtacygaccccacctagcctttccttatcctgaaatgccttgaaggaagagcaagattatccctgtgcttccttcaggacgtaagagaatccatcctgcccctccacttgctgaccctgaccttgagcatctcccttgagctttccaggtctcagtttcctytgttgtggaatggggctgttcatggaacctgtcctcatggtgccatgaggatgaagggaggtgacatatctaaatgtgtggtgaccatggtagtgttagattgtttagttagtgctgtaagtattactaagggattcttgtaggagccctcagccttcactcatttattcaccacagaggtggacttggctctgtggccattgctgttctggtcactatgaagagttaaaaataaaggcgcttgcctgtggggtcttagagttcaggggaagaggccatgtgcatgtaatagtgggatacggtaaggggcactggtctcctgggagacctgggtccagggcacggttgacacagtgtggcagtgatgcaagtggcagaaagatgtcagcatactttatgtggagatgtgtgattgctgtaacggcagaggatgacagaacaaagcaggggctcgagtgatgagccccagacaaaggtgccagtgtcctggtgccagggtccccctcagggatattcccctcccagtgatgctgctgtgtggggtgaggagcccctcgcccccattctcagaagattttcatgctctcctggccatttctgactgttctggagactggttctgtccttgtcccctcaccagctcagtgtctcagaactcagagcaactcaagcccatacctgaacatttctgccgccaggtgacacgaaggcctgtttcccaagtgtaccattcacttgctgtcccagctttcaggtcttcctgggattcacactcgggttgtcctggtgcttgtactgacagctgcttggggctgggcctgagctgcttcacctgtaaagagactgaatgcacagggcagggttgagctaggtggctgcccagatcacttccagttgttcgtctgttctcattagcagacggtgaggtgcagaccttgttgtctggrttgtaattgcagtaatgtccacaaggactggagcaagaactcacaacaggatttggaatcacagaggcaaaaagtagcaggtgcagaaacctgaatgcaggactctgcaggctggttcccaggatggtgagggtcctggagtgaaagatgagtgctcagaggagtaaggaggaggcaggagtgagtagagtgaggccgctgaggagtccgtgaggactcygggtccttgtttaaaaattttttctgcgcagagtaatgtgatggaggttttacttgaggaaaattggattgacggcagggtacggccagtctggagggttgaaatagtgtaggcactggggtaagagcaggaaccaggccagtggtcatgtagaagggggtttactgaaatatgcttccaaggatgggccacagattggccagaggggaggaaagagaagagtcagagaggagtctacgtcttaggatcctggctaagggcctggaaaaattatgttactactgtcagaaagagagggaagcattttcctaagagggaggaagaatggaaagttccatttgttgactttgagatctaagtggatggtccctggaagtagctgcaagtcaggtacatggtctgggagttaaaataatatcatgaaccattgcattcctgctccatgtgtgcagtaaacttcatgagtgtacaatccattttgaaggtggtgaatgtaaggctcagagaggttaattgattttcccatgatcacacagcaattgagcagccagtgcagcactcaaaacgggtttctcactgctaggtcccttctcttccactactgtgtctttctcccagtgtctctgtttatacttaggtatcattgtatttatttttcccccagctttatattttgaactcttattatacaaattttcaaacatacagaaaagctaagactagtacagggaacacacttaggtctttatctacattcaccaattgttaacatttgccatatttagctgtataatgtgtgttttgttttggaatgatatggaagttggaggcatctcaatctttcatttgtaaatacttcagcatttgtctaacaatgacattcccaacatagcccagtagcataatttcatctaagaaaataaacataaattcgatatatgtaacatctagtgcatagtcagctttccccaagatctagttgtggtttgtgcattgcatttagttttaatcttactattcataacacctcaaaactgaaaactacccaaatgaacaacagtcaaattaataagtaggttgcagtctatctgtatctgtatatctatctatatatacatacacacacacacatacatatactcagtggaatactgtataccaatgaaaaagaataaactacagcttcacaccatgatataggtgaacgtcacaaacatgatattgagtagaagaagccagaaacaatgtgtgagacaattacctgaagttcaagaacaggcaaaaaagtccagacaatgtgttcccgttggtatagtatatatgtatactatatacgtatatcatgtatatgctgtatacgtatatctcgtatatgctgtatacgtatatctcgtatatgctgtatacgtatatcgtatatgctgtatacgtatatctcgtatatgctgtatatgtatattgtatatactgtatacatgtatatgctgtatatgtatatactgtatatgtatagtatatatatgcagggtatagtgatggaggagatgtaaaaggggcttctagggactggttatgttctgtttgttgaactgaatgctgtttacgtggttgggttcgttaagaaaattctttgcatagtgtgtggtgacgcacacctgtaatcccagcactcagtgaggcagaggcaggagggtcacttgagcccaggaattcgagaccagcctgggcaacatagtgaggcccccatctccacaaaaaggaaaaaaagggtaacgtgacattttttagccagcgctggatccaaaaaaataaaaataaaatctttgcgtgtacaaaacataaatggcttgtacacttttattttcatgaaaagtttacaaaacaaaatccaagctgataagtatgtatttcatattttatcaaaccaggaggcatatactgtcaggttttttttgtcttctagtcatcttgcctaaaaggactcttccgctttaagcaccacttatttctccttttctttttttctctttgcctctttgttccccaataccttttcttttctttttttctcctcccctttctgttactcttccataaacacctgttccgttaatttagagagaatataagaaggatcagagtgaggatgaaggaagggtgaagctgagcatttcagcagcgtcatggtctcagtcctgataaatatgctacctaggggcgttctcctgcaggagcctcagtgaagcctgcttcattcattcagccagcagttagcaagcatcttccctgagtcagtcccctgccaggctcctaggagacccagatgaatgaacctggttaggcagagggagcatgtgggcaggacaggggactgagcaggcacctggaaggtctggagagctgtgtgctgccctgtgctacagcaggtgtagaatcgtttggggaaggcgcaggacatctggatgaatggaaacagcatttccaacaaagtcacatgtaaataggtacagaataataaagtgctagttaggtgcacagtgctgaagaggcccagagtaagagaataatcgtggtgagtgtcttagaggaaattattgagctacattttgtaagaagtaaaggtctagattagcagcaagataagtgggcgggcactggaatttggcagactattctgtaaaaagacatggaggtggaaataaggaaaaagaagtaaggaaagcctgagttgaggttgttggtcaaaggaaaaaagagaaggaaccatgaatgggacccctgtgaagcagagttctaacatgtaaatgtcctgcggctaccacagaatcaatctttatctcctcctgtcctgtaggcggtgggagcaaggaaaaggaggcaaaacccccacaggaagacctgaaaggggcgctggtggcactgacatcagagaggtttggggaagcctctctccagggccctgggctcggaagggtctgtgagcaggagcctggtggccctgcaggcagtgcgcctgggcttcctcctccccagcacggtgccatccccctgcctgacgaagtcaaaacccacagctccttctggaagcctttccagtgccctgagtgtgggaaaggattcagtcggagctccaatctcgtcaggcaccagcgaacccacgaagagaagtcttatggctgtgtggagtgtgggaagggctttaccctgagagartacctgatgaagcaccagagaacccacctgggaaagaggccctacgtgtgcagcgagtgctggaaaaccttcagccagagacaccacctggaggtgcaccagcgcagccacactggggagaagccctacaagtgcggggactgctggaagagcttcagccgcaggcagcacctgcaggtgcaccggaggacgcacaccggggagaagccctacacctgcgagtgtggcaagagcttcagcaggaatgccaatctggcggtgcaccggcgtgcccacactggcgagaagccatatgggtgccaggtgtgcgggaagcggttcagcaaaggggagcggctggtccgacaccagagaatccatacaggggagaagccctaccactgtcctgcctgcgggcgaagcttcaaccagaggtccatcctcaaccggcaccagaagacccagcaccgccaggagccgctggtgcagtgagcatagcaggtggcaggcagcaccatcattcatctttctcactgcagggccttgcggggtgcaaggtgatggctgcaggaaagcactggtcccatcgccttcccacccattcgccaacgcgggaaaggcaaggcctggcttacttagagcttccagagagcatagctgcttccatctcttacccaagtggtgctaaacaatttttcttccaatgtttgagggaagcagtctcctgcggttcagttcaggctgagattttctccttcagtggactgtctgtgtccccctgccgaacaaagctgggagtaaaggcaaaaccttgacacgtgttggtagctgggacctcatcttcctgagggctctgtcttgcctgcagggtcatagctcagactcttcccccaccccctctcttttccattgaacaaacatttattgaacatcctctgagcacctggccgtgggaatgccgtggtgaatgagagactagacgtgatgcctctgggggttgtgcgttggggatgcatgcgacagcccatgacccgaggcattctcagggtatctgtgctgtgtgcccgtgagaacatcttcccatgaccactcctgccctcctgccccgtgctggatcttccctccccagctgggatctgctcccaggcaactgtgtgaattttacattatttggagcctcatctgtgtcaggctataacattctatcctcatctgtaaaacttccccgtccattattccttgcactataacaactgtcaacacaccaactattaggaagttagtattttgctattgatcactgaataaacatcagagtattttaaaaaacagttctctagaaagaactgttataattaaaatgagtctgaaagatgaactctagtattaatgccctatatttgatggcactttatagttcataaaattaatttcaccccattctcattggacccatttcccaagtatttattgaggccctgtaacaaacatgtcaggaactcttctgggtgcttgagacacatccatgaataaaatagggggagaagctgttgacctcgtagagcttatgtctcgtggatgtacctgatcttcagaacccgtggatattcctgcaaatcctctgggcctgtattcattgctttgtcagcatcttgccctgaaatgcatttgtcacctacctcttgttactaaatggtctctgccctccagacccttgtcatccaaggcactaggggtcctggacacccactggggatgatgagctggtagcgacctgttttgcatgagtgccaagtcaggaaaaataaagatatttgtaggcattaaaaaaaaatacatttctttaaaaatgagaagatgcaatatttgtaaactgttgaagcttccttattgtgccatcacttaagggtttcatttctgtttaaagttctggaagctgcataactagcgtggactgactgctgtgtcattgtgctgtgcctttgaaccctggctgagtgagtgagtttgtcctttgttgatagtgtcctataattgcaaaatgtggtttgtcttctgatgcctcttaataccagattcttttactgagatttttttttttcattttccattgtaaataaggtaaatggtaatgactaacacaaagctgtattactcagcccactttgaaacgtggttttatcacctgttcttgttaggcagcatggtgtctaattttggcttagcaaatgacgctccttggtcttcctggctcattagctgtgcccacgaggctgcactgacygggtcgtaaatgtatctgagatgtccacacggggctgctgctgctcctctgtaatactgaggtccacatgcaaaatcagctttttttcccccgtaattatcagagcagctaggcagggctgacagccaggcagactcagtgggaggcttctggcctgagtgtggccttccccagagggtggttttccaaaggcaggtggggactggggaggcctcggggggctgcttgtcattacctgaatcacagatgctcttttgtcatacacagccagcattcctctgggtttcagcaagttggcatatcttaagcttcagaaggagctgggccttgctsactttcctatctggcctcttccctatctcctgtggggccaagagcttaggacagtgtctcagaaaagcctmtaagtagggggtttttcccatgggattgtggtagtctgatttttcatatctattcaaatgttaagaaatattttgttttctgtatttttctattctttagaaatttttttataatagataatttcaaacctatataaataaatccttatgtatttatcatttgactttattataaactcataatcaatcttgtttcatctctgtccactccttcctccccgtcttcctcccccactgaagtttcgaagtgtatcccaagtgttgtttataaccatttcagtgtgtacctgtaaaaggtaagggcggctgggtgtggtggcttacacctgtgatcccaccactttgggaggccaaggtgggattgcttgagaggagttcgagaccagcctgagcaacatagtgagacctcatctacaaacaaatattaactgggcatgggtggtgcatgcctgtggtcccagctattcaggaggctgaggctgggcatcacttgaccccaagaggttgaggttgcagtgagccctgattgtgccattgcactccagcctgggagacagagcaagaccctgtctcaaaacaaaacagttccttaatgtcaaaatatccagtgaattttaagaacccacctaatttttcaatataatataatttgttgctttgtctcttaaggcttataatctgtagtacttatccttttcttcttgagatttattcattttaaaaaactcgatcatttatcctggagagttttttacattctgcattttctgttgttttttttttttttgagctggagtctcgctctgttgcccaggctggagtgcagtggcacagtctcagctcaccgcaacctccctgtcccgggttcaagcgattctcctgcctcagcctcccaagtagctgggattacaggcatgtgccaccatgcccagctaatcattctgcattttctgtttgcatacccatggcgtgatttaacatatttccctgccttctgtattatctaaaaatgtagaagtgtttagtggtgtaatcagattcatatttcacattttggcaagaacacattatagattgtgacatgccctgtttctcttcatatgattttagaagcctagatctgcttctttcgttagttctgtaaatgcttcatcatttagtagttggaatattgtaagaaatttcccttcattaacttaggttacccttagatatagttcatacagggaaggcaagaaaatgcttgatcctcctctttatttgcctgttttcagaataatgagctagttactttttgcttcctgtaaaggcagtcaagtctgtagaaatcaatgcattcatagctttttgcttttattggtttttttgagacagagtcttgctctgtcacccaggctggaatgcagtggtgcaaytgtagttcactgcagcctcaaactgccaggctaaggtgctaccccttccttggccttgcaaagtattgagattacaggtgtgggccactgcacctggcctgcactcatggatttaaacatacttggtattgatcagtctgctggagttataatttgatgctcaaattatttcacctttgaccagtggaggcccctggaccttggctcctgaatccttttgacataaccctaattctcattgacagcttctttgctttctggcatgacaagatgttccaggcaaatgttccgtatttcctgccccttttgagagtgaaagtgggtgctatttattatgctgggacagtggtgtaaaccgggactctccaggtcaaacgggtatttggtcaactcatagatgggcctccttttgtatgacaaggcatctgtggttgcctcacattgtgatgatgctgtacaccttcagtgtctggctgcatgtgccgtgctgctgggtaatgagggaggctgttgtcctttgcaagagaaactctgttttctcccctgggtggtggtagaaccaggtaactgcctaaggtctgtcctggggaaatatttcatcaagaaagtttggtccatgtcatagtgtgtgctatgggtgttgtctgcaggctgattatgcttaaaatactttcagtacctgttttatcccagctgagaggcaaggagaacctttgtttcttaaaaaataagctggtttcagccaggtgcggtggctcacgcctgtaatcccagctctttgggaggccgaggcgggcggatcacctgaagccaggagttcgagaccagcctggacaacatggtgagaccttgtctttattaaaaatgcaaaaatttggccaggcgcggtggctcacgcctgtaatcccagcactttgggagtccgaggcaggtggatcacaaggtcaggagattgagaccatcctggttaacacagtgaaaccccatctctactaaaaatatataaaaaaacaaaattagctgggcatggtggtgggcacctgtagtcctagctacttgggagcctgaggcaggagaatggtgtgaacccgggaggcggagcttgcagtgagccgagatcgcaccactgcactgcagcctgggggacagagtgagactccgtctcaaaaacaaaacaaaacaaaattagccaagcgtggtggcaggcgcctgaggcaggagaatcacttgaacccggggggcggaggttgcagtgagccgagatcatgccactgcactccagcctgggtgacagagcgagactctgtctcaatagtaataataataataataagctggtttcaagtcccctccctctgtacagtacagattgacttaatccacttctgagacagggaaaatgacaggtagcaacatgtttctgtagcaggtacttgctcttaaactttgccagggtttctcaacccctgcactgttaacattttgtgccagataattctctgttggcagctgtcctggttggtttttttttttttcactgtgtaattcctttattttctgcatattagtgctttactaacactacaaccataaagaacacagtttcaggtactgtactttttagtttggggcgatcatagtctacagactcatttacttatattaaacaagattaacctcattcaaaacatactgcagtttataaattcacataaatacagaaactgatgcaattaaacaacttcaggatcttattttttcaattcttagattataatttttttctgcaggctataattacctgctccagtcaccaatgattattgttcaatttaactacatcaattataaacctcttatatccttaaagaaaattttaagtgaaaattacaatttcttaccaaaaggtttagagttttccaaatttcaaatatttccttccccctcccccatttccagtcagacatttcaaataaactaaaaataaccacatctcacctgcaacattcaataatagcaatcacttgatgtataaaattttaactatgctcccagttattttaagacacaaaaaagtggctgcctaccaatctgtcttcacaagttagaaatactacattgaagatataacatgggctgggcgcggtggctcatgcctgtaatcccagcactttgggaggctgaggcgggcggatcacgaggtcaggagatcgagaccatcctggataacatggtgaaaccccgtgtctgctaaaaatacaaaaaattagccgggcgtggtggcgggcccctgtagtcccaactacttgggaggctgaggcaggagaatggcgtgaacccgggaggcagagcttgcagtgagtggagatcgcgccactgcactccagcctgggcaacagagcgagactccatctcaaaaaaaaaaaaaaaaaaaaaaaagatttaacatgagggtttcaagtttcctccggtttaggcatttatacctttgtgcttgttttgtttcaggatgttactatagcattgatgttggataacccatatttatataccttaaaatgcaatcatttaaaacactaaggattacatttatggtggaactttgggaattttagaaagcaaccagtgttcttagatgtgtttattagccttatttctagaactatttctactaaagtgaaactgagaacttcgtactttagttgcatcttgaaatcaaaaatccctctgcaccaacaggagcctacatgagaataaccttttgcatctgctttaagtaaaatgtttgtcaagagttttactttaaatagttcattttttttatagtcttacacttctcatacgtctttggtaaaagctccattatacaatatggccaaagcgtgaaggaccaatactgtccaactataccaagatgtcccgcttaattttagttttcagacacactcataaacaaaacccactccaccttttcctgtatactgcctttgcagtctacatttcttaaattccctatttaattccttgaggatcactaaaattattccttaaggctatataggagccagatgctgctttacaattctgcatcaagcattaacatttggttcaaaatattatcatagtggttgcaatccagttactggtcctagccagctaaccaagtaatcttgttaggatctagatatcatcagcgagcacactgcttacacatgaagaaaaattaagtttacattcattgtaatctgtaggttctttgtcctcatcctccatccactttaatagtccatccctcaagtctacacatcattcattcatcatgcttccttccttaaaggagacagtgtactattgaaccaacagggtatcttttttattatttgcatgagttaatcctacaaacaaaattaaataccttttttataaaacatatttttcagtgttctaattgatggaggtgtggatcacacatctataaaaaatgacttatagcttcagcttaatcagttgctataatgtgaaaacaggaatgtgtatttttttcaactaggtaaaaggtgcatataatttgaatggttacatgctttattaatgaacaaagtaaacctgttagtaatttttaaattactggtcttaggcgtttgtaacaaggtaaaagtatacattctagttttgcccaaaagtcacttaaaatatctacaaatatttaatctatgtgtggtgtaccccattattgctccaatttctgggaagagtgtttttttaaagtttaaaaaagaggaaaaacagcaaagtgactactttgcagtggaaaaaaaaagtgtgtccttcatgggttacactttcatatttttatgcagtgttaagttagctacgttatggggaacttgggttttattcctgctcgtgcatgatgtatgtttcagaacttatttgctgacatttcagagaacttcttacattacctgtttaacatactgaggtgcaactggaacatattacaatgatattactcatcatttgccactgtgggctaagtttactatactggtcttagatataaaaggtcacatttgaaattactaagttagaactcataagaaaggggggaaaggccttaaatataaaagacaaatgacagtttgattaagcaataattttcagtttactagatgaaacagacttgcaacatagtctgcatgaatgcaaaataagccatctacagcaagtgataaggaaactggacaaaaaaggaaaaaagcatacacaggaaaatgaaagattctctcgaaataaaaaaaatcaattattacaaaggactttaccaagaactgctgtatatcccccatcccatctgctggaagtcaacaagagcatctagcaactttgtgttcatgtcaaatctcagagcatcctaacgcaaagccgaaaaaggaaaaagaacgggaaacagaagacccccaagccctctccccccaaactgtagaacagtaactccagagttcaaattcaaaagaaaagtggcaattgaaagaggagatggtggcgataatcctgtgaatgggtttttgatttctctccttccaggggatgggtggagaatgctcattaagatttgtagttagaggttaaccatgtgagcccctcacagagtccgtcccctgaggtggcacaggagggctgcccataccagttcctgtcctgaatccaggtcaggcccagtttctcctggatcttgtggggtttcatggcatcgggcaggtcctgcttgttggtgaagatgaggattatggcatccctcatctcccggtcatygataatgtggtgcagctcctggcaagcctcatcggtgcggtggcagtcggcacagtccactacgaagatcagaccttgggtcccagtgtagttatgccgcgagagcgcggatcttgtcctggccacccacatcccatatgttgaacttgacatttttgtaagtcactgtctccacgttgaaacccacagtgggaattgtggtcaccgactggcccagcttcaacatttacaggattgttgtcttgccggccgcatccaggcgcaacatgaggatccacatttccttgttcccgaagattttgcatagcactttccccatcgcgtcagagaagctggggccaggggcattcaggtgtcctgggtcccctcagccaacaacgccgccgccgctgcgaaactgaaacgaaggctcccagcctttgcggcctgcctgggagttgtctcctaagggcagaggcccaggcctgtcgctcactcgggcatcaccgaccgcacaacttgattcctccagtcgccgctgccacctggggccggagtctgcgctgggagccgccgtcctgctgaggcacggcccggctgtcctggttgttttatgcattgtaggatatttagcagcaatcctggcctcaacctaccagatgccagtagcacctgccggctgtaacaatcaaagatgtttctggaggaacaatttggctttcaggaagagcaaatagttggacgtcccctgggggaggcagaatcgactttagctgagaatcactgttcttagcattcaggataatatgtcaattagatattttagctattgagagaaggactggaactccatggactggacctgtttcctgcagagtttaaagtctccacctagttcctagaaaacaaaggagttttactagagatcacttgggggtaaaggtagtattgtcaagcagagtcaagagctgttgaagtctaatctcagggcaggggcctgcaattctgtatcaagcaaactaggtggtccctgtggaggcaccctggctccagcactgctgcttttggttcctgtcaggtaggtccctgccccaatgcctctgcatcacaaagagcctctgcttgggtgtagactaaccttcccttagcaagggccacttaagggcattgcagccaattacaggctctttactccataataggagacagtaaatatttgaatgaaagacctggatttctacctgtttcagcaattagaaggcactatggtgagagcagtttcagtggcatagtgggggaaagccagattccagtgggttgtagatttctcctgtgaattctaactcataacttacttaggctgggtgcagtagctcgcgtctgtaataccagcactttgggaggctgaggtgggaggatcacttgagcccaggagctcaagaccagcctgggcaacataatgagacccccatctctacaaaaagttgaaaaattagctgagcatagtggcatgcgtctgtagtcccagctactcaagaggttgaggtgggaggattgcttgagcccaggaggtcaaggctgcagtgagccaagattgtgtcactacacttcagccaaggtgacagagcaagacactgtctcaaacaaaaactacttaaaggtcaaataggcatctcatacatcacacactaaaccaaactcttcgttttcttcccaccctcaaaatctatttctcctttattgattgattgagatggagttttgctcttgttgcccaggctggagtgcaatggtgcgatcttggcttactgcaacctccgcctcccaggttcaagcagttctcctgtctcagcccccagagtagctgggattacaggcgcctgccgtagcctggctaatttttggtatttttagtagagacggggtttcaccatgttggtcaggctggtcttgaactcctgagctcaggtgatccatccgccttgccctcccaaagtgctgggattacaggcgtgagccaccgcacctggcctctcccttattttaatgaatgatatgattcctgctctcataccccacatccaaaccatcagcaaatcttgcttctcccatcataggcaatgatctctagctgtttgttgagccaccaattgcaattatactgaattcacttgccagaaattctccaagccaaataaattcacttgggcctctcacaattttgaattcctgtcctgcctgttttctgtaagatctcagggaaggatatacttccagagagccatcttgtccaacgcattcccaggatcaatatgttttgataaaaaaactccataaaaattggctatgaagccgggaaaacaggcaatattctttgtcactgagaatttaaactaatgggagagggaggatggaaatgcatgagtagtatatgtgttgtgccctgagaagcagagcgacttgggaggagcagtttggctttcaggaagagcaaatagttttgctgccacatacactagccgtagctctgttctatcatctgagtggccagagaccaggaaatggtagcaaacccaagagcttcatgttttcccttcctagtcaaaaagtgcagtctcttcagaaggtggtaggagagcttttagatagagattgggaggagagaggtggtagaatcttcgtttacctcctgtattagtctgttctcgtgctgctataaagagctgcctaagactgggtaatttataaaggagagaggtttaattgactcagttcctcagggatagggaggcctcaggaaacttacaatcatggttgaaggggatgcaaacatgtccttcttcatatggcagcaggaagaagtgctgaacaaagggggataagccccttacaaaacaatcagatcttgtgagaactcactatcatgagaacagcatgcgggtaaccacccccatgattcaattaccttccttcgggtccctcctacaacatgtggggattatggaaactataattcaagatgagatttgggtggggacacagccaaaccatatcacctcccatccttgactcctacctccaggagctatttgattccagggggttgtagatttctcccttgagttctaactcatattcacaactacctacttaaagatcaagtaggcatctcaaacttaccaccacaaaaccaaactcttcattctcctcccaccatccaaacctaattcttcctcatcttaatgaatggaccctctaatgccccagttgctcagtccaaaaagcctagatgtcactctcttataccctacatctaagccatcagcaaatcctgttggccctactttcaaaatattgacagagacggacaactcccactccctccaaggcttcaggtccaatccaccatcttctccctagactttgtcagctgtctccctgcttctactctttcctctgcatactctcttctctatccaagaaccagataatcttttaaaaatatagctaagatgattttacatgttgtttggaactttccaaaggtttctcctctcagaataacaaagtcctttcatacctgacagttcttcctgatcatgccaggcacgctcccagttttgttttcagctcctgttgttctccttgcctagaagctactttctcaagccctttacacaactttctccttctcttcatgtgagttcctgttttgagagaccttctctaactatctgtcatgtttttaaaacatatctgcaaattctttgacactcttttcaccaagagttagagtccagttcctctcctcttgaaactgaccaaagtgactcacttctaacaaattaaatgtgaaggcagtgatgcttagtcataagaggtgataggtgggatgcttgcccttggaacagagctgcaatgctgggaggaacctccaccacattgacaggctgcacagaggtattccagcaatagtcctcactgtggtcatagtggacacctagcaccaaccatcagtcaggtgagaaggaaccctccagatgactccagctccagtccctgtttgactggaaccatgtgagagaccctacagggaaactgccaagctcagcctagtcacccccagaaatatgaacgaaaataaatgcatgctattgtttttagccactaagtatgagtggtttaattacatagcaatagataattggaacacaacccttctacagtagcactccccatcagtctctattttcttacgtagatttatttttctttgtagcccttaccattatctgacgtattataaatttgtttttgtttcctgttctaccacatgccctggaacttcagctgtgtgaaagtagaaactttgctttttttgctgatatttcccccactacctagaatggtgcttggtacatactagtcactcaagctcagattgttttgttaaatggatgtacctgtggtctgtgatgtgaagaaggcatccaagttgaacagagacagtatgggcgtgaaagtattgtggaacttggaaaggaccacataggagatattattattattctcattattcttgaggatacttttacttccccattagtggtccttaataatgattttttaatgtaggtaatgaagttattttttctttttttcaaaaaagcaatttatttttgaagtagaaataaaaattctggtgtttataggatcgagtttacacttccaagtctgtaagagtgactaagcttctgaaccttttatggttgcattatgtgcaggatgagaaagggaatgtttctctccccatacccctaagcaagcagcctgcaggccaagaccggtgcccatctagaaaggcgtttgccataagagaagaatcatcttaccctatgtactccattggactttagaagcctgtgagccggaaagtctccttacaaaccagcatagagcaaggttaggtgaaggtctttcatgtttacccattgctgccccccctttttttttcatgttcatttttttttccatggggccaaatcattatattcttcaccattacagcaaatgcatattgaacatttcttcatagtgatgtcaactcttcatgtcattttcacagtcttgaggtgagattctgttgagttttttgtggttttatggccagagacccaggaaaggctgattcttgccctgccaatcatcccaaccccgatggcccaaggagcaacagcagatggggctctcagtcccactgtagtagtatctgagctgcacccagtaacctgcatcatagaggtcactggggaagggagttgtgagatcgtgtaggcttgcattgctcccccctctcagccccacatctgagttgaagacctgtgggttcaggcacactgtgcaggagggagattggagaccaaatgggaattccaagagatgcacaagcagaagactgttcagggccaggcaaaaaggaaggaagcttcatctcagatgctgaccctgtgaggcacaccacccttcataaaataggggccagtgagatcctggggctctgacaagcacacacttaattctttttctttggatgggatcaggatcaaggagacaaagggaatgggttaaggcaaaatctcttggagatggtcatcagtgttctttctccagtgtttgctgtcatcgtccttgtcatcattgtcaccgtcaccatcattagctatagcagcacacttgtactgagtcattgttttacaccaggtgctgtgatagattcttctgtggatggggttatttggataaacaggatcttttatacaacttaagaacaaacagtcctgtttggggtagcatttggggtgcacttgactgatgccaagcagagcatgaaaaggactgtcacagaatttgcattctggagaactctggaggggaaagaagaccctctcctggcctagggcactggaggcttcatgaagaacatgatatttgatctgagccttgaaggacaagtggaattttgtagatagaaatgggcaagttgggctgcctgaacagcatgagggggactaaaagcatggtgtctttggtaaatgagagggacttggactagaaggcagttgttgtgaccctctgagtaattctttttcctccgccacgccctttgcagcctattactgtaattgataggaagctgcatataattcctcccacatgaactcatttttatgaggcctttcttcatttgtttcctttcccaagtcaatgagtggagaagcacattcctagggattatgatagccgatttcctgcatgttcttcactcacagaaaagcaatgccagatctggtctcctttctttcctttccatgtatgtaacagacctttctttttttgaaaaaagagaacacatagtgggacaggttgaggtcagctcaggaggtcaggagggtcagacgtgagaccttcactgcagacactcctgatgcaagtgcctggagccacagaagcccacccagcaggagcaggatggctttgaggaggacgatcaagcctggccccagagctaggttcacttcagaatgtggggatggtctcactctgttgccaggctggagtgcaatggcgcgatcttggctcactgcaacctccgcctcctgggttcaagcgattctcgtgcctcagcctcccgagtagctgagattacaggtgagtgccaccacatgcagctaatttttgtatttttagtagagatggggtttcaccatgttggccaggatagtctcgatctcctgacctcgttatctgcccacctcggcttctgaaagtgctgggattacaggcgtgagccactatgctcagctgatctcgttcctttttatggctgcatagtatcccatggtgtatatgtaccacattttctttattcagtccgtaattgatgggtgtttaggttaatttcatatctttgctattgtgagtagtactgcagtgaacatatgtgtgcatgtgtctttatgatttatattcctctggatatatacccagtaatgggattgctgggccaaatggtatttctgtctttagatctttgaggaattgccacactattttccataatggttgaactaattcacactcccaccgacagtgtataagtgtttatttttctccacaaccttgccacacctgttattttttgactctttattaatagccattctgactggtgttagatggtatcttattgtggttttgatttgcacttctctagtaatcagtgatgttaagctttttttttatatgattgtcgtccacatgtatgtcttcttttgaaaaatgtctgttcatgtccattgcccattttttaatttttttttcttgtacatttaagttctttatagatgttggctattagacctttgttggatgtatagtttgcatttcttttccccagtctgtgttcttggcacctttgtcaaaaatgagttcactgtagatgtgtagatttgttactggggtctctattctgttccattggtctatgtgtctgtttttataccagtaccaggctgttttggttactatagctctgtagtatactttgaagtcaggtaaatgtgtttcctccagttttgttctttttgctgatgttagctttggctcttcttggtcttttgtgaatccatacaaattttaggattaaaaaaatatttctgtgaagaatgtcattggtattttgatagggattgcattgaatccatatattgctttgggtattgtgggcatttttaacaatattgattcttgaaatatataaacatggaatatctttctatgtttttgtgtcctcttcaatttctttcatcggtgttttatagttttcattgtagagatctttcacttctttgattaagttaattcctaggtatttaattttatttgtggctattgattttatttcagattgttccttgctggcatatagaagtgctaccaattttgtacgttgattttgtatcctgcaaatttactgaatttgtttatcagttctaatagttctttggtggagtctttaggtttttaaaatatcatttggaagtcatatggaaatatcatttagaaatcatttccaaataccatttagaaaccatttgagtgttttcttacttcctggcacaaaaagtgtcctgggctcatcttgaacatttttagtcctagccctggcatcagctatttctctaacgagctctggttcccttcagtggaaaatgatattcataagccaagatctaggcactaagtatactcattgctattgaaatgtcattgttatctagccctatcagtgaagtagggaatatatgttttatmcacacacacacacacacacacacacacacacacacacacatgcatgctcacacatacaaacacatatatttacatctaattatctatcaactatctattatctatctatcatctgtctatctatccatctatctatctagaaaagtatgaatgtacactgatacatccattccaatctaacaccataggattaatgctagctttctccctttctgaatctatgactcttttctgcaaaagtgacacacctagcttccagtatactttatttacttatgtgatcaatcccttctatgtagccaactctcacccatcccttcccactcagggataccctcctcacctcacgtgggttctccaggccctatttaggctctggctgctcttgaaggccacacctctgtgtggaccccttctctgattgcttgggctcccgcttccaggtcaggctgcccctccatgtggatgccttccccagcacacttggaatctgacttggagccaccatgactctcttgtccaccttaatgtgtggctaccacatggctgcaacccacctaatggctttagtattcagaaaaggagggaaaatgaaagaataaaaaaggaaaatgaatagtgcttttagacatgctgcccaatcaactgacgaattgacaattttttattcagtgttcattgcattaagacaattgggaggtgaagatggaatgcaagacgtataagaaaacatgtttcctgtgttccagaaatgtcaggggagatgtggtaaaaataataaatcataactaataatatgataagtgcttcgttgagtgttacaaaaaatatgttcttcaaagaaggcagaatgaaactatgaatattttctccaaacaatgggcaaagtcacagcagattaactctcacctatgttaataatcaaattggaattctgacaaaggccccacaccaacagtgattacaatgataaaaaatgtttatttgctggttttcagtcattcagttctatagatttctctttagtgtgcaggatggcatcagataatatttttgtaaaggggattttatcacttcgcttaatataaaacttatagaatattacaaataaaacgtgatataaatgtcactattagagtcatcatgataattcttatttttcttaaaagttatggatcaaattgttgagaaatatttattctctgatgagagctcaggaggagttgataatgctaactagaggtgggtagaggtagtcctatgagaagcagagaagctgagtctacctatctgtcacttacctggtcacctcctttatactacataatgcacaacactctacacagactctgggagagctcaatgaatgtacaaaatcaccaactactcatgcagtacattagattaagcccatctttatttcaaggttttattgactaagttgaaatctctggtgttctggggcacagctttcttgaagaccaaagtagaartccttagaataactcattctccacttagggttccatctsttgaatccacctttagaacaatgggtttttctggttgaagaagtccttgcgtgtctaatttcaaggggatctacaatagttaaacaagcatatggagaattaataaatgaagtgaaagaagaaaagatggaagcaaagtagaaaaaatatgacaaaaatgctttgcaagcatataaaaacgactcttaacaccatgtatcttgaactcttcatacttaatctataagctgggtaaatactggatagtaaaagcactcaccatccatcgtttaacaaaatatttatggagcactgactctgtgccaggcctgagacaaattcttgtggactcgtgtttttttttttttatttaaatcttaagttaaaaggatgagttttaaaaattaaatccagattagtaggtattatggcaaactattttggaagtgctatataaagttaaatttttataggttaaaacttgcaaggtaatcctgagtagctgttgtacagtttaattatgtgggcagttttcaacttccagagtctagtaacccttcccagttgaacccatcaagtgcaatgatgggaaatgtcttcagaaagaattattcttttctttttaacatctcctcttggcttccaagcgtagtgcaaacggggaatttctcaagttgtacagtgttttgactcatacttctagcactattgtcactgagtcaccccttcactgttgggggagccaccaacagagtaacattctgatctcagttcagtgaggggaaagcaaattgccatggatacaaagaagtgccagcctgagatgcctgagagcttgccagggaatatcttccctgtcccaggtgtgccagaggcccactttctctcagggctgagccccctgcctgaatacacacataggaaagctacacagctgccctgaagccatagataagatggcaaccatctccatcctcctcctctcccaagcacaaagtgtacttaaggggtagagttgcatattaaatacaccggtcctggaaataagacttataggctattgcttaatatgaatcaatgacatctgttctttaacttcttcagagaaaagattctaaatctttctttaaatgtatcacctggaacataaggtcaaggagtaaggatagccctgctctatggtagtccttcatatccaccagaaatgcctgaaattagtcattctccaccttggcttcacgtgagaactaatcaggggttcacccgacagcatgacagaacctagtcacgctctgggttaattagtttagaatttctgagatgtcacaggcatcatgaatttttgaagctccctggtgattccaatatacagctagtggttgagaaccactgtcatgagagagcttctgcaggttctggtgatggagaacaccatttaagtcacagccaggtaatcattgcacttcatgattgtgcaaaacacttctttccaattgacttgaaactgaatttaaacttactcaggttcaaagagactacacataatcatgtcatgctaatctgtgtggactttacatgatgttcttaatgctacaggttttgaagtccagaactgaagcatccttaatgatcaaagatggatccaagtaggttctttggcccatagaatgaattattaaaagataaacatgcatattcttttaaaaaatatatacccttcagttaaaaaaattcttaataaaacatacagaaagtgtactgacctgtgtttctttacaaggtttgaaggagaagttctgaaggactctgattagagcaagtttcatgttcatgagagcaaacctcatgccaatgcagtttctgggtccagttccaaagggtgtgtatatgtaaggatctatgctgtccttcttcttactgaacctagttccatattggtagattaaatagttaatgaaacataaaaaccacagagttacatgttaggggttcttacttaagaacaaccccccctccacctcccaaccagtagtacacaggatacttttgtgggctggtcattgaaatcctgctttggttatttcgttataatcatcataacctacaggtcctttaaattctccataccctataggagcgtttcttgagatgagatgaatattgttgcaaataatatttatctctaaacactaaaattatattcagggtggtgatgtgttcacactataaaaggcacataaatgataagactgatggatggaaaagtggattcctgcctcaactcacacttgtgttggtcacatgctcattgagaaaggagaaggagaaaacgtcttgtgctatttcaagttgttatttttccctttccttctcctgtcatctctttttttctaattcccctcctcctcctctctaccttccccgtccaccttctcctctgcctccttctcctcctccttctcttcctttttcttctctccatctcttcctctctttctcccccacacccttacaggatagtttaagtcacataagttacatgggcatatgatgctaccctactgtagtgtcatccctgctttccttgatctgttccattaagctataaattctttgaagattgacccatgttttattcaaatttgatttctaaatatttgattatattaaggaaaaaatgttgattcaaagaaagtaataatggcattgttgtcatatgtttttacaggagtctttatattttggagagcattctgaaatatttacaggctattgcttcaaaataacatgatagtcaggaggagggtgatggtggcatttggatggggcagctaacatggattgatggctgttggaaccagtgatagatatatggagatgcacgaaaactattctataggctggtgtcggtaacatgtacttgtgtatatgtcaaacattctctaatatatatatacacacacatatacgtatatatcacatgaatttatggatttatgtaaatcatatggatttatggatttatataaatcatatgaatttctccctgcctagccaagttcctgacacatggcaagcactatctttttggtgactgagtgattcaaagtgaagtacagcgagtggtctctgatttcgtattagtgcagccacaggaggtggaagtgctgagcttgcaggaaacatagaagtcctctactccagaaaacagagaacttggtcagctctgacttactctgtgaacaagtattatgtgcagactccatgctagcactagggacaccatgaccaacaagacaaggttcctcccatcagcaaacttgcaggtaggggctaatgaaagtctagatcccaagcatcctgaatcaccagccagtaccctaaaaatttcattctaaattttgcttaataatacagtaatgggaaaacaccaactatatccagagtgcgaactgtgcctaaggcctgaccttgtccctgaattcccagaagagcatgctcaagacacctccaaggaggagtgtgtgagatgtctactgagagtataagggagctggcacaggactgcagccacagataggaccaggaggacctgtgctgtcttgtgtcttcagtgaagtggcttaaaccattagggatgaggacttctcaggacctcagcctgcactcttataattactacagaggaaatagcaagtaacgttgaaagcaaatggaatgtggaagcatgttttaaagtttctgttaaattcagagagctaaagggcacagcatagaaaaaacagaaaggaataaaaagcctatacacctgaaataacatcatggttaaatggtttatggcatatgcaatatatacatatatatatatttatatatatacatatatatgtatatttatagtaatataggtcagtggatagtttcctgttaaatcaagtaagcagcaattcaaaccaaataaaaagtgataccattctaatttttaaaaatctatataggcgtagaaaaatgcccacagggacataattgattatctttgtcttgtgctgggactgtggatggatgtagtttcgttttttctagtctgtggtttgtaaagtttgataattatcacttttttgtgataaaaagacttacaagcaaatgattgtacaaccacacgattgtcatgtagattaagagaggcagaatatgcttgaaccagcctgggtcagggtgagctccatttccctggagacttgtacctttcagggcggaactcctcaggctctgtccagtactttgggtcatggtgaagagcataagttggaatcaccaccattgaccctttgggaatgaataccccattgatttcaacatctttcttgcaagtcctctcaagtctaatagcaactgggaataatctgagtgtttcattcaccaccatgtcaaggtactccatctgtaccacggcatcataggtaggtggtgcctggaaggaaagaaacagaattggataatctgagattttgaattaactctcaactgagtccatgcagtactaytgaagtattagaagctccagagaataactcatactggtaaatgatcatagtattcgtgaagtattttaataactggcatgtccattgatgtgctcagtgacctactgagatgtgtggaggagttatgaatgtaggagatattcaagaccatcctcaccccagggactgaaatccttagcatgaccatgtagtggtttttctttctcatgggaagaaatgtgattaatggggctatgaccattaccaccaaataaaatacaccaaagtcactatcacctttcaaaaagaggtcacacatctgtaccaagaaagaaaaacagggaaaagagcaaatatcctcttcacacaaggattattggttgcagagtcctgcttggtaactcttttgaggagtttgagaccagcttgggaaacatggtgaaaacccatctctacaaaaaatacaaaaactagctgggtgtggtggcgtgtgcctgtagttccagctactcaggagacagaggcgggaggatggcttgagcctgggaggcagagtttgcagtgagctgagattgcaccactgccctccagcttgggtcgtagagtcagaccctgtctcwaaataaataaataaataaataaataaataaataaataaatttgtggataaacttgttcctttctatcacaaatacgacaaaataaatttatgattggatgctaccaaggtacacaatttgagttctagttaaagttatgaagagaatagaaccccacactcagccccatcccctccttttggaatagtttcctagttgttgcttcagggctggactgtaatcttcaggactggatgtaaatgtccctttgtgtctgcctcacagccacaccagggtcagccccacaggccaggtctcttcacactaaaaagaatcccagtttgggcagaagtctgaaaactgtggatgatatgtacctagcacttggtgttatatttgggaggcagtattgtagagggttagagtttagctcaggagtcagataccctggttcctagcttggcttcttggccagtggctacctgactggaacatgagacaggtgtggggagagctgagtcagcctccatcgcgcccccagggccaggctacctcagaccatagccagaccagagtgagtccagtcagtatcagcagaactcactatccagtcttgtgagcaataaatgcttctcattagatgccactgaggtttttgaatttttttttttatactttaagttttagggtacatgtacacaacgtgcaggtttgttacatatgtatacctatgccatgttggtgtgctgcacccattaactcgtcatttaacattcggtatatctcctaatgctatccctccccactcctcccaccccaaaacaggccccagtgtgtgatattccccttcctgtgtccatgtgttctcattgttcaattcccacctacgagtgagaacatacagtgtttggttttttgtccttgccatagtttgctgagaatgatggtttccagcttcatccatgtctctacaaaggacatgaactcatcattttttatggctgcatagcattccatggtgtatatgtgccacattttcttaatccagtctatcattattggacatttgggttggttccaagtctttgctattgtgaatagtgctgcaataaacataagtgtgcatgtgtgtttatagcaggatgatttataatcctttgggtatatacccagtaatgggatggctgggtcaaatggtatttctagttctagatccctgaggaatcaccacactgacttccacaatggttgaactagtttacagtcccaccaacagtgtaaaagtgttcctgttttctccacatcctctccagcacctgttgtttcctgactttttaatgatcgccattctaactggcgtgagatggtatctcattgtggttttgatttgcatttctttgatggccagtgatgatgaacattttttcatgtgtctattggctgcataaatgtcttttgagaagtgtctgttcatatccttcccccacttgttgatggggttgtgtttttttcttgtaaatttgtttgagatcattgtagattctggatattagccctttgtcagatgagtaggttgcaaaaattttctcccattctgtcggttgcctgttcactctgatggtagtttcttttgctgtgcagaagctctttagtttcattagatcccatttgtcaattttggcttttgttgccattgcttttggtgttttagacatgaagtccttgcccatgcctctgtattgaatgatattgcctaggttttcttctagggtttttatggttttaggtctaacatgtaagtctttaatccatcttgaattaatttttgtataaggtgtaaggaagggatccagtttcagctttctatatatggctagccagttttcccagcaccatttattaaatagggaatcctttccccactgcttgtttttgtcaggtttgtcaaagatcagatggttgtagatatgtggcattctttctcagggctctgttctgctccattgatcaatatctctgttttggtaccagtaccatgctgttttggttactgtagccttgtagtatagtttgaagtcaggtagcatgatgcctccggctttgttcttttggcttaggattgacttggcaatgcgggctcttttttggttccatatgaactttaaagtagttttttccagttctgtgaagaaagtcattggtagcttgatggcgatggcactgaatctataaattaccttgggcagtatggccattttcatgatattgattcttcctacccatgagcatggaatgttgttccatttgtttgtatcttcttttatttcattgagcagtggtttgtaattctccttgaagaggtccttcacatcccttgtaagttgaattcctaggtattttattgtctttgaagcaattgtgaatgggagttcactcatgatttggctctctgtttgtctgttattggtgtataagaatatttgtgatttttgcacattgattttgtatcctgatactttgctgaagttgtttatcagcttaaggagattttgggctgagacgatggggttttctagatatacaatcatgtcatctgcaaacagggacaatttgacttcctcttttcctaattgaataccctttatttctttctcttgcctgattgccctggccagaacttccaacactatgttgaataggagtggtgagagagggcatccctgtcttgtgccagttttcaaagggaatgattccagtttttgtccattcagtatgatattggctgtgggtttgtcataaatttgctcttattattttgagataggttccatcaatacctaatttattcagagtttttagcatgaagggctgttgaattttgttaaaggccttttctgcatctattgagataatcatgtgggttttgtcgttggttctgtttatatgctggattatgtttattgatttgcgtatgttgaaccagccttgcatcccagggatgaagcccacttgatcatggtggataagctttttgatgtgctgctggattcggtttgccagtattttattgaggatttttgtatcactgttcatcagggatattggtctaaaattctcttttttggttgtgtctctgccaggctttggtatcaggatgatgctggcctcataaaatgagttagggaggattccctctttttctattgattggaatagtttcagaaagaatggtaccaggtcctccttgtacctctggtagaattcggcggtgaatccatctggtcctggactttttttggttggtaagctattaattattgcctcaatttcagaacctgttattggtctattcagagtttcaacttcttcctggtttagtcttgggagagtgtatgtgtcgaggaatttatccatttcttctagattttctagtttatttgcatagaggtgtttatagtattctctgatggtagtttgtatttctgtgggatgggtggtgatatcccctttatcatttttattgcatctatttgattcttctctcttttcttctttattagtcttgctagcattctatcaattttgttgatcttttcaaaaaaccagctcctggattcattgatttttttgaagggtttttttgtgtctctgtttccttcagttctgctctgatcttagttatttcttgccttctgctatcttttgaatgtgtttgctcctgcttctctagttcttttcattgtgatgttagggtgtcaatgttagatctttcctgctttctcttgtaggcatttagtgctataaatttccctctacacattgctttgaatgtggcccagagattctggtatgttgtgtctttgttcttgttggtttcaaagaacatctttatttctgccttcatttcgttatgtacccagtagtcattcaggagcaggttgttcagtttccatgtagttgagcggttttgagtgagtttctgaatcctgagttctagtttgattgcactgtggtctgagagacagtttgttataatgtctgttcttttacatttgctgaggagtgctttacttccaactatgtggttaattttggaataggtgtggtgtggtgctgaaaagaatgtatattctgttgatttggggtggagagttctgtagatgtctattatgtccactttgtgcagagctgagttcaattcctggatatccttcttaactttctgtcctgttgatctgtctagtgttgacagtgtggtgttaaagtcttccattattattgtgtgggagtctaactctctttgtaagtctctaaagacttgcttcatgaatctgggtgctcctgtattgggtgcatatatatttaggatagttagctcttcttgttgaattgatccctttaccattatgtaatggccttctttgtctcttttgatctttgttggtttaaagcctgttttatcagagagtaggattgcaacccctgcctttttttgttgtccatttgcttggtagatcttcctccatccctttattttgagcctatgtgttactttgcacgtgagatgggtttcctgaatacagcacaccgatgggtcttgactctatccagtttgccagtctgtgtcttttaattggagcatttagcccgtttacatttaaggttaatatttttatatgtgaatttgatcctgtcattatgatgttagctgattattttgctcgttagttgatgcagtttctccttagcctcgatggtctttacaatttggcatgtttttgcagtggctggtaccagttgttcctttccatgtttagtgcttccttcaagagctcttttagggcaggcctggtggtgacaaaatctctcagcatttgcttgtctgtaaagtattttatttctccttcacttatgaagcttagtttggctggaaatgaaattctgggttgaaaattcttttctttaagaatgttgaatattggcccccactctctactggcttgtagagtttctgccgagagatccactgttagtctgatgggtttgtgtttgtgggtaacccgacctttctctctggctgcccttaacattttttccttcatttcaactttggtgaatctgacaattatgtgtcttggagttgctcttctcgaggagtatctttgtggcgttctctgtatttcctgaatttgaatgttggcctgccttgctagattggggaagttctcctggataatatcctgcagagtgttttccaacttcgttctattctccccgtcactttcaggtacaccaatcagacgtagatttggtcttttcacatagtcccatatttcttggaggctttgttcctttctttttattctttttcttctaaacttctcttctttcttcatttcattcatttgatcttccatcactgataccctttcttccagttgattgaattggctactgaggcttgtgcattcatcacgtagttctcgtgccatggtcttcagctccatcaggtcctttaaggacttctctgcattgattattctagttagccatttgtctaatcttttttcaaggtttttaacttctttgccatgggttcgaacttcctcctttagctcggagtagtttgatcgtctgaagccttcttctctcaactcgtcaaagtcattctccatccagctttccgttgctggtgcggagctgcgttcctttggaggaggagaggtgctctgatttttagatttttcagtttttctgctgtttttcccccatctttgtgtttttatctacctttgatctttgatgatggtgatgtacagatgggttttggtgtggatgtcctttctgtttgttagttttccttctgacagtcaggatcctcagctgcaggtctgttggagtttgccggaggtccactccagaccctgtttgcctgggtatcaggagtggaggctgcagaacagcggtattggtgacccgcaaatgctgctgcctgatcattcctctggaagttttgtctcagaggagtacccggccgtgtgaggtgtcagtctgcccctactggggggtgcctcccagttaggctgctcgggggtcagggacccacttgaggaggcagtctgtctgttctcagatctccagctgtgtgctgggagaaccactactctcttcaaagctgtcagacagggacatttaagtctgcagaggtttctgctgccttttggttggctatgctctgcccctagaggtggagtctacagaggcaggcagacctccttgagctgcggtgggcttcacccagtttgagcttcctggcagctttgtttacctactcaagccttagcaatggcgggcgcccctcccccagccttgctgctgccttgcagttcgatctcagactgctgtgctagcaatgagcgaggctccatgggcgtaggaccctccgagccatgcgcgggatataatctcctggtgtgccgtttgctaagaccatcagaaaagcgcagtattagggtgggagtgacctgattttccaggtgctgtccgtcacccctaggaaagggaattccctgaccccttgcacttcccaggtgaggtgatgcctcgccctgctttggctcaggctgggtgcactgcacccactgtcctgcacccactctccaacaatccccattgagatgcacccggtacctcagttggaaatgcagaaatcattcgtcttctgtgttgctcacgctgggagctgtagactggagctgttcctgtttggccatcttctcgccacactcctttttttttttttttttttttttttttttttacttagcattattgtgataacagtaaacaggtgaaccagggccagcaatattgtacaaagatcttatgcttctgccagtagcaaccgttctctatgtttctccctttgtttttctcctcagaggcttcctacattatgtcagtgaaggaatcagtgattatgctttttataaaaattctcctggggagtggtgaggaggcatttttgctaaggcttcacctcttcccttcatctccagggstcatcccctcaccttattgggcaaaactgcatcaatctccttttgcagtttctgctggacatcagggtgagtggccagttcatataaagtgaaggaaagaacactgctggtggtttcatagccagcaaaaatgaagattattgactgggctgcgagctccagatcagacagagctgaaaggagaggaaagacattttaggtaaatcaggtcaacgtacaacatcacagcttagatgaaatctaagtgaagctctctaatcccaagaagaaaaaatggaaaagcaattcaaagtcacactgggagtggttttcattctgatatgtatcttatacagggccaggatgacgcaaaatcattttaatccaggttttcccaaggtctacatgattgtgggccacacactcctcatcatggcatcccagcaccagcactgctgtaatttccagagagagcatttctgtcttacatactcagtgttatgggtgtgtgccttgaatgatcctaaaagtactttatctgtaagtaaatatggggtaggctttttcccaataaaaatttgattttctacaatagagcttgacagactttgagagaattccaatatagcttgacaaactttgagagaatttgcaatatttaggaccttttctctatatatgtttgagggaacttaaaggaccaatactgagctacagatcacctcttgctactcaaagtgtgtttcatggaccagcagcaccagccacatctgggagcttattagaaatgcagaatctcaaaccccaccatcgaactactgaatcaaaatccaaacttgcaggagatatggtgatttgtgtgcacaacctcacttaagcagcatggattacatctttgacaggcatcaggcaatacaagatctagggtacagttctcagaatggactatctcaggatgtacaagacagcagagatagacaaaaagccagaagcatggtgattgactgtagtctgatgaatggcattaaaatagcagaagttcttatgattacaggttggcctccctcttgatatttctcctgagagaagctcacgatggtccatcactagtctgtttggtcaggactggattaggacctttagagacctggagcacagaaataaatatggtgcctgcagcaatcatgtaactcacaaccaaacacaatataaaatgagtgtgagaaaggtctacagagttctgatttatcagtgaatatttctgtatgctgctgtgggtaaattcaaccatccaattattttactcagttacattgaaccccattatactgagttgaaattgaactgtaattttaaagttgggagctctgctgtccaatctggtagccactatccacatgtggctatttaaattcaaattttattcaattaaaaataaatactcttaaaaattgttcttcagtggcattggccacatgtccagtactcaatagccatatgtgtctagtgatttctatatgaaacagtgaaatgatagactattttctttatcacagcaagttttgttgagatagatagatgattaattgataaattataggcagatagatgattgacagatagatagacagacagaagtagatgtagacatggacatgtttaaagtggtatactggagtctgctgagtcctgctctctagaaccaattgttaaatattcaaaaattttgtgagatggttgccaaatcttggtagcttgaaattgaccatggttatcattttgccactgtcttagtaataatggttttggttaaaaccatccatgggtcataaaactagtagatacaagactgaagattgaagtagatttacatggtatcagaggtgtcccccattagttacttatgcatttcaaagggaaaaataaaactttgcagtagattaaccttgcgaacacactttcaagtactgccagttaaaatcacccttactgggatagtgtgcytcctgatcggtatgtttgatataaatttccaagtagaggttctcacttggtggatctggaggaggctgagaactggcatttgatctcatgtaggtgatccacaaaccactgactgtcctccaagcattctaggtttgcttagggttgccctttcagcctggaacatggctatacctgtgggcttctggaaagtgcctccagctaccatttataacatctaaatgtgtgttgttctgctatgtggcaaaaattctcatcttcctggaatacttcctgcacattttcagaacaaggccctccctcttagtgtccccrccagtagccctcagaagcactccttggttacctttgtgggactcagtttctttcgaattctgggagtcaatcatcagctgaaggaaatctagtcggtgctagaagcaaaaggagagatttctttggcagaaagtgactcgtgaagtcagaagtaaatcaaaagtgcagtcctcaacctcccttcttgacttccctccctcaacctccctatggcttcttgaagacgtgttasctgagtcaccagtgaacaaaaacattcatctaaatccttggaaagcaggatgttttcctgaaacaaatctagctatcatgtccaattgctttttygcctttgccctccctgtttctcatcttctctgtcttttggatacagctttctggccaaagagttgccggttccatctctggtcataactgcttacccaggaagaagtactggatcttttattcttctacctttttcttcagcagtgtccgtatagattaatctcctgacatttccagaactcatcagcagcttttttgggggagcattttcaaatattccaacattctcaaactctatataatcttcagtgacagctgggttacctggtcctgtctccctgacctgcagacatccttcggctggcctctagggctcgtgaaggcaaagctgagttagccagccttgcaacctcaattctcagagaagacccctgttcactccaggctgtgaaacactcacatttaccacacactacatgtcagcagtcggcaggtagcctcataggacctttaattgcagaatatgtaaaataagagtcttggacttaaaatgattctttaccaatctgtgatatgaggaaagcacaataccagtaaaatatattttcaaacaggaaactttatcctttgacaatttattaaagggaagagaagtggtaaaattttatctcaatactgtttatatcatgacatactaattgttgtgcctgatttcaagttttaaatgctatctctctgactcattctcatctccttccccaatctccttctttatttctaccaaatggcttctcttgttctaaacataagttctctgtctttatttttaaaaatacagatacatgctctatcatgtgtataaaatctaaatttatcaaaacctaaacatcgtcatttaaccaccatcagattttaccttttgtttgtcgttgaggcgacttttcttcattctgtttacagatttacttaaaaaatttatggtatcttttggaaacagagagacatttaatgcttcaaaaactggggtaaggaatggaaagagtactgtgggaaaaacaaaacraacaaaaggaaatcattgaaaatgcaaactttacctggagcaattataattttctctaccagtaataagaataagaacatcatgattctcaactggaacccattccttttatcatgtttgcccttctttcaggccggcgactgagcaagggcaggtctatacataggaaacaccactacagcagtgagatcaatggcaccttctgagtctttggagtgaccaaagtaatagaattaaattccctgacctcttagcctttatctattggactagagtttttggattaatgtagaccataatctgctgcttaacttaatcatgctgttcaggaaatgatagtcaagatagaattaacacagcatatgtacatcaacttccatggaataaaactagaaatcaataagggaaagaaatttgggaaactcatacatttgtggaagttaaacaatacagttttaagtgaccagtgagtcaaagcagaaatcaaaagggcaacaagaaattgttttgagatgaacaaaaagaaggcatgatgtaccaaaacacaggatgtagccaaaccagtgctcagagggaaatttatagctgtaatatctaaatttaaaagaagaaaatatctcaaattgattataattatttacaccacaaaacactaaaagaagaagagcaaatgaaacctaaagccagcaaaagaaagaaaataacagactaaaataaactcatgaaatagagaataaaaaacaacagagaaaaatcaatgatattatttctatgaagtgtccagaataggcaaatctatagaggcagaaagttgattattggatgcttagggcartggggtttgtggtggggtgttgacagctaaagtgtgtgagggctctagattgacaaaaacattttagtttacaatagtaatggtcatacatatttttgattatcttaaaaacaatggaattgtaccttttaagtggatgaattatacgatatgtgaattatatgtcaagaaagcagttatttttaaaaagagagaaagaaataatagcccacatacttattgagagaaataatggatctaagaaaccaaattttaggaacttcttagtgctctccacaaaggggtcttgtggattgttgagagagtcgatgttcactccaaatgatgtgccagtaatcacatccatgctgtaggccccaaagatgctgagtggagaaagatatggaaaattaaaatcagcacctcttaccgtccttccactatacatgcagcaagaaacccacatatccagtcaagacacataaagagccacagactttcagaactatctgctgaatcatcttccatctactccctcagaaggtggttatctggtgccagtgatggagctggccctatgctgggggtgatggagacaccaagctgagttagactcacctctgaggtcaaggagcccagtcataggaagacagagacccattatcagacaactacagtagcatgtgttgagtgtggatgatataagatatgtaagctctgtgcttcagcagaacaagagtagaataattaactcttcctagtggattcaagaaaggtggcgttgtctgactacagactctatgcccagagccaattcctcttcaacactttacaaaacagtaacaccctgttctgagttcctagaaatatcatcctttattctctacactccctgctaatgctctggaaaaccccactatccccagctcctctgacctgaagttgcgctgagagcagagtcatttttgtaagatgtgacaatcaagaatgttctggttaaaaaaaatagatctctccaacattgatttggagaacccaaaactgagtgaccacatgtcccaagtctgaacaggacaggctcagattacacctgtcgttcctgcataattgaagcacataccattgtagacagcaaataataggcttgctctacacatagcatttctagcaccctttcttttttgagattggaggaaaaggaagtagtgggaaggtttaatagttcatagtttgctgatattctcagaaaaaccatgaagggattgaaattgttccaagttccccattgtaactttcccatcttacccaatgcaaggcaacaagtaccaaatgcttgcttacccacagttccatatccactacactcaaaactttgatacaatcatgtttttttaatttctaaagtatgtatttaatctcccagaatatttatggtgacaagttaacagataagtaaatcctggctcctgtgcacaggagagaaggcccttttcccttgctgacttgccgcctcatgggagccactccctcttaggtggctctttggagttgcagcgctgccctgcttttgtctggtcactggagtaacccaacagtgygactgtcgactccatggcaggcagctggaagggctcatgacagctcagaaccccatggctgtgctcctacttactctttcaaggtgacaggcttgcctttctctgcttcccgcctcaagtttctcaccaatacatctccatactgggcaatgatggggaacatctaagcacaaaacagatcagtacctgtagttaaatgtgcagactcaagtcccagaaggatatggctttctccagcatggagcagtaagtgacattttgtaatgaattttgtgatgtcttttctgtacataaagataaaagaccatttttaggaagctcgaactcagtggactaccccttggaaacggactgtgatcttactttctacctgtccccagattcattctttacatttctaattaagactcatcttattttcatacctccttgagttttccgctggtgaaggttggagacagcaatgaccgtattctcttccattcttcatcctcagctaaagagatggcacttttcataaatcccactgggcctaaagactagagttcaacagaaacattttttctcacrttagttgtggtgatcttcatggttgcacaaaatatattgaagaggcatccttatttaacaaatatttattgactgtatatgatattatggcaagccatattcaagatgctcaatggagatcctagatgcctagcctcttctgagtgtatgtggggcgggggtgggagtggggagacccagccatctggtgtggtctcctgcctctatatctcagtctccttttaattgcaaatgctccacgtggtagggaactgttcttccagtggaatagacaggaacaagacctagcccttccccaggagtgtgcagagtagaaaaggattggtgacagatgggcagactgtatgttgcctcagaccagctctgtctttaatacacctacagcatgggcaacttgaaaaagggatgccatgatgtggtgatttttttttgaaaagtaggtaatacttaaagactagaaacctgttttgaaggaataatgcaatttccttgaaaattcttttctcttaattttttattccataaatagaaggaaaaagaaagggataattacttttcccaacttggggctggactatcaagccagcatgcttggaactttctcttatcttccacaactatgttttgttttaaaatgtgtacttccagctgtcatgataaaatctcaataaactaggaagagagagacagttccttcatttgataaagacaatctgtaaaaaaatcattcagttaaatcacatttaatgatgaaggactgaatggtttttccaagatcaagaagaactaaaaaatgcccactctcaacattcttactaaagagcatacctgatgtcttaatacactagacaagaaaaagaaataaaaggcatacagattggaaaggaaataatagaattgtctctattttcaggtgacataattgtcaatgtataaaatgtcaaggaatatacaaaaaaatttctagaacgaataggtaagttctgcaaggctataggatacaagatcaacaaacaaaattattcacatttctatgtaacaataatcaatatctgaaaatacaagaaaaacagtatcatttacagttactccaacaaaaatgaaatatttctggtgtaaatctaacaaaagatgtacaggacctctatgctgaaaactataaaatgttgaggaaagtaataaaagctaaagaaatggagaggcatactatattcacgggatgaaaggctgaacatagtaaagatatagattatacccaaattgttctattggtttaattcaagcttgtccaacttgtggcctgcaggcctcatgcagtccaggatggctttgaatgtatcccaatacaaatgtggaaactttcttaaaacattttgagtttttttgcaattttttttgtaattttgtaatttgactatgtgattctcaagtgtgaacttcgtagacaacaatggaatggaaaggggtaatcagagtatgtcacatccacaaataatggactagtatccataatttgcattataattgcaaacagttcagcaagaagaaattaaaagccattaaaattaactaacaaagagcgagaggacgctattgcagtgccacgtgaagtgaattgtgacaaagaattcaagtgtgtattctggacaaggcagagcgctgctgtacaccagacactgtcgccatttgtacgcatgtgtggcttcagttttatggtggtgtgcgacttccagtgtgttatcttctaatcacggacagttgaattgacactgtcaggtattaggtgtgtttgtggcaatttggcaagtaaaacccagcaattatcaataatatttcaacctacctttgtagatgataggtgtttaatattatttagaagacatgtaagtattcttatttgattattaaaccttgctttctgttctattttcctatctgttaatttccataataaaagtaaatatagttgcttatctattataatgcttttaattccagaatggcttccacaatgtcttaaaaagaaaaccctaaaaaacaaaaattatggatgaaggaagattgttcaatgaaaagtggacaaatgactttttcttgttraggcaaatagcgaagcactctgcttaatttccacggaatttgtgccagttttcaaagactacaatttgaagaggcattatatgcaaaaacgtgctgacaaatttggtgtgtatgtgttgtaaggacaaaatagcagaactgaaaaaaagtctgtcttttcaacaaaaaagattttttaaaaagttacaactcggactcaatcgtaaggtaaaacctagttatgtggtagcaaatttaatagcaaaaaaatcaaaaccatttactgatggtgagtttattaagcaatgtctggaagatgtggtagatattatttgccttgagaaactgatatttctaaaatcagtttgtctcaccagactatagccaggagaattggagaaattgggaaatctattgaaagacgtttggagagtaaaactgctaatttaaaattttatgctttggtgatggatgaaggcactgacactacagatacggcacaacttgctatttttattagaggtattgatgatgaatataatgtcactgaagaaatcgaaatgtcaccatgctattaaaagacacaactaaatcaagagatttatatgaagcagtgaaaaatatgttaaagcaattttctttgtcctttgtaaacatatgtgatatagctacagatgctgccctggcgatggtaggtaaaagagagggacttgtacaattaatagatgatgcagttgccacacaaaastcacatttgatgaagtattattgcataatacatcaagaaaatccatgtgcacaagctttaaaagtagataacgtcatgcaaattgtcatcaaggctgtaaatttcacaagggcccaggaattgaatcatcgctagtttcaggaattccttaaaagtatggatgctgactctagcaagtcattcactttttagaagtaagatggttaagtcaaggcaaaatgtaaagattttatgctttgtgatgtgaaatcaagctgtttatggtatcaaacaaaattggtgccagaacttgacaatgaaaactggcttacagatttagcatttttagtgggtttgacggcccatttaagtgagttaaacctgtgtcttcaagttgaaaaccaacttaacaatacaatgtttcaaaccataacagcattccatatgaaactgaaattatggcaagctcaaattaaggcaaacaattttatgcatttcgacatgttggctaaacatggtcctgtgaacagccaaaaatacgcagccttgcttttcaatttgatacaggaatttgaaaacaggtatttcaagatttctgaaaaaatcatcaatattttggtatatttgcaactccattttcagtcgacatatatatgttacctggcaattttgaaatggaatgcctagagctgcaatctgatgttcaacttatagaaaaatttgattttgcctctttactggacttttgtaagacctgtcttcccaatgacaaatatcccttgcttcacaatcacaccttgttcatgtcattgctttttggcagcacttacatttgtgagctactattttcaaggatgaagaacacgaagagtaaaattagaaccaaaatatctgatgagcaccttgagaactcactgagaattgcaactacttccatcaagccagatactgatggattagtttctcaaaaacaatgtcaagtaccccactagttttatgttgttctcttttcttttataataaaaaatatcaaaaaagtagtgaagtttagctagatatgtacattttctgtatcagtgattgcaaacttggaacctgttcaatgattttgaaagaccctctgaatggggcagtgcataattaggattattatgcaaggacatttttgcttatctgtggtggtagatatataatgaaaactatacacagaccatttgtgtgtgtgtgtgtgtgtgtgtgtgtgtgtgtgtgtgtgtgtgtgtattttatgtgtggcccacgacacttcttcttccactgtggcccagggaagccaaaagattggacacctctgctttaattcttatcaaaattatggcaggtttgtttgtagacacttacaagcttattctgaatttttatggaaaggcaagggacaagaaaagctaaagccattctgaaaatataaatcaataaagtggaaagaattgccctatatgatgttaagagttactgtacagctactagagtcaccacagtgtggtattagtggaggagtaaacaataagaaatagattcacaaaatatactcagctgagttttgacaatatgcctacctttccaaaatggtgttggaacatttggacagccatagtccacagaaaatgaaccttgatctaaatctcataacttatgcaaatattaacacaaaatgggtaatagagttacattttgtaaagtgttaaactatataactcttagaaaaagcaatgtaggaaggagggctaagcaaaggattttcagacttaacaccaaaagaacaatccataaaaggaaatattaatacattggcctcctcaaataaataaaagtttgctctgatatagaacctgtcagagaaaaagacaaactccatgttgtgactgtaggacagcaggagggagccacatggtgacggaatgggtctgcatcttgatggtgctggtcgttgcacaaatctacgaatgtgaaaaattgcttagaactacccacacacataaacacacacaaacaagggcatgtaaaactggtgaaatctgaaaagctctgtaaactatatcaaagtcaatttcctgtactatagtattaggttggtgcaaaagttattgcagtttgccggtttttgttgttgttgttgttgttgttgtttgagatggagtctcattgggttgcccagactggagtataatggcgtgatctcggctcactgcaacctccgcctcccaggttcaagcgattctcctgtctcagactactgagtagctgggactacaggcgcatgccaccacacgcagctaatttttgtatttttagtagagatggggtttcaccatgttggtcaggctgatctcgaactcctgacctcgtgatccacctgcctcggcctcccaaagtgctgggattacaggcatgagccattatgcccagcctgtagtttgccattttaacttttgtgccaacctgataatatgaatatactagatatatattgcaatatacaagattgcaagatgttaccactgggcgggacaggatgaagagtacatggaaccttcctgtacattttttaggtaaccttctgtgaatatatgtttttttcaaaataaaaatttaatcagtggatcaatcattatttaaatttcaaaaaatggatgcttacccttcgatttgtgaagacagaataacattctttcactagcactgttctgatcacgtcgggatctgtgatggccagcacagggagttgaccttcatacgttctgtgtggggacaacggagctgattaaacttcactagcccgattctgcagctggagccacacccaggaagccagactttgatcattatgttatgtaatccatacccctagttgtacgacacacagcaaccttaggttctagttcattagggtgtgacacacagcaagagtctcacacaggagccacccaaggcttcatatgatgaagggtaatgtggtccaaacagggaagagataytgaaagacaaaagagctctttaaagagattatggttagaaatgacagtagagcattcgttaagctgggtggtacatacgtgggtatctcctatgccactctccataatgttttatatgtttaaaatacttcattatcaaaaagaatattaggtcagtgaaaaattgaaggcaggtaaatcatcaagtgctcacaaggactaaatgctgcaagggcagttggtgtggggcccatggacatctagagctgtgtcatctgtctactaagtcatgttgcctgtatgggccatgccagctccacagcactccacagtcagcgctgtggattctgaggacttgaggggagaagatgaagaagtacaaagaggcaaagctttctcccacttgcttctagtgaacaaacacaccactgcacctcatccactgctctcaccaaacctctagcccctctgacagggaacagctgctgcaattggctgagaccaccttataaaatcacagtccatcagcccaccagggaacacaatggtttaataatattcagcatctcttcttcaaagtaagtgcaatggtataaaccaataaatatttgtatatccttctattaagaagttttggcttaaatttaaacaacaaagcagaacaaaaaattccatacttgcagagaaagtttaaaaaagtggagcataagtggtttcccaatctgtttctctattatctctcaacccttctttcaaaagcacatgttaaattcagtctaaatgaaggagttttggcttttaattgaaagtgaatcaatgtgggaaggagatgatgccatgcatttatgagcacatattagaagggtctgagacaatgcatgtgataaaagggcacctaaggaagaaaaaaagaagaggggaataggcagacactggacagaaggcgatgctgggagtccctgggccaccaaaacctgcagaaaagtggtaaccacaatgctcctagcctagttcagactgaagacctcgatacctggtgacacatgggatccttggtaggacaagcctcgaaaagttttacaatagcgagtgtgaactttatcagaaccaaagtgatgtcactaattgttttttaaccctgacaaataaatcccaagaaggctatgaagagaggattcttatgcttgtgttcctggaaacaaaactattacaaaagtgtctacaaaaaccacaactttgcacaaaggctatttcaactttacacaaaaatatttctgcaaggacacctgtccagcaactgcctgtccaaccttggtgtggcatcacccttgttattgatctttgtagctaacaataattatctcaaaacagttatgagattcttctcatattttctatggagcatctttgtcttgtttacctccctgaatttgcacatagtttataacggcaagcagattcccattgcaatattctactcccaagtaattwtcctcttctttcagagaacctctctctgtttgtatttaggttgacaagagcttcatcccatgaagacctgggcagagactatcctgcagtggggtaacctcctcacagtagcaggtctatccaatggaggttttcagaatactcacccccacatttttccatactttttatagcactctgtgtcaaatttccagagaccctgggagaggaaacaaaatacaagttgattattattttaaatagaataaaccctacctctaattggggctgaaaacagttgcgtccaatgaaatcaggcctgctatctttcactggcagttgaaggaagctattcagagatgtcttaagggaaagacaagaaaacagagaatatatttgaagtggggaatttaaagtcactcttgaattttctctaagtactgaaggactcacccttgtctatgaccagtaagtaattccttgtctttctgatgtatttttgctttttcttttattctctctaaagtctcctaaccccgtgaatgatcacctgcaagggcaggggtgaaactgaggtgaggaaaagtgagtgtctgcagggaatgcacaattttttaatctcctccatcagtatccttttcatttatctcatgtgctctctctagaactctagcagaattagaaagttaaagaaaccaggaacctcttttagtcttgcagatttagataagtctaaggcatgttgttgagtgagaaagtgagtgagtgaatgagaaagtagacttcctttccagttttctagcttaacacagaaaagatggagaaatgccacctctacacatcacacccagcaaattacaatgcgtgctctgagctttcacttctgaaacataaaaacaaaccttcctgttgctaagattcagctgtgatgttttaaccatgcaaaagaaggtcccagaaatgttgatctactacaagagttgatctgggaaagatgaagaagaaattactgcttttatcgagggtaaaattgtgtagaattctcagatagtaatcagacaacagaggcttcagttgtgagagttagaatctgagaaacaagctccaggtacacaggataggaaatctgggctggagagcagcttgctgctactggccttctggacatgagcttgtgactttccctccaggggtaaacctggccatgctttgggtggagcctacacaccttttcctctcctctcctctctcctctccttttctctcctctcctctcctctcctccccmctccyctcccctcccctcccctctccttcctctctctttctttctctctctctctttctttcttcctttctgtcttgttctgttgaccaagctggagtgcagtggtgcgatcacagctcaatacagccttgacttcctgggttcatacaatcctcccaccttaacattcagagtagctgggactacaggcatgggctaccatatcatgcacaggtaattttttctttctagagacaggtgtctcactgtgttgcccaggctgttctcaaactcctgggctcaagcaatttgccagtcttggcctcacagaggctgagattacaggcatgatccactgcacccagtcccaccatttctgaaaatgtgaaacctcagaactccctcccaaggaggggcatttttactgatggaactaagctgatgtttgcaaccataagaagcaaaagaggaagctcaagcaactcacctgacgataggacaaaacatttcccaacaaaggcagaggtgtgggccctggaattcccagtctcttaaaaagtccatgtgtacgggtcccatatctacaaagtgaaacagaaatcaggtcacagggattgtgactttatagatcagagggctggtgagttactcaggaactggaatggtcaagagagggaggtaatatgtacacgataaataataacagcaactccaacatcagtaattgcattcactcatcaggtcctttcctgactattctgagacccctgaaaagtctcaatgattagctgaaagcagctgaagtcttcatagtcccaatcctggagtgaatacttgataaatgtcctcaaatgctcctgagaggttcaggcaggaattcttccaggacacttcatttccttatgtctgtttagtaagtggactcttcgctgatttggggactctcatcctaggtagaaagagtaagattttttttgtcttttgcactgatgatgagattttgcatcactgtatgcactcaatcacagagggtcactgggagcctatggtgacactgcccttacaatttgctcagaaatgtttatgctttttcttccctctaagctctgaccctgttttaggatctagcccttcttaaacgttcattcacagagaggccttggaggagtcatggagtccttatttctacagattgacaactgtgttcatggcttctattggccttatagaaatgtgggcagctttcaggtacacctcagtctctgtggtcagatgatctggttgatttgagctgttgaggaggatggttgatccatatgtccttgaatgattgtgtgcagaagaaccagcaactaatacttctcaggtcatactcacctgagaagcacagtgccaggcacactcatctttttcaaggtggtcaaccagaaagcagtcagttcactgcctctgtacgtgaagtatctctgaggaaaaacccattaagcctggtgttcactatggcaggcctgcctggaactcatctttcatgagtcatgtgcaaactcctccaactgatggttctggatccttgcagaccttccccctccggtgtgactgagggatggaaaactggaggaagaagagaggctgaaggaagaggttgccagacactgattcagctgtgaagctgctagccccacacagttggctccagagaggcaaactacaaaaatgtggctgaaaaagatgatgtgcataaaagaatccacatgcctcatatgtactttcagctaaaagacacagagggaccttccaaagtccaggtactttcctgttgatagcaaatggtgcagtatggcatataagataagtaatgataaaacgtcccggagagttgtattaagaccttgtttactcctctttagaggttagccttcaaggcagtataggttccaaacattttgtaaacatccagtgacttataaaatgtgataaaataaaactgagaaattacatgaagggcagggtttggaggactcagcaggggcagcatgagcaggcccagtcatacatttggttccctgccccagaacagttagtggaagtgcgtgcaccacctgccaaagccagggtggccttgggtattcccacttcagttccctcctttgttgtcacagccatgtcaaatcaatgacactaatctctgctcctgaactttaaacacattacctgacctctcaggtgaggacaagctattgagttaatgtgtcagcagcattggcccccaaggaaagatcttggtgagtgtctagattcacatggtaccatgtcaaggcagatgctgtgctgggcgaactctttagtttctttccagctcccctctggtagagtaatgcagcctttgggtccagtgaagagactaacagaaaagccagtcatctattgcatgtaattgtgttggcctaaggagggcctggtctacactgcattttctgactcctgggctgcaccagcattgtctaaggctaaggcattgtctgcctggctgcccgagtctgtagtgaccggcccacaacatggcagaccacacacagagtgacacagatggtgcccctgtgtccaggcttgaagcagatgagatgccaacctgtttgccctttgagtgacctccacggtggggccaggacccatgaatatctctttggagttctaccctgagagctgaggaatattttctcacttcatatggatcctacctggaagcctttgctatcgtcactggctcacagtcttgcttactcccctgtcctgagagtttaagacaatctgctaagcaggtatattcgaaaaggagttattaaaataaatggccggacaggtatatttgaaaagacgtgcagtcttgtcttagaggtatacatttgtgcattagactcatattcctgacattcaggaaaggtgacattattttacacacacttattgtcacaaatactgaactaacagccctgttttaccatccagaaggaacatgctggaaatagtctatctccaaaaaattctggtttaaaaatgaatgaatttaaaccatatcaattcatttaaaaatgttagacaatggaaaccatgttgccacaactcactgaattcctaagctttctgtgaaagaattaaaatgaggtttatagtgtctattttcatgtcattgtggttccctgctcttaataaaagtcaaattgaggtagaagttaatgggacaggtggagcctccactacccacagtggaaagtaactcttctctccacctgctctaggatgccaggaatcccaccagtgagagggtttgccctcctgtactgtaacataaaggggaaaaatatgtaaaatccaaattggctttcatggctcctgccttttcaggctgctagtagattcccattaggtgagaaacaaagctctatattaatcctagcctcccagagacgggaggaaaaagattaaagcaaagaataaatcctcgaaacttcctccaggtctcctttgctctagaggttaatcattgcaagataaaccatcctgtgtatgacagggtggaggagtgactcataggagggaggggattttcaggggcatggcacaggaaagagggaagagccaggggacagcttcccatgaagtcttggtgtcccctggtgcgttatgtaaatgatatcctgggttggaaggcgggggagcaggaaccaggtctacaggggcaatacagctacacatcccttccagcagacacagaacccagaaagcgaattaatgagacaaaaatgcaagccactccttcctgtacccagaatccccagagcctgggaaggggatgaggatcacactgtccatcatgatcagcagtttgtaatctgccgctgccatgttttcattgattagtcttcgtcagatctaagctaatcaaaycattcycactaccaaatgctgtccctaaaccctcctagtcaccaaaattagaaggtggatgggagaaatgcttatttattcattcatagatctgcataagataataataacttctatgcgtttgtagcgtccaacacttcagctacttctccttgaacatctcttttgatcttcaaaacagataagggaaaaggggccygattagcaccccaagtccaaggaaacaaagagaggagtttggacagttactcacagatagaggagcaccaggctgacagccaggagaagccaggtttccaccgccaaatttgggatgaggtccatcgccactttccttcktcaactgtgttctgtgagtcttccttttagctgagtgctgctgtttgctgggctgtttrcctggagcttcyctgccctgcacagcagtcttcagccaagctgctgaaagatttatgtgctggagaaggaggcagggctatagctgcagccaatagcaaagaatygcacacacccctttgctgacctcttttgagttcatgttctatgaggaatcatgaaaagcttaatcagtgttatcggggagtccaagggttctgggttcttatcagaaactcaagtggagccattggcatgaaatctattaaccctcctctcacctgcccctccatggctgccttcattctagaataattgaaatccatcctcacaagccacacctacacatctttacccacgaaattccctctgcctggagtgtacctgtgccctctagatgactcctacgtatccttccaagcccagccagacagaccccttctgctaaaatttttccttaccaacctcctcacacaaatgtaaccatttcctcctctgggtgcctcctatccccctcacacagtcctattgtcctcttttctctctaccaccattgtaagtttctatgcctgtttcccttagcagaggtgagctcctcaagggcacagtctggtattatttactttcatgaccctggttcctagcagggtactgtacacatggtgggtaaccaggaatgttggtggagttgtcttgggtgagattgctgggcgtctcatcccctctgactctgtggtgatagcwatagactaatggttgcttgggactcaaatgcagccacactgtgtcccaactaataaagttggtcttgttctgcaaaggaaaataatagaaatcatgttctgccacttaattcctcataaggtaacataacatgaagagacttacctgttgagagttgtactgaatctgtcaaggaagatactgtgtatcagaagaacacccaaccagtttgtgcctctcatctattcattcctgtattaaagcattcatgatgtattttaaaagctgtgctcccagtacttgggtacaacactgactaaggcccagacattagctcagttgttttgatttgtagatcccacaagtatgtgagaacttgcaatatctgtgtttctgtgcctggcttatttcacttaacatgatgacctccagttccatccatattattacagataacaggatctcatgcttttttcatggctgaattgtgctccattgtgtataattggagtactttctttatccattcatctgttgatggacacttaggttgcttccaaatcttggcatttgtgaatagtggctattgtgaatattggagtgatgttatctcttcaatatatgatttcctttcttccaggtatatacccagcatggggatttctggatattgtggtagctctatttaatgttaattttaatgttttgaggaacctccaaattgttctctatagtggttgcactaatttacaccaacagtgtacaagggttcccttttctccacattctcgctggcatttgttgttgcctgtcttttggataaaaaccattttagctggggtragatgatatctcattgtggttttgatttgcatttctctaatgaccagtgatgttgagcaccttatcatatgcctatgtggcatttgtatgtcttcttttgaaaaatgtctattcaaattttgcccattttttgattggattattagatttttccttacagagttgtttgagcgcttcatgtattctggctattaatctgttgtcagagtgtgactttgaaaatattttctcccattctgtggtttgtgtcttcactttgttgattgctttctttgtggtacagaagctttttaacttgatctgatccatttgtccatttttgctttggttgcctgtgcttgtggggtagttcttcagaaagttttgcccagaccaatatcctgaagagtttccacaatgttttcttgtagcagtttcatcgtttgaggtctcagatttcagttttgttttttgtttttttgttttttgtttttctgacagagtctcactctcttgcccaggctggggtgcattgtcatgatctcagctcactgccacctccgcctcctgggtccaagtgattctgccacctcagccttctgtgtagctgggactacaggcacgcaccagcatgtccagctaactcttgtattttttggtagacatgtggtttcaccatgttggccaggctggtcttgaactcctgacctcaagtgatacacccgcctcggcctctcaaaatgctgggattacaggcatgagccacggcactcagccaggtttcagtctttcgtccaccttgatttgatttttgtgtctggtgagatacagggttctagtttcattattctgcatgttaaaatccagctttcccagcaccagaagagactgtcttttcccccagtgtatgttcttgacaacattgttgaaaatgagttcaccgtaggtgtgtggaattgtttctgggttctctattctatttcattggtctgtgtctgtttttatacaagtaccatactgttttggttattatacctctgtagtataatttgaagtcaggtaatatgattcctccagttttgttctttttgctgaaggtagctttcgctattctgggtcttttgtggttccatacaaattttagggtttttttttttctatttctttgaagaatgccattggtattttgagagactgcattgaatctgtgcattgctttgggtagtatggacatttttaacaatattaatgcttacaatatataaacatggaatatccttcttttttgtgtcttcttcaatttccttcatcagtgttttacaatattaattgtagacatctttctcttaagttaattcccaggtatttagttttatttggggttattgtaaatgggattacattttttatttttgccagattgttcactgttggcatgcagaaatgctactggtttttgtatgttgattttgtatccagcaacattactgaatttgtttatcagatctaatagttctttagtggagtctttaagtgtttccatatatcatttggaaatcatttggaaatatcatttggaaatcattttcaaatatcatttccaaacattacttggaaatcatttgaacatcttcttgcttcctggcacaaaatgtatcctaggcttatcttgaacattcttaatcctggccctggaatcagccatttctctaaaaagctctggttcctttcagtggaaaatggtattaataagccaagatctggccactaagtgtgctcattgctattgaaatgccattgttacctagccctatcagtggagagaagtagggagtatatgtttttttgtacacacacacaaacacatacatacatttatgtctatctaattatcttgtcctcttgttatctttttatcacctatctaaccatttatctatctagaagggtatgaatatacatggatacatccattttaatctaatttcataggattcctgctagttttctccctttctgaatccatgactcttttctgcaaaagtgacacacctggcttccagtatactttatttacttatttcatcaatcccctttatgtagtgaaacctcacccatcccttcccactcatggatgccctcctcacctcatgccctaaatatgttctccatgccctgtttaggctctggctgctttttcaggccacccctctgtgtcgacattttctctgcttgcttggactcccacacacaggccgggctgtttctccacgtgaacacctacttgatcctcaccctactaggtctctgacttggaaccatcatgacactctcttttctaccttaatgtgtggccaccatctggctgccacccacctaatgactttaggataagttactcaggaagggaaagtaaagaaagaagtgggaacagacaaggaatgagtgtgtttagcctgttgcccaatcaattgaccaattgactgtttcttattaagtgttcattgcagtaagacagttgggagttgagaatggaatgcaagaggtgtaagaaaacatgtttcccatctcccagaaatatcaggggagatggtttgaaaacattaaatcaaaactaataatataataagggattcagttgtatgttataaaatgtatgtgcttcaaaaaggcataattttttttttttttttttgagatggaatctcactctgtcacccaggctggagtgtaatggtgcgtctcggctcactgcaacctctgcctccaggttcaagtgattctcctgcctcagcctcctgggtagctgagattataggtgcataccaccacacctagctaatttttgtatttttagtagagatggggtttcaccatgttggtcaggctggtctcgaactcctgacctcaggtgatccacccacctcggcctcccaaagtgctgggattacaggcatgagccactgtgcttggtcaaaaaaggcataattaaactatgaatgttctttctaagcaatgggcaaagtcwcagtggattaattctcacctatgttaataatcacattggagttctgacaaatgccccacaccaacaatggttacaatgatcacatatatttacttgttggttctcattcattcagttctatagatttctccttaatgttcaggaaagtatccgatgatacttttgtaagaggtttttattgatttgcttaatataaacttattatagaatgctccagataaaacagatgatataaatgtcactgttagagccatcaaaataattcttattttcattaataattttggatgaaattattgagaaattttgattcttttatcagagctcaggaggagttaatggtgctaactaggggtggctgagattgtcctgtgagaaacaaagaagccaaatctacttcccaagcactgatttggtcacttcctttatattcccaagtataacactctacacagacagggagagagctcagtgcatgtacagaatccctggttatttatgcagtacagtggatgaagcccatcttcatttcagggtactattcacaaagtaatttgaggtctctggtgttctaggtcacagcttttttgaagagcaaagcagaagtccttagggaaattcaggttccacttacggtcccatcccttgactcaacctttagaacaatgggtttttctggttgaagaagtcctcctaagcgtaatttcagcgggatctgcaacagttaaacaagcatattgagaagcattaaataaagcaaaattagaaactgtagcatcaaagtaaacaaaaaatgtattgctgactatgcacatagtttgtgaccattacaaactatgtggaaattcagggaggtaaagcaagacaaagatgttccaaggaaaatatgaggaggatttcatatcagttttgaaataattctcctttgctaaaagatcaataacaagggtgacaccacaccaaggttggacaggcagtcgctgggcaggtgcccttgcagaaatatttttgtgtaaggttgggattgcctttgtgcaaacttgtggtttcgcaaagcgtttgtgatagttgtgttatcaggcacacgagcatgggaatcccctcttcacagcctgctttatttgtcatgatttttaaacacacacactgacacacacacacaaatacacacgtgacatcatttggttctgacaacgtccacatttgctattgtaaaacttttcaaggcttgtcctaccaaggatcccataagtcacctagtgtcgaggtcttcagtgaaactaggctgggagccttgtggttaccacttttctccagactttggtggcccagggactcccagcatcacgttctttccagtgtcttcccttgttctttttttcttccttaggtgaccttttatcacatgcattgtctcagaccctctaatatgtgctcataaatgcatggcattatctccttcccacatcaatacactttcaattaaaagccaaaactcggggggtggagccaagatggccgaataggaacagctccggtctacagctcccagygtgagtgacacagaagacgggtgatttctgcattttcatctgaggtaccgggttcatctcactagggagtgccagacagtgggtgcaggacagtgggtgcagcgtgctgtgcacaagccgaagcagggcgaggcattgcctcacttgagaagcgcaaggggtcaaggagttccctttcctagtcaaagaaaggggtgacagacagcacctggaaaatcaggtcactcccaccctaatactgtgcttttccaacgggcttaaaaaacggcacaccaggagattatatcctgcacatggctcggagggtcctatgcccatggagtctcactaattgctagcacagcagtctgagatcaaactgcaaggcggcagtgaggctgggggaggggtgcctgccattgcccagacttgataaggtaaacaaagcagctgggaagctcaaactgggtggagcccaccacggctcaaggaggcctgcctgcctctttaggctccacctctgggggcagggcacagatgaacaaaaagacagcagtaacctctgcagacttaaatgtccctgtctgacagctttgaagagagtagtcattctcccagcacgcagctggagatctgagaacgggcaggctgcctcctcaagtgggtccctgtcccctgagcagcctaactgggaggcaccccccccccagtaggggcagactgacacctcacacggccaggtactcctctgagacaaaccttccagaggaacgatcaggcagcagcatttgcaggtcaccaatatctgctgttctacagccactgctgttctgcaggcaccactgctgatacccaggcaaacagggtctggagtggacctctagcaaactccaacagacctgcagctgagggtcctgtcagaaggaaaactaacaaacagaaaggacatccacaccaaaaacccatctgtacatcaccatcatcaaagaccaaaagtagataaaaccacaaagatggggaaaaaacagagcagaaaaactggaaactctaaaaagcagagtgcctctcctcctccaaaggaatgcagctcctcaccagcaatggaacaaagctggatggagaatgactttggcaagttgagagaagaaggcttcagacgatcaaactactccaagctacaggaggaacttcaaaccaatggcaaagaagttaaaaagttgaaataaaattagatgaatggataactagaataaccaatacagagaagtccttaaaggagctgatggagctgaaggccaaggattgagaactacatgaagaatgcagaagcctcaggagctgatgcgatcaactggaagaaagggtatcagtgatggaagatcaaatgaatgaaataaagcgagaagggaagtttagagaaaaagaataaaaagaaatgaacaaagcctccaagaaatatgggactatgtgaaaagaccaaatctacgtctcactggtggacctgaaagcgatggggagaatggaagcaagttggaaaacactctgcaggatattatccaggagaacttccccaatctagcaaggcaggccaacattcagattcaggaaatacagagaatgtcaaaaagatactcctcgagaagagcaactccaggactcataattgtcagattcaccaaagttgaaatgaaggaaaaaatgttaagggcagccagagagaaaggtcgggttacccacaaagggaagcccatcagactaacagctgatctcttggcagaaactctacaaggcagaagagagtggggaccaatattcaacattcttaagggaaagaattttcaacccagaatctcatatccagmcaaactaagcttcataagtgaaggagaaataaaatcctttacagacaagcaaatgctgagagattttgtcaccaccaggcctgccctaaaagagctcctgaaggaagcactaaacatggaaaggaacaactggtaccagccactgcaaaaacatgccaaaaggtaaagaccatcaaggctaggaaaaaaatgcatcaactaacgagcaaaataaccagctaacatcataatgacaggatcaaattcacacataacaatattaaccttaaatgtaaatgggctaaatgctccaattaaaagacacagatgggcaaattagataaaaagtcaagacccatcagtgtgctgtattcaggaaacccatctcacatgcagagccacacataggctcaaaataaagggatggaggaagatctaccaagcaaatggacaacaaaaaaaggcaggggttggaatcctagtctctgataaaacagactttaaaccaacaaagatcaaaagagacaaagaaggccattacatraaggtaaagggatcaattcaacaagaagagctaactatcctaaatatgtatgcacccaatacaggagcacccagattcataaagcaagtccttagtgacctacaaagagactttgactcccacacaataataatgggagactttaacaccccattgtcaacattagacagatcaacgagaccaaaagttaacaaggatacccaggaattgaactcagctctgcaccaagcagacctaatagccatctacagaactctccaccccaaatcaacagaatatacatttttttcagcaccacacctattccaaaattgaccacatagttggaagtaaagcactcctcagcaaatgtaaaagaacagaaattataacaaactgtctctcagaccacagtgcaatcaaactagaactcaggattaagaagctcactcaaaactgctcaactacatggaaactgaacaacctgctctggaatgaccactggctacataacaaaatgaaggcagaaataaagatgttctttgaaaccaacaagaacaaagacacaacataccagaatctctgggacacattcaaagcagtatgtagagggaaatttatagcactaaatgcccacaagagaaagcaggaaagatccaaaattgacactctaacatcacaattaaaagaactagaaaagcaagagcaaacacattcagaagctagcagaaggcaagaaataactaaaatcagagcagaactgaaggaaatagagacacaaaaacccttcaaaaaattaatgaatccaggagctggttttttgaaaagatcaacaaaattgatagaacgctagcaagactaataaagaagaaaagagagaagaatcaaatagatgcaataaaaaatgacaaaggggatatcaccacccatcccacagaaatacaaactaccatcagagaatactacaaacacctatatgcaaataaactagaaaatctagaagaaatggataaattcctcgacacatacaccctcccaagactaaaccaggaagaagttgaatctctgaatagaccaataacaggctctgaaattgtggcaataatcaatagcttaccaaccaaaaaagtccaggacccatcgtctcagcccaaaatctccttaagctgataagcaacttcagcaaagtctcaggatacaaaatcaatgtacaaaaatcacaagcattcttatacaccaataacagacaaacagccaaatcatgagtgaactcccattcacaattgcttcaaagagaataaaatacctaggaatccaccttacaagggatgtgaaggacctcttcaaggagaattacaaaccactgctcaatgaaataaaagaggatacaaacaaatggaagatcattccgtgctcatgggtaggaagaatcaatattgtgaaaatggccatactgcccaaggtaatttatagattcaatgccatccccataaagctaccaatgactttcttcacagaattggaaaaaactactttaaagttcatatggaaccagaaaagagcccgcattgccaagtcaatcctaagccaaaagaacaaagccgcaggcatcacgctacctgacttcaaactatactacaaggctacagtaaccaaaacagcatggtactggtaccaaaacagagatattggccaatggagcagaacagagccctgagaaagaatgccacatatctacaaccatctgatctttgacaaacctgacaaaagcaatggggaaaggattccctatttaataaatggtgctgggaaaactggctagccatatgtagaaagctgaaactggatcccttccttacaacttatacaaaaattaattcaagatggattaaagacttacatgttagacctaaaaccataaaaaccttagaagaaaacctaggcaataccattcagtacagaggcatgggcaaggacttcatgtctaaaacaccaaaagcaatggcaacaaaagccaaaattgacaaatgggatctaatgaaactaaagagcttctgcacagcaaaagaaactaccatcagagtgaacaggcaacctacagaatgggagaaaatttttgcaacctactcatctgacaaagggctaatatccagaatctacaatgatctcaaacaaatttacaagaaaaaaacaaccccatcaacaagtgggtgaaggatatgaacagacacttctcaaaagaagacatttatgcacccaacagacacatgaaaaaatgctcatcatcactggccatcagagaaatgcaaatcaaaaccacaatgagataccatctcacaccagttagaatggtgatcattaaaaagtcagaaaacaacaggtgctggagaggatgtggagaaataggaacacttttacactgttggtgtgactgtaaactagttcaaccattgtggaagtcagtgtggcgattcctcagggatctagaactaggaataccatttgacccagccatcacattactgggtatatacccaaaggattataaatcatgctgctataaagacacatgcacacttatgtttattgtggcactattcacaatagcaaagacttggaaccaacccaaatgtccaacaacgatagactggattaagaaaatgtggcacatatacaccatggaatactatgcagccataaaaaatgaagagttcatgtcctttgtagggacatggatgaaggtggaaaccatcattctcagcaaactatcgcaaggacaaaaaaccaaacaccgcatgtactcactcaaaggttggaattgaacaatgagaacacatggacacaggaaggggaacatcacactccggggactgttgtggggtagggggagggggtagggatagcattaggagatatacctaatgctaaatgacgagttaatgggtgtggcacaccaacatggcacatgtatacatatgtaacaaacctgcacattgtgcacatgtaccctaaaacttaaataataataaaataaaataaaccttctgtctcattgatctgtctaatattgacaatggggtgttaaagcctctcattattattgtgtggagtctaagtctctttataggtctctaaggactgctttatgaatctgggtgctcctgtattgggtgcatatatatttaggatagttagctcttcttgttgaattgatccctttatcattatgtagtggccttctttgtcttttttgatctttgttggtttaaagtctattttatcagagaataggattgcaacccctgcttttttttgctttctgtttgcttagtagatcttcctccatcctcttattttgagcctatgtgtgtctttgcatgtgaggtgggtctcctgaacacagcacaccaatgggtcttcactctttatccagttcatcagtctgtgtcttttaattggggcatttagcccatttacatttaaggttaatattgatatgtgtgaatttgatcctgcaattatgatgttagctggttattttgcccattaattgatgcagtttcttcatagcatcgatggtctttaccatttggcatgtttttgcagtgtctggtagcagttctttctttccatgtttagtgcttccttcaggagctcttgtaaggcaggcctggtggtgacaaaatctctcagcatttgcttgtctgtaaagtattttatttctccttcacttatgaagcttagtttggctggataagaaattttgggttgaaaattcttttccctaagtatgttgaatattgacccccaatctcttctgttttgtagggtttctgctgagagatctgctgttagtctggtggacttccctttgtggggaagccgacctttctctctggctgcccttaacattttttccttcatttcaaccttggtgaatctgataattatgtgtcttggggttgctctttttgaggagtatctttgtggtgttctctgtatttcctgaatttgaatgttggcctgctttgctagtttggggaagttctcttggataatatcctgaagagtgttttctgacttggttccattctccctgtccctttctgatacacctgtcaaatgtagatttggtcttttcacatagtcccatatttcttggaggctttgttcatttcttttcacttttttttctctaatcttgtcttcttgctttatttcattagtttgatctttgatcactgatatcctttcttacagttgatcgaatcggctattgaagcttgtgcatgcatcacgaagttcttgtaccatggttttgagctgtcaggtcatttaaggtcttcttgacactgtttattttagttagccattcatgtaacctttttccaaggttgttagctatcttgtgatgggttagaacatgctcctttagctcggataagtttgctaataccgaccttctgaagactacttctgtcaactcatcaaactcattctctgtccagttttgttcccttgctggtgaggagctgtgatctttcggaggagaagagatgctctgttttttggaattttcagctgttttgctctggtttcttcccatctttatggttttatctatctttggtctctgatgttggtgacctacaaatggggttttggtgtggatgtcctttttgttgatgttgatgctatttctgtctgttagtttttcttctaacagtcagactcctcagctgcaggtcttttggagtttgctggaggtcctcttcagaccctgtttgcctgggtattacctgcagaggctgcagaacagcaaatatttctgcctcatccttcctctggaagcttcatcccagaggggcacccgcatgtttgaagtgtctgtcggcctctactggaaagtggttcccagtcaggctacaggggggtcaggaacacatttgaggaggcagtctatccgttctcagagctcgaataccgtgctgagagaaccactgctctcttcagagctgtcagacagggacgtttaagtctgcagaggctgtctgtctcctgtgttttgttctactctgccctgcccccagaagtggaatctacagaggcagtaggccttgctgagctgcggtgggctccacccacttcgtgcttccaggcctctttgtttacacagtaagctactcaagcctcagcaatggctgatacccctcctctatcaagctgcagcatatcaggtggatctcagactgctgcactagcagtgagcaagtctccgtgggtgtggcacctgccgakcgaggcacgggagggtatctcctggtctgcctgttgctaagactcagttggaaatgcagaagtcacctatcttctgcctcaatcttgctgggagctgcagactagagctgttcctattcggccatcttggaaatgcttcccttgattaatatttcaaatatacttaaccctgcgtctaattggggctgaaaacagttgaatccaatgaaatcagacttgctggcagttagaggaatcttatttggagacatcataagggaaaggagagaaaacagaggaggtatttgaaatgggaaatttaaaatcactcttgaattttctcaaagtgctgtagatactgaatgacttatcattgtgtgtaaactaggtaactccttgtctttctgatgcctttttgctttttcatgtattgtctctaaaatctcataaatccttgaatgatcacctccaggggcacatggggaaactgaggctgagggaaagagagtgagtgtcagaagggaatgcacagtcttttatctctgttcatcatccttttcatttatttcatcagctcgctctagaattctagcagaattaggaagttacagacatcagggacctcttttagtctagcagatttagataagtctgaggcatgttgttgagtgagaaaaggagtgagtgacagaatgacaaagtggactcactttccagttttccagcttaayatggaagttctgagaaaatgtcccctctacacattggacacagcaaattacaacacttgctcagcgttttcactgaaactgaaaaacaaactttcctgttttytacatttcagggttgatgttttacctgtgcaaacaaagatcccaggaatgtttatcttggggggtacatctactaaagaactgacctagaaaaggtggcggggaaattattgcttttgcaaagggaaaaatatgaaattcctgggcagtaattagacaacaaaaccctcacttggaagaattggaatcagggaaacaagcctcaggtatgcgggaaagatgatctaagccacagagctgactactgctgctgctggccctgtggagataagctcataattttccatccagaggccaggccctagacagagcatcagaccaggttaggcacaaaggctcgaccaaagttcacagtccatgtggcacatatgacattttattcagcaaaattaaatatttaataatttcatcaaattatcacctttctagtgattttgyatatgattctgcctttgtttaaaaaaaaaaccacaaattcattttatgcttaaatatctgagtttgatagataaccactatctcatctcagttatatccactccctgctcagactcacccataaggtgcagcctttgaaataaaagaagtaaagcagaacacctttgytctgactcccaaagctgcaaaagatgtcatggggagtaagagctggggtagagccatggaaataccttcaggggatttagcattttttggagaggattcaagcaagtgcgaatgacccaatggtaaatacttgagctccctaataaagtgagtttcaaagctgtccaggaggtaggggaaaaaggctactcctgagctcttgctatagagaggaaagtttgactctcatgtacacagatagcaagccacaaatgggggctccttttcctactcttaatactaactaaatatgactgtaccttcctgggaacctacatggggcaaaagaaaaatgttctttatggtgctcacaaagtctgcacatcaagttctgaacatcaggttgccgatatacctgagatttggactgttcaactgaggcaaacctgaggttcctgagagttagcaagagagtcccggggtaaaccttgccatgctctggatgatgcctatacactgtttctgaaagtgtaaaacctcagaccttcctcctgaggagaagcagttttactgatggaactaagctgctctctccaatcataagaagccaaagagtgagctcaaaaacactcacctgatggtaggacaaagtagttcccaaaaaaagcagaggtgtgggccctggaatgccaagcttcttaaaaagtccatgtgaatgggctccatatctacaaactgaawcagaaatcaggtctcagggattgtgactttatagatatgggggctggtaagtcactgactgaggaactggaatgctcaagagaaggaggtaacattaaggcaataaatgataacagtaactctgacagcaatgattatatttgtacatcaagtcctttcccgtctccaccatgagacaccaaaaagtcacaatgattagtcgaaagcagcagaagtctttatggtcccaatcctggaatgaatacttgataaatgtcctcaaacgtgagtgctcctcagaggttcaggaaggaattcttccagggcacttcatttccttatgtctatttagtaagtggactcttccctgatttggggattctcatcctaggcagaaagggtgactttttttttttttctcttctgcagtgatgatgagattttgcatcactgcatccactcagtcacagagggtcactgagagcctatggtgaccatgtctttagaatttgtgaagagtcttttatactttcctttccctctaagctctgaccctattttaggatctggcccttcttaaactgtcattcatagaggggtgtcagaggagtcacagagtccttatttctacagattgacaactgtgctgaaggcttccattggcctcgtagaaatgcaagcacctttcagctacacctcagtctctgtggccagatgatctggttgatttgcgctattggggaggatgattaactcatatttccctgaatgacagtgtgcagaagatccacaacttaaaaaaccaatttccaggacattcctcctcttgtggaatctagccttccaactggtggtattcacctgataataagcacactgccagtgatatggtctgaatctgcccctacgcaaatctcatgtggaaatgtaatccccaatgctggtggtggggcctgatggaaggcgattgtatcttaggggcagtttctcctggtttcacaccaaccccctttgggtrtttcctcgtgacaatgagtttttatgagatgtggtggcttataagtgtgtggcacctcctccccaccctctcttgcttctgctccagccatgtaatatctgcctacttctccttcaccctctgccatgattgaamatttcctgagggctccctagaggcagaagtcgctatgcttcctgtagggcctgtagaaccatgagccaattaaatctcttttatttataaattacccagcctcaggtatttctttacagcgatgtaggaaaggactaatacacccagatatgctyacttttttcaaggtgatcaatcacaaagcagtcagtttattgcctctgcacatcaagtatctctgtaggaaaacccattaaggctgctgctccctatggcaggcctgcttgcaactcatctttgatgggtcatgtatggactcccccaactgagggttctggatatctgaagaccttcccagtctgatgttactgaggrgtggaagactrgaggaagaagaaaggctgatggcagacatcaccagccatcaactcaaccgtgaatctgctagtcccacaaggttggycccagagaggcaaattaggaaaatgtggctgaaaagtatggtgtatataaatggatccatatgcgtcatgtgtgctttcagctgaaagacaggcaccttctaatgtccaggtaccttcctgttgatagcaaaaggtacagtattccacataagtaaacataaaatgttccagacagttgaatgaagaccttgttttctcttctataatgggtagcacttaaggcagtataggttccaaacattctgtacaaatccagtgactctgataatatgtggtaaaatacaactgagaaatggcatggagggtcgtgtttggagatcccagcagaggcagcatatagtgcatttggatccttgccccagaatagttagtggaaatgtgtgcaccatctactgaaacyagggtggccttgggttttctactcctgttccttcttttattgtcacagctatggcaaatcaatgacactaatctctgcttctacactttctagaagttacgtgatctctcaggtcaggacaaactattgagttaatctgtcagcagcactgtcccccaaggaaagatctaggtgagtgtctagactcacatggttccatgtcaaggcagaggctgtgctgggcaaactgtttagtttctttcyagctcccctctgtttggtagagtaataccacttttggttccaatgaagaggctaacagaaaagccagtcatctattgcacgtaattgtgttggcctaaggagggcatggtctacactacagtttctgactcctgggctgcaccagcattgtctaaggctaaggcattgtctgcctggctgcccragtctgtagtgaccgccccacaacatggcagaccacgcacacagtgacacatttgatgtccctgtgtccaggcttgaagcagatgagatgccaacctgtttgccttttgagtgacctccactgtggggccaggacccatgaatatctctttggagttctaccctgagagctgaggaatattttcttacttcatacggatcctacgtggatgcctttgctatcatcactagctcacagtattgcttactcccctgcctgacagtttaagataacctgctaagcaggtatattcaaaaaggaggtattaaaataaactgtcagrcatgtatatttaaaaagacatatctttttaaatataaaaagatatacataaatatgtatatcgcagtcttgtcttagcgatatacattcatgctttagactcatattcctgacattattctggagaggtgatgttattttacacacatttattgtcacaaatactgaactaacagccctctttcatcayccagaaggaacatgctggaaatattccatctccaaaaaattctgatttaaaaatgaatgaatttaaaccatatcaattcattttaaaatgttagacaatggaaaccatgttgccacaactcactgaattcctaagctttctgtgaaaaaattaaaatgaagtttatatttcctattttcatgtcattgttgttgcctgctcttaaaagtcaaattgaggtagaagttaatgggacaggtggagcctccactaaccacagtggaaagtaactcttctctccacctgctctaggatgccaggartcccaccagtgagagggttcatcctcctttactgtaacacaaaggggaaaaaatgtgtaaaatccaaattggctttcacagctcctgccttttcaggctgctagcagattcccattagctgagaaacaaagctctatattaatgctagcctcccagagacgggaggaaaaagattaaagcaaagaataaatcttcaaaacttcctccaagtctcctttgctctggagattaatcattgcaaggtaaatagttctgtgtatgacagggtggaggagtgagtcataggagggaggggatgttttgggacatggcacaggaaagaggaaagagccrggggacagcttcccgtgaagtcttggtgttccccggtgtgttatgtaaatgatatcctggggtggaagttaggggagcaggaaccaccaggtccacagaggaaaaacttctacacatctcttccagcagacagagaacccagaaaatgaaggtaatgagacaaaaacccaagctgctccctcctgcccccagaatcccgagaacctgggaaggggatgaggatcacacttctcgtcttgttcagcagtttgtaatctgcctttgctgggttttcattttcattgattagtataggtcaaatctaagctaatcaaatcattcccactaacaaatgctgtccccaaaccctcctagtcaccaaaattagaaggtggctgggacaaatgcttatttatttcttcataaatctgcataagatcaataataacctctatgtgtttgtagcatccaagaagctactcctccttgaacatctcttttgatctttaaaacagatgagggaacaggggcctgagtagcaccccaagtccaagttaacagaggagaggaatctggacagttactgacagatagaggagcacmaggctgacagccaggagaagccaggtttccaccgccaaatttgggatgaggtccatcgccacttgccttcttcaactgtctcctctgagtcttactttcagctgtgtgctgttgtttgctgggctgtctgcctggagcatccctgccctgcacagcagtcttaggtcaagctgctgaaatgtttatgtgctggagaaggaggyggggctgcagctgcagccagtagcaaagaatcgcacacacccctttgcttacctcctttgagttcatattctatggggaatcataaacaacttaatcagttttatcagggagtccacggaacctgagttcttatcagaaactgaagtggagccattggcatgaagcctcttaaatatcctctcacctgcccttgtttccatggctgtcttcattccagaatacttgaaatccatccccacaagccacaactgcagatctttacccatgcaattccctctgcctggagtgtacttgtgccccctagatgactcctacacatccttgcamgcccagccagacagaccccttctrttaaagtctttccttaccaacctcctcacacagatgtaaccatttcctcctctgggtgcctcctatccccctcacacagtcctattgtcctatttcctctctaccacccttgtgggtttctgtgcctgtttcccttagcagaggtgagttcctcaagggcacagtctggtattatttactttcatgaccctggaccctagcagggtactgtacacatggtgggtgaccagaaatgttggtggagttgacttgggtgagattgctgggcccctgtgtgtcatcccctctgagtctgtggtgatagcaatagactaatggttgcttggggctcagatgcagccagcactgtttcccaactaatgcaattggtcttgttctgcaaaggaaaataatagaaggcatgttctgccacttaattcctcagaaggtaacatacatgaagagacttacctgttgagagttgtactgaatgtgtcaaggaagatactatgtatcagaagaacacccaaccaccctgtgcctctcacctattcattcctgtattaaagcattcatcatgtattctaatggctgtgctccctgtacttagggtacaaaattgactaagacccagacattagctcaattgttttgatttgtagatcccacaaataagtgagaacatgcaatgtctgtctttgtgtgcctggcttattttacctaacataatgacctgcagttccagccacgttattataaaggacaggatctcatgcttttttcatggctgaattgtactccattgtgcataagtgaagtactctctttacccattcatctgttgatggacatgtaggttgcttccaaatcttggcatttgtgaatagcagctattgggaacatgggaatgaagatatctcttcaatatatggatttcctttcttcctggtttatacccagcaccgggatttctggatcttatgataggtccattttaatgttttgaggaacctccaaactgttctctatagtggttgtaataatttacaccaacagtgtacgagaattcccttttctccacattctcactggcatttgttattgcctgtcttttggattaaaaccattttagctggggagagatgacattgtagttttgatttgcatttctctgatgatcaatgatgttgagcacattttcatataactatgtggcatttgtatttcttcttttgagaaatgtctgtataaatattttgcccattttttgattattaggattattgaattttttccaaagagttgtttgtgctctgtgtatattctggatgttaatctgttgtcagagtgtttgaaaatattttctcccattctgtggtttgcgtcttcactttgttgattgctttctttgcagcacagaaactttaacttgatgtgattccatttgtccatttttgcattggttgcctgtgcttgtggggtattacttcagcattttttgttcagaccaatgtcctgaagagtttccacaatgtttcctgtagcagtttcatcatttgagatcttagatttcagtcttttttttttttttttggaaccagagtcttactctgttgcccaggctggcatgcattggtatgatcttggctcactgccacctatgcctcatgggtccaagtgattctcccacctcagcctcctgagtagctgggactacaggcatgcaccaccatgcccagctaacttttgtattttttggtagagatagggtttcaccttattggccaggctggtcttgaactcctgacctcaagtgatctgtctgcctcagcctctcaaagtgctgggatcacaggcatgagccaccgtgtttggccagatttcagtctttcatccaccttgatttgatttttgtgtctggtgagatataggggtctagtttcattcttctgcatattgatatccagctttcccagcaccagaggagaccgtcttttccccagtgtatgttcttgaaaacattgtcaaaaatgagttcactccaggtgtgtggacttgtttctgggtgctctattctatttcattggtcaatgtrtctgtttttatacaaacaccatactgttttggttattatacccctgtagtataatttgaagtcaggtaataagatttctccagttttgttctttttgctgaagatagctttggctattctgggtattttgtggttctatagaaatgttagaattttttcctctatttctttgaagaatgtaattggtattttgagggattgcattgaatctgtacattgctttgggtagtgtggacagttttaacaatattgattcttacaatatgtaaacatggaatatccttctgtttttgtgtcttcttcaatttccttcatcagtgttttacagtattcattatagagatctctctcttctttgattaagttaattcttaggtatttagttttatttgtggctattgtaaatgggattacttttttatttttgccaaattgttcactattggcatatagaaatgctactaatttttgtatgttgattttgtatcctgcaactgcaactttactgaatattttatcagttctartagttccttggtggagtctttaggtttttgcaaatatcatttgaaaataatttggagttatcatttggagggtctttttcaaatatcatttccaaacattacttggaaatcatttgaacattttcttgcttcctggcacaaaatgtgtcctaggcttgtcttgaaccttcttaaccctggccctggaatcaggcatttctctaaagagctctggttcctttccatggaatatggtattcataagccaagacttgggcgctaagtgtgctcattgctattgaaatgtcattgttacctagacctatcagtgaagagaagtaggaaatatatggttttttttgtacacacacacaaacacatgtatacatttcatctatctatatatctatcrtatatctgttatctatcacctatctacccatctatccatctagaagggtatgaatatacacgaatacatccattccaatctaatttcataggattcatgctagttttctccctttctgaatcmatgactccgttcttcaaagatgagaagcctggcttctatcatccttaatatatttacttctttgataaatcccctttatgtaaccaaacctcacccatcacttcccactcatggatgccctcctgacctcacatgggttctccatgctctatttaggctctggctgctcttgtaggccacacctctctatgaaccccttctctgcttgcttggactcccacacccaggcaggctgtttccacatgaacacccagtttgtcctcatcctacttggtctctgacttggaaccaccatgactctcttctctaccttaatgtgtggccaccatctggctgccacccacctaatggctctagggctaaattattcagaaagggaaaataaaggaagaaataggaaaagaaaagaaatgagtagtttcagccttgttgtccaatcaattgaccaatcaactgttttttttattaaatgttcattgcatttagacagttgggagttgaggatggaatgcaagaggtgtaagaaaacatatttcctgtctcccagaaatatcaggggagatgggctgaaaacattaaatgaaaactaataatataatackggcttcagttgtatgttacaaaatatatgtgctacaaaaaggcataattttattttttagatgcagtctcactctgtcactcaggctggagttcagtggcatgatcttggctcactgcagcctccacctcccaggttcaagcaattcccctgcctcagcctcctgggtagctgagattacaggcgtgtgccaccatacctagctaatttttgtatttttagtagaaagggggcttcacyatgttggtcaggctggtcttgaactcctggcctcagatgatctgcctgccttggcctcccaaagtgctgggattacaggtgtgagccactgtgtctcatcaaaaatgtcataattaaactatgaatattctttctaaacaatgggcaaagtcatagtgggttaactctcacctatgttaataatcaaattgggctgggcaccgtggctcatgcctgtaatcccagcactttgggaggcccaggcaggtggatcataaggtcaggagatcgagagcatcctggctaacacagtgaaactccgtctgtactaaaaatagaaaaattagccgggcgtggtggcaggcacctgtaatcccagctactcaggaggttgaggcaggagaatggcgtgaacctgggaggcagagctcgcagtgagccaagattgcaccactgcactccagttcccacaccaacagtgattacaatgatcaaaatatttagttgttggttctcagtcattcagttctatagatttctccttaatgtgcaggaaacatccaataatacttttgtaaagaggtttttattgatttgcttaatataaagcttactatagaatactacagatataacacatgatataaatgtcactgttagagccatcaaaataattcctatttttattaatgattgtggttgaaattattgagaaatgttaattatgttatcagagctcaggaggagttaatggtgctaactgggggtggtggagatagtcctatgagaagcagagaagccaaatctacttccccagcactgatttggtcatctcctctatattaccaagtataacactctatacagaccatgagagagcacaatgcacgtacagaatcccygattatttatgcagcacattggatgaagcccgtcttcatttcagggttctatttgtaaagtaatttgaggtctctggtgttctggggcacagctttcttraagagcaaaccagaagtccttagggaaatcaggctccacttacggtctcatcccttgactcagcctttagaacaatgggtttttctgttagaagaagtcctccaaagcgtaatttcagggggatctgcaacagttaaacgagcatattgagaagcattaaataaagcaaaagtagaaagtatagcatcaaagtaaaaaaaaattactgacaataatgctttgtaaacatataaaaactactttcagcactataaatcttggattcgttatacttactctataagatgtgtgaagattggatagtgagaacattcatcatctatcatttaacaaaatattcatggagcacctattctgtgtgaggtttgacctgagacaaattcatgggaacccgtgttcttttttgatttaaattttaacgaaaatggatgagttttaaaaatttaaaccagattattaggtataacggtaaactttttaaaccatcttatgaagttaattttgtgtatgttgaaacttgcaaggtaatcctgagtagctattgtacattttaattatgtggacagtcttcaacttccacagtccagtaattcctctcaattgaacccatctagtgtaaagatgggaagacaccttcaggaagcattatcgttttattttttaacatcttctcttggtttacaagggtagtgcaagtggggaacctctcaattcctacagtgttttgactcaacttttcttattgagacactccttcagtgttgaggggacacaatagagtgatattctgatctccatggagtgatgggcaagaaaattgccatggagatccagaagtgccagcttgggacttccaagggagtaccttccccatccyaggtgtgccagaggaccgccttctctcagggctgagtctcctgtctgagcacacatacaggatagctacatagctggcctaaagccacaaataatgtggaatatgaaaataatatggaaaccatctctatcttcttcctcttctatgtagaaagcctgcttaaggtgtggagttgcttaataaatacatgagacctagaaataagatttatagggtcttgcttaatatgaatcaatgacatctgttctttaacttcttcagagaaaaggttccaaatctttctataaatataacacattatttaaaaattttcaaaaggcatgaatatattttccctgcagacagacatgcatgtgcacatgtgcaagcacacacacatgcaaatacatgaatgtcatttgctaaatgttcacattaaaaaacttaatatttgtatgcaaaccaatcgactgcatatcactccttaaacatttaccaaatgaccaaatgcttgagttagatgaggtcacttgcaaggcaccactgggatattttaaatggaataaaatgagargatattgttaatggaggggggaagacattcttagataaagagaaaatatagagaacaaaactcaatgatttaatggcaaattatgaaattatawgataatagcctccagtaactaataacagagcagaggagtaaatgagccctggactaggtcaagaagacaccttggaggggcttgggaattgaaytaggacttgaaagataagaacagaatgaggagaagaaaggaaagaagattagcagagttataattgagttgaaaaggagcccagttggttggagctaggcacctggaaggtgaggtcagtaaggatggccttggactgtggtagtccttcgtatccaatagaactaccttaaattagtcattttccaccttggcttcacatgagaagcaatgggggagcttttaaagccacactctgggcaaattagtttagaatttctgagatgttccaggcatcatgaatttttaaagctccctggtgattccaatgtacagctagtggttgggagccactgtcatgagaaaacttctacaagttctgggaaggaagagcatcattcaaaagtcaaaacaagataataagtgcacctcatgattgtgcaaaatacttccccatctttccaattgacttgaaactgaatttaattttgctcaagttcaaggagactgtagataatcatgtcatgctagtctacattgacattgcatgatgtttttaatgctacagcttttgaactccagaactgaagcacccttaaagatcatagatgggtccaaatagattccttggcccatagaacaaattattaaaagattaagtgagtgtattcttttttaaatatatagaccattcagttaaaataattgttaataaaacattattaatgcagaaaattgactgacctgtgtttctttacaaggtttgaaggagaagttctgaaggactctgactagagcaagtttcatgttcacgagagcaaacctcatgccaatgcagtttctgggtccacttccaaagggtgtgtatatgtaaggatctatgttgtccttgttctttttactgaacctggttccatattggtagatattttaaaagttaaagacataatacctctaagagttacatgttagggtttcttacttagggcccacccctctactagcagtacacaggatacttttgtgggctagtcactgaaatcctgctatgcatattttgctatgagaattgtaaggtacagatcctttctactctccttacattataggagctttcagtcttgttgagaggagataaatactgttgcaaagtatatttatttctaaacactcaaattatagtcaggatggtgatgtgttcacactacaaaaggcacataagtgatgagaatgactgacagaaaagtagattcctgcctcaagtcacccttatgttggtcatgaggaaggagaagaaattgtcttgcactacttcaaaattgttattttgcactttccttctcctctcgtctcttgtttttctaattctcctccttctcctccctaccttgtcttacccctccttctctcctccttctcctccttcttctaatctccatctctccttctttctcccccacacctccatagaatagtttaagtcagataatttacacaggcatatgatgctactgtattgatggaaagcagtgtcatcactgctttctttgtctatctgttgcactaacctataaattctttgaagattagacgcatgttttttattcaaatttgattcctgaagatttgaktatattcaggaaaaaatattcatttgtgggrcataataatagcattgtgatcatgtgtttttaaaagagtccttacattttggacacttatgacccataaggacataattgaggaccttcatcttaagttgctgggactgtgactggctatagttttcttttatctagtctgtggtttgtaaagtgtgacaatgatcaatttcatgatttgaaaaaaccttttaaacataaaaagacaagcaaaygattgtacaagcccagactgtcctgtagagaggcagaatatgcttgaaccaggctggttcagggagggctcccttcccaggggcctcctacctttcagggaggaacttctcaggctctstccagtactttgggtcatgatgaagaacatagcttggaatcatcaccaccacccctttgggaataaacatcccattgatttcaacatcttttttgcagaccctctcaagtctcatagcaactgggaataatctgagtgtttcattcaccaccatgtcaagatactccaactgtagcacagtatcataggtgggtggtgcctgaaaagaaagaaacagatttggataaattgagatttttgaattaacttttaactcagtccatgtagtactgttgaactgttagaagttccagagaacaactcatactggcaaaggattgtagcattcataaagtattttaataactgtcatgccctttgatgtgctcaatggcccactaagatgtgtggaggagttatgaaagcaggagacattcgggaaggctctaaccccaatgactgaaatccttagcataaccatgtagtggtttttctttctcatggaagcaaacatgactaataggctatgaccactagcatcaaataaaatatgacaaagtgattgtcaccattcaaaaaagaggttacacgtctgtaaccaagraagtgaaaacagatagaaaaagcaaattctctgtgcgacaaggattattggccaaacttctggttcataactctttttgttatatatacaaacaaaaacagttacaaagcaggatttgtattatatatatgtgtgtgtgtgtgtgtgtatatatatatatatgcatatatacacaaaagcagggcttttgttatatacataaaatgtggagagaaacactatattatataaaatctctatcaataatttgaggaaaaactagtccctttctatcccaaatatgacaaaagaaagttctggtggatgttatcagagcatgtgatttcagtgccaggcaaagttatgaaaaggatagaaccccacacagccctgtcctcacttgctgaaacagtctcctagttgttgcttcagggctggactgtaatctctgaagaacatccctttgtgctcacctcactgccacacaaagaccagcccaaaagccatgtctcttcatagcacaaagaatccaagttttggcagaggtctgaaaacagtgtggttgataggcacctagtacttagtgttatatttgaaaggcaatattatagagtttaagagtttagctcagaagtcagataccctggttcctagcttgcttcttcaccagtggttacctgactgaaacatgagacacatgtggggcagagctgagtcaacctgcacagcgcacccagggccaggctccatcagatcacagccagaccagagcaagtcctgccaatatcagcagagctcactatcaagacgtgtgagcaatatgcatattgttaaatgccagggaggtttttggatgtttttttacttagcattattgtggtaacagaaagcagatgaaccagggagaggactgttttacaaagatcttatacttctgccaatagcaaccattccctatgcttccttctttttattttgagagccttcctacatattgtgaatgaaacaatcatgattatgctttttataaaaattctcctgggaagtggtgaggaagcatctttgctaaggcttcacctcctccctccttctccatgtactgtccactcaccttattgggtaaaactgtatcaatttccttctgcactttctgctggacatcagggtgagtggccagttcatatataatgaaggagagaacactgctcktggtttcatagccagcaaaaataaagataattgattgggccatgagctccagatcagacagagctgaaaggagagaaaagacattttaggtaaatcaggtcaatgtagggcatcacagtttagatgaaaagaaatctaagtggaaccttcaaatccccaggggaaaaaatagaaaagcaattcagagtctcactgggggtggtttcactctgatgtgtgtcttacagagccagaacaaggcaaatcattttaatccagttttcccccaatgtcttcaagaacgtagaccatccgctcctcctcgtgccatccctgccaccttcacagctgggtaatttccagagagaacatttctgcataacatactcagtgtcatggtgtgctccttgaatgatcctaaaagtactttattgtaaattaatatggggtagtcttctctcccaagaaaaatgtaattcattttagctacaatataccttgacaaactttgagagaatttgcaacattaatggctagatgtatggaaaattaaaggacctttcctttagatatgtttgagggaacttaagagaccaatattggaatacagaccacctcttgctactcaaagtgtggtccgtggatcataagcatctgtgaccttattagaaatgcaaaggctgggcatggtggcacacacctgtaatcccatcactttgggaggccaaggtgggtggatcacccgaggtcaggagttcaagaccagcctaaccaacatggagaaaccccttctctactaaaaatacaaaattacccaggcatggtgacgcatgcctgtaatcccagctacttgggaggctgaggcagaataatcgcttgaatctgggaggctgaggttgtggtgagctgagatcatgccattgcactccagcctgggcaacaagagcgaaaactctgtctcaaaacaaaacaaaacaacaacaacaacaacaacaaaaacagaaatgcaaaatctcaaaccccaccattgaactactgattcaagtctgaatttcacaagatgtggtaatttgtgtgcatagcccaggttgagaagtatggattatatctttgagaggcaccaggtaatagacccaggctataggtctcagaattgactatctcaggatgtacagcaactgaagatggacaaaaagctagatgagtggtgattgattgcagtctgatgaatggcattaaaatggtataagctcttgtgattgcaagttggcccctctcttgatttttttcctgagagaagctcaggatggcccatcactggtctgtttgatcaggactggattaggacatttagagaccgggaacacagaaataaatatagtgcctgttccaaccatgtaactcaccaccaaaaccaatacgaaaggagtgtgagaaatgtcaacagagctgtgatttaccagtgaagatttctgtgatgcagttgtgggtaaattcaactatctaataattgtattctgttaccatgaacctgatgatactgatgtgaaaccaaactataatctcaaagtttagagctctgctgtccaatgtggtagccactattgacatgtggctatttaaaatcaaattttattcaattaaacttaaatacaacttaaaatttttcatcagtggcactagccacatgtgcagtgctcaatagctatatgtgtctagtgatttctagatgaaacactaaaacagtaggctmtttcctttatcacagcaagttgtattgggatagatagagagatgatagctagataatcagtaagtagataaatagatgattgatggacagatgatagatagatagacagacagacagaagtagatgtagacatggacatatttaaatctstatgccaaagtcagcctactcctgctctctagaaccaatgattaaatattcaggaattttgtgacatgattgccaaatcttggtggcttgaaactgaacatggccatcattttgccactcatagtaacaatgacttcagtaaaaatcgtacatgggttgtaaaactggtaggtgaaagactgaagacaaaggatatttacacagtctcagaggttttccaaaaagttacttatccattgcaaaggaaaaaataacttcatagttgattaacctggtgaacacactttcaccaaaaattgccagttaaaatcgcccttatttggatagcatggctcctgattaggtgttagatgcattaagttgctgcaaaagtaattgcggtttttgccattgaaagcaatcacaaaaattrcaattatttttgcagaaacctaataaatttccaggaagaaactttaattctgtggatctggaggaggctgagaactggcatttgatcttatgtaggtgatccacagactgctgactcttcctggcatgccagttttccttagggttgccctttaagcttagaacatggctatctatgcctgcatgcctctagaagttgcctccagctaccattttaacatccaaacctgtgtcattctgctatgtggcagaaattctcatctacctggaatacttcctgcacattttcagaacaaaaccttccctctgagtgccccaccagtagccctcagaagcactcttttgttacctttgtgggtctcagagtcttttgaattctgagagtcaatcatcagctgaaggaaatccactcggtgctagaagcaaaaagagaaattttattgacagaaagtgactcgtgaagtcagaagttaatcagaagtgcagtcctcaacctcccttctgagaatatagccccttggagaccagaaatctgatgggtgttgcctgagtcaccagtgaaaaggaatatccatctaaatccttggaaagcaggatgttttcctgaaacaaatctggctaaaatgttcaattgctttttggtcttttccctggtcctaactgcatacccatgaagaagtcctgggccttttattcttctgtcttcttcatcaccaatgtccacaaagattattctcctgacatttccagaacttgtcagcagctttggtgggagcactttcaaatactgcaacattccccaaatctrtacaatcttcagtgacacctgggttaccccttcttgcccccctgacctgcagatatcttttggctggactccagggctcatgaaggcaaagctgagttagccagccttgcagcctcaattcccagagaagacctctgttcactcgaggctgtcagagggctcaaatgtaacacacactacacttcagcaggtggcctgataggaccttttgttggagaatgtgtaaaataatagccttgtacttgaaatgactctttaccaatctatgatctagagaaagcataataccaataaaatgtatttccaaacagtaatgtttatcctttgacaatttattgaagggaagtgctgtgataaggttttatctgaataatatttatgtcatggcatactaattcttgtgcctgatatcaaattttaagtgctctctctgactcattctcatatctccttcctcaaactccactttctgcattcctaccaaatgaattatcttgctctaaacataagtactctttatgttaaaatctttctctaaaaacatacagggaagtgcaccgatcatatgtatatttctaaaaaattatgaaaactaaacatcctcctataactaccaccacgttttaccttttgtgtctctttgaggcgaccttcttttatctgttttacagattttgttagaaaacttataacttttcttggaaacacagtgatatttaatgcttcaagaattggggtaaggaatggaaagacttctgtagaaaaaaaaaaccaacagaaaacgaaaccattgtgaacatacaaaatttacctggagcaattctaattttctctaccaatcagaagagtgaaatacatcagtgttctcaactggaagccattccttctatgacttttgcccctcttccaggccagtggctgagcaagggaaggtctgtgcatagggaccaccactacagcagtgagatcagcagccccttctgcatcttttgaatgatgaaaggaacaaaattcaatgccctaatctctttgcctttatgtattgggctagggtctcttaggataacccaaatcataatttgctgcttaaattaatcatgctgttcaagaaatcagatagaaataacacagtgtatctctgtcacctatcataggataaagctaaaatcaataaggtaacgaaaattgggaaactcacacatacgtggaagttaaacaataaacttttaagcaaccaataagttgaagtagaaattaaaagggcaaatagaaactgttttgagctgagcaaaaattaagatgtgataggccagaatgtcatgttatttagcaaacaagtgcccagagggaaatttatagttgtaatgtctaaatttagaggaaaaaaacccacaaatcaataatctacattcatgccacaacacagtaaacggagaagggcaaactaagcctgaagccagcagaagaaagaaaataatacagactaaagtacaaattcatgaactagagaattaaaaaaaccctgaaaaattaatatcatttctatgaagtgtccagaataggcaaatctatagatgcagaaagttgactagtggttatatacgacaacaggatttctggcagggggttgatagctaaacatgtatgaggtttctagaatgacagaagtgttttaaagtttacaatggtgatggtcgtacatatcttcaaatgtactacaaaccattaaactgtacattttaagtggatgaattacatggtgatttacatctcaataaagcagttatttttaagagagagggagagaaaaggaaatagtagtccacatacttattgagagaacgaatggatctaatggattaaatcttaaaagcttcttggtgttttccacaaaggggtcttgtggattgttgagagagtcgatgctcactccaaatgatgtgctagtgatcacatccatgctgtaggccccaaagacgctgagtggagaaagatgtggaaaattaaaatcagcacctctttaccatccttcctctatgcgtgcagcaggaaatccacatgtccagtcaagacagacaaacagccacagactttcagaactatttactggagcatctcccatcacactccctcagaaggtgattatcaggtgtcagtgacacagctggctctccgctgggggtgatggagacactcaactgagttagacttacctctgaggtcaaggagcctagtcatagaaagacagagatccactatcagacaactgcagtagcatgtgttaattgtggatgatacaagatgggtaagcactgtgcttcagcagaacaagagtagaaaaattcactctttctaaggggctcaagacaggtgacattgcctgactacagactctatgcccagagccgattcctcttcagcactttacaaagcaacagtaccatgtcctgagctcctagaaatatcatccttattctctatactccctgctcaagctttggaaaattccactatccccagctgtggtgagctgaggttgccctgatggcagaattatttttgtaaaatataatgacaaatgatgtcctggttaaaaaaaactctcaaaatttgatttggaaacttctatagtgagtgaccacatatcccctgtctgcccaggacaggctcagattacacctgttgttcctgcataagtgtagacagcaaataataggcttgccccacctatagcgtttttaccaccctctctctttgagactggaggaaaaagaaatggtgggaatgtttaatatttagtattctactgataccctcagaaaaaaaacatgaaatgatcaaagttattctaagttctccattataactttcccaccctactcactgccaaccaacagataccaagtgccttccccttccaccatcccatacactccatgcttaaaactttgatacaatcacacttttccccctaaaggatgtatttagtcctccagaatatccaaggtgacaatttaacagatatgtaaaccctgacctctgtgcacaggggagaagatccttttcctccagctgccccacctcctcatcggagctgccccatcttgggagacccattgaagttgcattaccacagccctccttttgtctggtcactggaataacccaacagcgggagtatcagctccatagcaggcagctggaggggctcatgacagctcagaaccccatggctgtgctcctacttactgtttcaaggtgacaggcttgcctgtctctgcttcccgcctcagatttctcaccaacacatctccatactgggcaatgatagggaccatctaagcacaaaacacaacaccacccatagttaaatgtgcagacataagtcccagaaggacatgactttgcctggcatggaacaataagtgacattgtgtaatgaattttatgatgtgttttctgtacataaaaagactatttttaggaagctcaaattcagcagactactcctcggaaaggaactctgatcttactttctacctgtccccacctgattcattctttaagtttctaattaaaacccaagttattttcatacctccttgagttttccgctggtgaatgttggagacagcaatgatcgtattctcttccattcttcatcctcagctatagagatggcatttttcataaatcccactggcccgaaaggctagagttcaaagcagaaagattttgtcctacatcagttgtggaggtctccatggttgtagaaaatgtgttaaacaggcatcatgtatttaacaaatatttagtgactgtctactaagtgacaggccctatgacagatgctcaataggatttatcccacatgcccagccacctgatgtggtctccagcctgtatatcccagtctccttttacatgcaaattctccacatggtacggaacctgttcttccactggaatagacaggatcaacacctagcacgcgtgcagtgtagagagagagtggagacagagaggcaggtggctttgttggactgtatgttgcctcagacgagctctgtctttatgttcacctaaaccatgggcaacatgaaaaagaggtgccttgatgtggtagatttaaaaaaatatacaatgagaacacatggacacaggaaggggaacatcacacactggggcctgttgtggggtggggagaggggggaaggatagcattaggagttatacctaatgttaaatgatgagttaatgagtacagcacaccaacatggcacatgcatacatatgtaacaaacctgcacgttgtgcacatgtaccctaaaaaaagtataataaaaaaggtagataatacttttaaaactcacaacgtattttgaagaaataatgcgattctattaacattctttcctcttaattttttattccatggatagaaaaaaagaagaaagagataattatttttgccagcttggatctggcctatcaagccagcatgcttgaaactctctttcatcttccacagccatattttgttttataatgagtacttacagtactcttttatgttaaaaattcagcaaactagggagagaaaattcctccatttgataaagagaatctacaaaaaaacccacttcatctaaatcattcttgatgatgaaagaccaaatgcttccttcctaatattaggaacaattcaaaaattcaacacatttatttgacattatactgggaaaaagaattaaaaggcatacagattggaaaggaaataaaagaattgtctctattttcaagtgacataattgtcaatgtataaaatctcaagaatatacaaaaagacttctagaaatactaagtcagctctgcaaggttctatgatacaagatcaacaaacaaaagccaagcatgtttctatgtaccaacaatcaatatctgaaaatacaagaaaaacataatatcatttacaatcactccaacaaaaatgaaatactttagctgtaaatccaacaaaacatgcacaggatctctatgctgaaaactacaaattgctaaaagcaatcagagaaaatctaaggaaatggagaggcatactatgttcatgaattgaaagaccaaacatagtgaagataaagactttccctaaattgatctatacatttaattcaattcttgttaaaataacagcatgtttatttatagacactgagagactcattctgaatttttatggaaaagcagaggaccaggaagagctaaaacaaatctgaaaaaatacatccataaaagtgggaagaatcactctacatgatgctaagagttactgtacaggtattagagtcaccagtttgttgttggtggaggaataagcacagtgatcaatgggacagaatagcaaatgaaagatgcaaagaaacatgcccaattaatttttaacaatatgcccacatttccaaaaatggctttggaacaactggacaactacaagccacaaaaaatgaacgttgatctaaatctcataccttatacaaaaaataacacaaaatagatagtagagttacatttagtaaagcattaaactttatgacttttagaaaaattggcaatataggaaggagggctaggcaaagaactttcagacttgacaccaaaagcacaatccataaaaaaaatattaatacattggcctcctcaaaataaaaaaagttttccctgataaagaccctctcagagaaaaacactcgtgactgtaggatagtagcagggagccatacggagatggaatgggtctgcatcttgatcatgctggtcattgcacaaatctacaaatgtgataaatttgcatagaactacccacacactcaagaccagcctggccaataaggtgaaacctcgtctctactaaaaatacaaaaattagtagggcgtggtggtgcaacttgtagtcccagctactcgggaggtggaggcagaagaatcacttgaaccctggaggtggaggttgcagtgagccaagaccacaccactgtactcccatttgggtgacagagtgtgactcagtccgaaaaacaaacaacaaacaacaaacaaaaacaaaaacaaaaaactacccacacaaatgagggcacataaaactggtgaaatctgaataaactctgtgaactgtatcaatgttaatttcctgtactgcagtaatgtgaatatactgtatttatagttatgcaagattgcaagatgttaccatgggggatgggcaggatgaagtgtacatggaaccttcctgcacagtttttaggcaactgtct

SEQ ID NO: 96447 - DNA, 90400 bp, Homo sapiens
aattatttcaatctctttgttaactttatccgatagaaatctgaattccttctctgtgttatcttgactttctttgagttttctcaaaatagctattttatttatttattttttactttaagttctgggagataagtacagaatgtgtaggtttgttacacaggtgtacgtatgccatggtggtttgctgcacctatcaatccatcattctaggttttaagccttgcatgcattagctatttgtcctaatacactccctcttcttgcccctccacccccaattggctctagtgtgtgttgttccccttcctgtgtccatgtgttctcattgttcaactccaacttatgagtgagaatatgcagtgtttagttttctgttcctatgttagtttgctgagaatgatggcttccagcttcatccatgtccctgcaaaggacatgatctcatccctttttatggttgcatagtattccatggtgcatatgttccacattttctttatccagtctattattgatgggcatttgggttggttccatgtctttgctattgtaaatagtgctgcaataaacatacgtgtgcacgtgtctttatagtagaatgatttatattcctttgggtgtatacctagtaatgggattgctgggtcaaatggtatttctggttctagatctttgaggaatcaccacactgtcttccacaatgattgaactaacttacattctcaccaacggtgtaaaagtgttcctatttctccacagcctcactagcatctactgtctcttgactttttaatgatcactattcagactggcatgagatggtgtctcattgtggttttgatttgcatttctctaatgatcagtgatgttgagcttctttttatatgtttgttggctgcataaatgtcttctttggagaagtgtctcttcatatcctttgccaacttttttatggggttatttgtttttttcttgtaaatttgtttaagttccttgtagattctggatatttgacctttgtcagattctataggttgcctgttaactctgatgatagtttcttttgctgtgcagagctctttagtttaattagatcccattggtcagttttggcttttgttgcaattccttttggcattttcatcatgaagtctttgcccattcctatgtcctgaatggtattgcctaggttttcttctagtgttttatggttttgggttttaagtctttaatccatcttgagttaacttttgtataagttgtaaggaaggagtccactttcagttttctgcatatggctagccagttttcccagcaccatttattgaataggagatcctttcccccattgcttgttgttgtcaggtttgtcaaagatcagatggttgtagatgtgcgatattatttctgaggtctctgttctgtttcattggtctatatgtcaaaacagctattttgaattctctgcctgacaggtcacatatctctttcttcagtattgttcccaggtgacttatttagttcatttggtgaggtcatgttttcctggatggtattgatacttgtaggtatcggtcagtatatgggcattgaagtgttaggtatttattttggtctttgcagcccgagcttgtttgtacccatctttcttgagaaggcttttctaggtgtttgaaagtacttgggtattttgatctaagctgtatctgcattagggagcaccctaagcccagtaacattgtggtttcttacagacttatagaggtactgccttgatggtcttggataagatccagaaaatttcttaccaggcagagactcttgttgtcttcttttactttctcccaaacaaacaaattctctctctctctctctccctctctctttttctgtgctggacatcctggagcttggggtgggatgacacaagttcctctgtggctacaccactggggctgcactaggacagacctgaaatcagcacagtactgcatcttgctcaaggcctgatgtaaccactacctggctaccaatgtgtgctcaagaccttggggctctataatcagctggtagtaaatctagccacgtttgtatccttcccttcagggtggtgagttcccccaggccctgggtaggttgagaggtgtagtctgagagccagagactggagtcagaatccttagaaatctacttggtgtgcagtttagttggcactcaaaccactagacacattcttccctcccctttccacaggcaggagagcctcgccccctggccttcaccaccacaggcccaggggagtacttccaggctactgccacggttcacttaaggcacaaaggtttttcaatcagcttgtggtgaatgctgcccggtctggaactcattctttagggcagtgggcaccctctgctcatggcgggtccagaaatgccataaaagagccaaggcctggattccaagagcctgcttggtgctttgaccctgtggccgaattggtacctaaggtgcaatacaaagtctcctttacttttccacctgcttttctcaagcaaagagtctctcaccaccgccaccatagcgggtaatgtgctggatcttacctaaagccagcacatctcagagtcctacccaaggtccatgtccatggcgtactatctgggcatcactgatggttattcggggcccaaaggtcagcaagtaatgagtcctgctaggactggttccttcccttcaaagcagtagattcccttcttgtccagcgtatgtctagaaatgtccaggagctagggcctgggatgtgagtctcatgactctgaccagtcccctatcctactgtggctaagctggtaaccaagatgcaaaataaagtcctctttactcttccctttcctctcctcaagcagaaggaaggaatctcttttggagccatgagctatgctgcctggggttgggggaagggtggtgcaagccatttccttagctgccccagctggtgtctccgtaggtcatgtgcctccccaagtccactggctctgagctcagcttagcactagaaatcacctaggagttgcagtccttgtggcctacactgactttcaagtttatttagagccccaaggcattttagcccacagtgatgaagcttgatggaactcaagttccgacaactgggatgggtgattcccctctggctaggcctgatctaaatgctccctctgtgggcaggtgtcaactgagttcagcccagctttgctttatactgtgacagggaagcactgagttcaatgcacagtctcacaatctctgtgctctccctctcccaaacacatagcttttctctccgcacaatgtggccactgctgggaggatgaagggtggcatcagcaattcaagactgtctttcctaccctcttcaatgcctctttcagcgatatgaagttaaaactaggaactatgagtgctcatctgatttttggcttttataaagttgctttttgtgtatagatagttgtttaaatttagtgttcttgtagagagggacaatcagtagatccttctattcagccatcttgccctgcccttcttctctacctgtggtagtcttgactatatctatttgtgtagattttttagtggtcctctgagtattgcattatatataaataacttatcatactttactattttcatcattttacttgtttgagtgaagtgtagaaatcttatctcccttatatccctttactctctctcattcacttgtaattgtcttatgtatttcccttacttatatttagaaccacatcagacagtgatataatttttgcttcacccataaaaaataatttagaaaactcaataggaagaggaaagtttcttgtatttaccaatatttttcttgaccatgttctttattctagatattctaagtttctcctgtttataattttctatttagagaacttcctttagtcattcttttattttgaaaagcgttagctttagaataactttaagagttagtaaatgtcaataaccttaagcctagtgaccctactcttgcttatccatttcatcgttggccttggcaccttgcagccctccctgtccacccagtggttttcattactctcacagaacacaagaatttcattaggcaatgtgaccttggaactctcaatgtgcccattaatccacgttggcagaaatgatataacatagtgattaatagcaaattcttctaactacttcttgtcatggtacctttgcaagtccaccctagtttatgaaggtataaggaagagtttagtggaaaacagagagagagagagctgaatcagtattacccttgtcttcaacatctttatgagtgcctttgggtgtgctgggccgaattagatgaattttataatgaacaaaagaagaacgaaaccaaaaggaaataatatttttaagagaaaggtcaaaggcaaagcaaaaaatttctgagtcaagcaatgagaagggttttttaaaaaagaaaaaaaaactttgggagaagtataagatgtaacatgggttgaaggaagtaaaggcaggaaaaattaagatctataaactctgagaaggtagtttgagcagaagtaaaaaacattagtgaccaaaagtttggaaatgattcaagagtagttaagtgcagccaagtgcaaacagaatagtcaaattttcactatcttcagacatgaaaatttggagaattgttagatagccacaaatgcaatatagtgggggaaaagaccacagagcatatttgtcaagatataagtcaacaggacagagaatagagtccatcatagcaccctctttaggaaaaattgttgctaattaatttatatttgaatataatttgaaaatactttggtagatggaatttgttattctctgttgactcttacttataggaaattctttttgtacaaacccttttatgctatagttcaaaaatattgatctattcaatacacatttactgagcccactggtgctgtgggcactagaaatacaacaggtaaggcttctgtctaacagtggtcttcaataggaatacagaatgagaagctgaagtcacgtggccagagctggaagcctaattccattgtttactagctgtgtaaaattcactttgatatccccacctctaaactgagaataatagttcctcacttgtttaccttgaacatgctccttgttttgagaatcaaatgagatgatatatatgtgtgataggctctgtaaattcataaaatactatataatctgagtaacttttgcattagccttgtttaaatccttctttatatgcctaaaactttttatcctaaaaccttagcccaggtccttgcacatagtaagtgtgggcagcaattattggatattccagcgaatgaaatgaaaacatattaatatttttactctcacggctcttatgtgctactaagatgacaagagacaataagcataataaattctttaatgatatagtatactagaaggtgataaatgctgtggaaaagaaaatcaaagtaggataagaggaactgagagtcctgagggtacaagatccaacttctaattgagaagagatttttaggaggtgagagtgtcctccatgtcagtattttggggaggataattttggacagggggaacaactagtacaaacaccctgaggtggagtgctgcctctcttgtctgagtaatatccaagaggccagtgtggctggagtggagttaggcaaagacaaaataaataaaaatgagatcagagaggtcacggagagggcacagcattgtaggccatgactgagtgaattgggggctaccacagaaatgtgaagagaagagtgatgtgatgtgactcacatttcaaaagaatcatccaggccatgcttttgacaatggacaaaggcggaagaggaggaaaggacagaggcagagagacaattaacaagctattatagaaaatcaggtggagatgatagtggcttgcatgatggtggtagagctggaggtgcagggcaaaggtcagattctgaatatattttgaaagtaaaggcaacaagatttcctgacagattgattatggtgtgtcaaagaaagagaggaatgcaggatgattccagtgtttttgttgacaactataagtctggagctgccaactggatgcagaagttcactggagggcccagcctggggaaaggatcaggagcaggttaggcatgttaagcttgagatgtctgttaaacatccagataggaatgtcaaagatgcacttgtgtttaagagtcaggaatgcaagagggaattttaggctagaaacaaaaagttagaaattattcgatacagatggtatttaaagctgtgtgactgactgacatgacagaagtggcgagaatagactgagaagtccaaggaatgagccttggaccactccagtgttaggtaagtagttgaaaaaaagagagagagagaaggcatcaaaggagactgaggaagagtgatcaggaaagcataggaaaatccgagaaacatatggtgtcctggaatctatatgaaaaagatatattcagaaagacagagtgataaatctgtcaaattattgaatttgtcaggtaaaataagaacagagaattgatctttggacttagcaaagcagagattatcagtgacttttataaaaatagtttcggtagtgtggaaagatcaaacttctgtttagagtgggtttcagagagaacaacaggaattgaagaaagtaataaactttgccaaccagtttagctccaaaggaaaagagggaaatatgatggtagctggcaggggaagtgtggtcaagagaggttttttgtttgtttttcaagatggaagaaataacagtatgtatgtaagctcacaggagggatccagcaggcatggggaaattgatgatataggacagaaagggaagaatggctccttgtgaaagtgaaaggggatgggatctacaggatgaacatgcaaacaaagactggctgcaaagagaggcatgaatagttcatttacagaaacagcaaaggcagagtgttggtacagatgctggtaagtggaaaaatatcatggtaggaggttatggagttccattctaaacacttcaacttcatcagtgaaataagcacggtaatttagcagaatgtgaagatgtaaaagaacagaatttgagaaaacagacgatatgaaataattattagaaaagcaggtgagtgaatgaactaagaaaacatcttatgactattggtcagtaaacgttgggatacatagtgaattttacaaaatctttgccctcataagtcttgcatcccacagagtgggcaataaataataaacataataagtacattatgtatacagtatagggccatgtaagttcatggcgaggcaagcccgatgactttgtatttttcttcagacatgttctgctgcatggtgtaggttcacagtagctcagyaacttgaattatccaggattgtggttttactaagcaagcctgataaagagagagggctagagggttgtgggtgttttcaggctgagttaagagagaagacatgaaggaggtgaggaacagtaaaaaggtggtaagatcagtggactgaaggatgcattaaagaatgactgtgtttaactctctgatacatctgacgtatgttctccatctccacttccctgctagtcatagcrgataaggatactccctggattcgaattctagttccatcagttataagatattgattctgttttactttgtctgtctcattccaaaacacatgtctctaattaccatagtttgataatgagttttgatatttatttagtaaggcaaacccataaataactgataatttttcaagataaaagtgaaataaattttcaggaaaaaaaagctgagaaaatttgtcacaaactaaagaaaacaagaaagagacagtagatgaaagagtgctcattaggtgaaaggaaaatgatccaagagggtagctttgagatgtaggaagaaacaaaaagcaagaaaatgataaatgttttgataaagctaaataagtatcaactcataaagaaataatattcccagaagagtcatgaatatacagagaaaattaaagtacatgacaatggcaatgtaaaagttaggggtgaataaaaaagagacttaagagttctaaaatcattgcattgtcctggaagaggaaaaagtacaatgattagtcaaagatacatgtcataatccctagaaaggagatcattattaaatagaaaataaaagaatacatcttatagaaaggaaatctaaatgataatattaaacagatctaaaataaggcaaaagtgaggataaaaaagaaagatggaaccaatggggcaaatagaaaaagtaagatagcgtggtagggcattaattccagccttacatcaatgcataagtatctcaatattctactgtaaagggaaagtaaagatttcttacagcctgagtgtaatggagaaatctagtttatcatagtgctttaaatattgtaagtcttcaacttctagttgatgaataaatgatggaattctcagtgatactgcactgttatcaaataaatataaaaggagctcctggaattggatgtaatacaggtaaagaagtaaacacagccatataggcatggcttcttgcagggacaactttgtgaatcggctcagacagacagacaggcaaatacacctcattgcctcatacatgttatttgctttagtttttgttctgaaccttcctactccttcaagtatctgcatttactttatcaaattctcttttattagagactgaagaaactgtcatctccttatgtgctaatgagtttaataatgtsctccagtcaccacaagccttctttcaaactacacaattccaactgcttccgtctcagagtatcttgaaataatgatctgaccgcctgttagaccagtgaagggaaggaattygggttgatttaagaagagaatmctcatggtcatggtagactgatatggagagaaaacattttgaggaaaaatactcaactaaattcatttctactccagcatgcagtttcaagtcaagttccaccttagctccaggtggcaggcagagcaggatgcagaggcacagcacaagtaaggggtgagtgccgaagctgctggctcctgttccagtctttcttccttggcctcgcctgaacttttactataataatagtcaccatttattaggtgtctcctacgtgcaggacactttacacacagtatccctaatcctaataacacccttattttatagatccaatgactgagtcaagaattacataacctggccagacagctggtacatgggaaaggtgagattcacaccagggtccacccagcatctctacttataccatgctctgctttaaggttctctgagaactcagacaagccttgggctaacaattgtgttaacaggacatagcaggtgcaaggacccactggtcatcctgctacctgatcagaaggaaggaaagttgtatttgttgctcacctactatgttttaggcatagtactaggtgcttttacctagtacttaattcccttatcctcaactcatttattcctcgcaataacctgataagggagatgtttttatcctcattttacatataaggaaacaggcctagagaaatgagcacagtgtccaaagtcacatagttaataagatgtgaagctctgagtttgaaagtctccggtttcaaagccatgaaacttatggctccccgttttagacacttccttttgggaagagtgtggaggaattaatcagaaagaagaaagtcatactcaaataggtggtaggagcagagacaattcaatacagacagaagtcttagatgagagcagtgagccagggcactggactgggactcaggaggcttcccctagactctggttccaccgatgcagcctcaggcaggacttcacctctctgggcatccgtttcttcatatgttaaacatacggggttttaattagatgatcgctgaagacccctctagccctaaaactctgtgtctcttaagtgctaagagggcaccaacagcgttcctcctccccaaggagcataatgtgatggttcctgccggccctggctgactctcgccgtccttggagataattgggttcagtgccacctggaccagaactggggatgcggaagcaagaggcgagtctattgctctctctcggtcctgggccgccctgtgattgttgggcgtccggaaactgtctcccctatgggtttaaaaacaaaactgagcgcccatggggtgtgacagtcatctgcaggggcttgggtggcccatcaggcgaggctttctcggcacccgaggctccagsctgatctcggtcttatcctgcgaccgggctggttctggcgggtcgccagggtgggcggcggccccagccgggcgccccggcggcaagagcggcaggctgcgcccctggcccgcgccyagcctggggagagagctgggcgggcggcgggagctgctctcgcgggccgcggccctcgccctggctgcaacggtaggcgtttcccgggccggacgcgcgtggggggcgggggcgggggcgggggcgaggccgcggcgagcaaagtccaggcccctctgctgcagcgcccgcgcgtccagaggccctgccagacacgcgcgaggttcgaggtgagagaggtccgggcgcgtctggcctcgaagggagacccgggacgtggggcgcggggcgggagtggccggacctccacccagtgcccccgggccccgcgactcgtgcgccgggccgccggagagggtgtacttggttctgaggctgtggtttctcctcaggctgagatggatcttgaggcggcaaagaacggaacagcctggcgccccacgagcgcggagggcgactttgaactgggcatcagcaggtacatccccagcagccactggcttttccgttacacgccaatcagcaggactaagttcacccttggaaagaagttgtaaaaatcggttgatgcctttgaagacctttgttttggaggcttctttgaagggtcttgcatccggttctgaccttggagcaaacgtgttgtgtggcctcaaagaatgtcactgaggctccttttggaacagattcaggaagaaaaggctgtcttgaaaagtgctcccttccctttgtgcaggggggattcaatgaatatctgcattgtataacattcattgtattacgtaactcttgaaacttttacaaatgactttcatatacatcatctgattgttcagacttaaagggtgtcagacatctgctgttgatggctgtgctttttgaacaagggcagtgaagcaaaaactccctcccctcctgcccatcccctgttatgtctcttcctccttgtcttacccctccccctcctctcatcgccaggcttatttgtatttctcctttctgggaggataggtggggagggggaacttctgtacatccgaatcagttttgttcaagtggtagggggaagcagcgcttcctttgccttcatgtctttctcggttcccctggcccttgttaaactcacttcacaggctttatgagcggggcagaagttcccagtcaatggcgtgtgtctttgtttcctctttcactgtgggaatagtgaatcattttcgcctttagcctgaaatagtttatgaggctattacggtctctgagttcataccaggctacccagaaaaaattgacctgtgtcaagtgatcacccagagggacaaatttatcagtctctgtagtttgtcctcaagctgctaggggcttgattagctaactgaaaacatgcctacctgatgcttaaactgaagcattattttagcctgttaatgtggttgtgcagtaaccttgctgtatttcttctaagcaccattgtattttttcatagaaaatttagttttgccatgtagaattsaaaaagtgatagatggtgttacttccaatggaagtacttacacacgcaatagaaaaatatggttttcatcagctggctgtttaggcagggattgactgtgagtctattaatagatggcattttcatgaagaagtctatttatgtattgcactggcttaacatttgatgcgtgtgcaaaggagctattcctacaaaaggtgtagtaacacttcagaacccaggaaagtcctcagaggggaagcccacagcttctgctggaaagaagaaagcagctcaaaagagaaatacagaaagttaacaataagttaagaccacatgattatgaaatcaaatgtagtgaaactaatttttataaaagcagaccaaagataatatatttaaaggaagttaagcctgcttcaatcaaattagttatattcttgttctaattatgttgctattgcccatggcacattcttttgaacatatttagtggcagatgtttgtccagtgattttagtcaatactttacataatttggaatcatcttatgagtaaaactttatcatttacctggataaatgcatcatatttatgtaaaaatcatcatatatatataaatcatcatamacacacacacacacacactccctcatagagtttatattatagtacggaggacagacataaataatgtacatactaaataagtaaaccacagccaatgttagaaggtaattaacgccatggaaaaaagcattaatccaggttaaggggatcaggagtacaaaaggggagtactttgtaattttaagtagggtggttagggtagatcttattttaaaggtaatatttgagcaaagacttgaaagaaatgagaggagacagctgtgtgggtatctaaggggagagcattcccggaaaaggtaactggcaatgcaaagaccctgagtcaggtacatgtttggtgagttcatggaacagcagagagtccaggctggttggagcagagtaagcaggtttgggagtagggatgtggtcagagaggaaataagcaaacagatcgtgtaggacctcagaggttaatgcaaggattttggcttttattgtaagaaaaaggaaagccattgtaggtttttgagcaaagaagtagtgtatggcttggcattttgaaataattactctgactgctagttgaagatagactgaagcggcataggtggaagtggagagactaggcaggaggctgccctactggtgacagcaatgaaactggtgataagtggttaaattctagatgtactttgaatgtatcaccaacaagattgcctgacaccactctccacaatccttcagaagaatagacattcctaattttaaatcatgattttttttaattttagaaaacaaataacttaattgacttagcgacactgttarcatacttatctttcctgtgtatgtgagctctgtaaggcaggcgaccatttcttatgtatccatgtatctttgtagtaccttcgacagttacttttgtgcttgctatgtttgttgaactgaataattttgacattttgtgaacatcactcttatatttgaaaatataatagttgaatattgtaactaaacatatttatgttcaattgattgtaaaacattttgtaacagttttaaattgaagcaattctattttttacagcaaacaaaaaaggaaaaaaacgaagacagtgaaaatgattggagtattaacattggtaagctgtgaaatgttaaatgtgaataatcctaccttttattcaaatttgaggtattgaatcaattacctttaaagcaaatactttaagattgtctagctaggcgagctgactcatacttgtaatcccagcactttgggagactgaggtgggagggttgcttgagcacaagagtttgagaccagcctggacaacatagtgagatctcatctctacaaaataataaaaataaaaatcttaaaaaatagcatatgtcatggcatgaacctgtagtcccagctacttgggaggctgaggcaggagggtcttaggagtctgaggctgcagtgagttatgatcacaccactgcactccagcctgggtggcagagcaagaccctgtctcaaaaacaacgacaacaaaaaactgtctgcagacagcaataaattgtccttgctgcacctgtgctgtmtaagtttggcttattatagtcaatgacccacattcttaagatggatgattttttaaaaagtagagacaggctggcgatgacaccggacagagctaactggtgtgcaaggaaagtgaaaatgggaattgtgttagtagcacaatgcaaactcaacaatttcaagaaaatgcatttctgcatttgcttcacagacccccaccccaaatttagcttaaaataagcttgcatttcaagaaagtaattgttaagtacataaattttaatttaaggaatctacattcacatttggtttccaaaaaattggctaaatagggggtaactattaggaattctgattatgcttaaaacagttttcggtgcttttctgttggtacaagacaagacaatatttttggaagaagtctcctcatctggttttcatttgaaatatgtcttacagaggcagctcaagaaagcatttgcccatttttggtaaatatgacgtgtttcaaactgtgacagccattatttggtagcaaagaagttagaattaagtgtcatgtcagctgaaatccaacttagyaattaaatggataaaaagacaccaaaacatccacactctcaaacactgctgcatacttctcatgtaaccaaaagmccctattcattgtcttctctcctctttttttatttgtttaaaaagcctcagtaagggcaatttaaaaaaaaattagcactttggagaataaattgtttatcaaatgaaagctggttttatttatttttttagaagtttttttttctttatttttttaaatttgtttaaattatactttaagttctagggtacatgtgcataacgtgcaggtttgttacatatgtatacatgtgccatgttggtgtgctgcacccattaacttgtcatttacattaggtatatctcctaatgctatccctcccccatccccccaccccacaataggccccggtgtgtgatgttccccttcctgtgtccaagtgttctcattgttcagttcccacctgtgagtgagaacatgaggtgtttggttttttgtccttgcgatagtttgctgaggatggtttccagcttcatccatgtccctacaaaggacatgaactcatcattttttatggctgcatagtattccatggtgtatatgtgccacattttcttaatccagtctatcattgttggacatttgggttggttccaagtctttgctattgtgaatagtgctgcaataaacatacttgtgcatgtgtctgtatagcagcatgatttatattcctttgggtatatacctagtaatgggatggctgggtcaaatgatatttctagttctagatccttgaggaatcaccacactgtcttccacaatggttgaactagtttacagtcccaccaatagtgtaaaagtgttcctatttctccacatcctctccagcacctgttgtttcctgactttttaatgattgccattctaactggtgtgagatggtatctcattgtggttttgatttgcatktctctgatggccagtgatsatgagcattttttcaygtgtctattggctgcataaatgtcttcttttgaggagtgtctgttcatatccttcacccacttgttggtggggttgtttttttcttgtaaatttgtttgagttctttgtagattctggatactagccctttgtcagatgagtagattgcaaaaattttctcccattctgtaggttgccagttcactctaatgatagtttcttttgctgtgcagaagctctttagtttaattagatcccatttttgtcaattttggcttttgttgcctttgcttttggtgttttagacatgaactccttgaccatgcctatgtcctgaatggtattgcctaggttttcttctagggtttttatggttttaggtctaacatgtaagtctttaatccatcttgaattaatgtttgtataaggtgtaaggaagggatccagtttcagctttctacatatggctagccagttttcccagcaccatttgttaaatagggaatccttttcccatttcttgtttttgtcaggtttgtcaaagatcagatagttgtagatgtatggtattatttctgagggctctgttctgttccattggtctatatctctgttttggtaccagtaccatgctgttttggttactgtagccttgtagtatagtttgaagtcaggtagcatgatgcctccagctttgttcttttagcttaggattgacttgccaatgcaggctcttttttggttccatattaactttaaagtagttttttccaattctatgaagaaagtcattggtagcttgatggggatggcattgaatctataaattaccttgggcagtatggccattttcacgatattgattcttcctatccatgagcatggaatgttcttccatttgtttgtgtcctcttttatttcgttgagcagtggtttgtagttctccttgaagaggtccttcacatcccttgtaagttggattcctaggtattttattctctttgaagcaattgtgaatgggagttcactcatgatttggctctctgtctgttattgatgtataagaatgcttgtgatttttgcacattgattttgtatcctgagactttgctgaagttgcttatcagcttaaggaggctttgggctgagacaatggggttttctagatatacagtcatgtcatctgcaaacagggacagttttacttcctcttttcctaattgaataccctttctttctttcttctgcctgattgccctggccagaacttccaacactatgttgaataggagtggtgagagagggcatcctgtcttgtgccaattttcaaagggaatgcttccagtttttcccattcagtatgatattggctatgggtttgtcataaatagctcttattatgtttagatacctcccatcaatacctaatttattgagagtttttagcatgaatggctgttgaattttgtcaaaggccttttctgcatctattgagataataatgtggtttttttctttggttctgtttatatgctgtattacgtttattgatttgtgtatgttgaaccagccttgcatcccaggggtgaagcccacttgatcatggtggataagctttttgatgtgctgctggattcggtttgccagtattttattttattttattttattttattttattttatttatttattttttgagacggagttgcgctgtttcgcccaggccggactgtagtggcgctatctgggctcactgcaagctgcgcctcccgggttcacgccattctcctgcctcagcctctcgagtagctgagactacaggtccccaccaccacgcctggctagtttttgtatttttagtagagacagggtttcaccatgttagccaggatggtcttgatctcttgaccttgtgatccgcccgcctcagcctcccaaagtgctgcgattataggcgtgagccaccgcgcccacggtttgccagtattttattgaggatttttgcattgatgttcgtcagggatattggtctaaaattctctttttttgttgtgactctgccaggctttggtatcaggatgatgctggcctcataaaatgagttagggaggattccctctttttctattgattggaatagtttcagaaggaatggtaccagttcctccttgtacctctggtagaattcggctgtgattctgtctggtcctggactttttttggttggtaagctattaatttcagagcccgttattggtctattcagagattcaacttcttcctggtttagtcttgggagggtgtatgtgttgaggaatttatccatttcttctagattttctagtttatttatgtaggggtgtttacagtattctctgatggtagtttgtatttctgtgatatcagtggtgatatcccctttatcattttttattgcgtctatttgattcttctctcttttcttctttattggtcttgctagcagtcaatcaattttgttgatcttttcaaaaaaccagctcctggattcattgactttttgaagggttttttatgtctctatctccttcagttctgctctgatcttagttatttcttgccttctgctagcttttgaatgtgtttgctcatgcttctctagttcttttaattgtgatgttagggtgtcaattttacacctttcctgctttctcttgtgggcatttagtgctattaatttccctctacccactgctttaaatgtgtcccagagattctggtatgttgtgtctttgttctcattggtttcaaagaacatctttatttctgccttcatttcgttatgtgcccagtagtcgttcaggagcaggttgttcagtttccatgtagttgagcggttttgagtgagtttcttaatcctgagttctagtttgattgcactgtggtctgagacacagtttgttataatttctgttcttttacatttgctgaggagtgctttacttccaactaygtggtcaattttggagtaagtgcagtgtggtgctgagaagaatgtatattctgttgatttggggtggagagttctgtagatgtctattaggtccacttggtgcagagctgagttcaattcctggatatccttgttaacttctgtctcgttgatctgtctaatgctgatagtggggtcttaaagtctcccattattattgtgtgggagtctctttgtaggtatctaaggacttgctttatgaatcttggtgctcctgtattgggtgaatatatatatttaggatagttagttcttcttgttgaattgatccgtttaccattatgtaatggccttctttgtctcttttgatctttgttggtttaaattctgttttatcagagactaggattgcaatccctgcctttttttgttttccatttgcttggtagatcttcctccatccctttcttttgagcctatgtgtgtctctgcacgtgagatgggtttcctgaatacagcacactgatgggtcttgactctttatccagtttgccagtctgtgtcttttaattggagcatttagcccatttaaatttaaggttaatatagttatgtgtggatttgatcctgtcattatgattttagctggttattttgctcattagttgatgcagtttcttcctagccttgatggtctttacaatttggtatgtttttgcagtgactggtactggctgttcctttccacgtttagtgcttccttcaggacctcttttagggcaggcctggtggtaacaaaatctctcagcatttgcttgtctgtaaagtattttatttctccttcgcttatgaagcttagtttggctggatgtgaaattctgggttgaaaattcttttctttaagaatgttgaatattggccccctctctcttctggcttgtagagtttctgccgagagatcagctgttagtctgatgggcttccctttgtgggtaacctgacctttctctctgcatgctcttaacattttttccttcatttcaactttggcgaatctgacaattatgtttcttggagttgctgttctcgaggagtatctttgtggtgttctctgtatttcctgaatttgaatgttggcctgccttgctagattggggaagttctcctggataatatcctgcagagtgttttccaacttggttccattaatcctgtcactttcaggtacaccaatcacacatagatttggtcttttcacatagtcccatatttcttggaggctttgcttgtttctttttattcttttttctctaaactcctcttcttgtttcatttcattcatttgatcttcaatcactgataccctttcttccacttgatcgaattggctactgaagcttgtgctttcgtcacatagttcttgtgccatggttttcagctccatcaggtcctttaaggacttctctgcatcggttattctagttagccattcatctattcttttttctaggtttttaacttctttgccatgggttcgaacttccgtctttagctcagagaagtttgatcatctgtagccttcttctctcaactcatcaaagtcattctccgtcctgctttgttccattgctggtgaggagctgcattcctttggaggaggagaggcgctctgatttttagaattttcagtttttctgttctgttttttccccatctttgtggttttatctacctttggtttttgatgatggtgacgtacagatgggttttggcgtggatgtcctttctgtttgttagttttccttctaacagtcaggaccctcagccgcaggtctgttggagtttgctggaggtccactccagaccctgttttcctgggtatcagcagcggaggctgcagaacagcgaatattgatgaacagcgaatgttgctgcctgattgttcctctggaagtttcgtctcagagggctgcccggccatgtgaggtgtcagtctgcccctactgggtggtgcctcccagttaggctactcgggggtcagggacccacttgagaaggcagtctgtccattctcagatctcaaatgctgtgctgggagaaccactactctcttgaaacctgtcagacagggacatttaagtctgcagaggtttctgctgccttttgttcagctatgccctacccctagaggcagagtctacagaggcaggcaggtctctttgagctgtggtgggctccacccagttcctggccgctttgtttacctactcaagagcttcctggccgctttgtttacctactcaagtctcagctatggagggcacccttcccccagcctcgctgccaccttgcagattgatttcagactgctgtgctagcaatgagcgaggcttcgtgggtgtgggaccctctgagccaggcgtgggatgtaatctcctgatgtgccgtttgctaagaccattggaaaagcgcagtattagggtgagagtgacccgattttccaggtgccgtctgtcacagctttgcttggctaggaaagggaattccctgacctcttgtgcttctcgggtgaggggatgcttccccctgctttggctcatgctcggtgcgctgcacctactgtcctgcacccactgtccgacaagccgcagtgagatgaacctggggcctcagtaggaaatgcagaaatcacctgttatctgtgtcacttgcactgggagctgtwgactggagctgttcctaatcagctatcttggaaccgcctctgaaagctggttttaatgcataggttttaaatctgcctcctacagaaaatacaatcctacaaaccttaatgtaggaacagaaattttcatttgaatttagaagttttagcttaagttaaacttaaatttaatatttattttcacctcttactagatatcttaatagatattttttgtcctgaaagaggttgaggataaaactgtgctctaacaggagttagaaatatattattttctggaaaatcactgaaaacaaacctaggtttacttaggatgttgctgtgaaattcacctcgttttaaatttatgcttagaggctgtaaaattgtattcaattaatatgaaaacatttaaaatgctttttaatgttaacaacctgaccctgtgcttttaactatagctgacagactcaagtgttctgttttccttttcccagaaccactaaaaatgaacctttgggacactggtccctttgtgacaattttagggacccagctccattggctcttgactttacctgctcccattgttttatccaagctctgcctggtttctgaccctttgtctctttcggttctcttgcttgccctgtgtgtttgatgatggagtttgtccctgtccctgaaaccttgcctgaactcctggaaatctttgagaatggtgtacacacatatccactttccaccatgtgcctctaacctcagcctcacccgggttattgacccagtctgacctagcttcagccctcaaaggctccactgtgccaagcctggctcatcaccctctctcccaataactgttctttgtccccaaaaggggctgaggtggggggaatgggcagagtaaagcattttaaaagagaggagagaaaaaaaagataggaagctatagaaatggaaatgtaagatgaggaaaatgtagtctagaaggcagaggaggaaagaagaacaaagagaaagrgagccataaatgggtcaatcaaaaacagaaagaaaaggtgagaaatggaagaggactaataagacagtaacaaagtcctttgaagtgttagaacactgaactgctggttagttcttgagggttgtgcacttcactgtgacaactggtatcacccttcccctctgtaggtagtactgtgtccaagattcttggtgtggcccaccagcgcaggccttctatctctctccaacatcctctcccacactttgtactgtgcccttcaggaattccactgccaggggttacttaagcattccatgtagtttctagttaccttcttattctaagcctaaattcttcctacttcttttacactcgccgattcttctccagcgaactccctcttacccttcaaggttctgcatacttggcaggtgacactggtgaaaactaaatttttaaaaaaggttctgcataaggatctccataggcaagacttccctaaggtgcatatatagacacactgtaatgtttattgtgcttcactactgagttgcctttttaaagctaacttaaaccttctaaagggatcttatctcaaaactcagagcatctattttcctctattttaaattctccctctgaaatattctgaatgcttttttaaaggatgtggtgtgtgtgtgtgtgtgtgtgtgtgtgtgtttaaacttaatgtctttccctagccgttctttattaccacaggagctctgggatatcaaatawtatttcttaaacctttatcccttttgattgtatagtaattatttattcaaatcagataccaattaaacataattagattgatttcttcacagaatacaaaataaacagaatcatgaaattaagytgttaatgatttgaaggcctccttttctaagacattcatttacaactcttaaaaaagtactgactttaaataaaaatccaaagaatatataattatggaagaggagaaattccattccacagctaagtattattttatttcctttttttagtttcgatactcygattggcaggataaattgtttatgtcgytgggtaccatcatggccatagctcacggatcaggtctccccctcatgatgatagtatttggagagatgactgacaaatttgttgatactgcaggaaacttctcctttccaggtaagcatttctttaccttttaaaaaaatccatagcatttctttaactgggtaaaaatttgggagttgattttgctattcattaccatcttatttaatgatttggatatctggttgactccagatatcayagaaggagttgtaaaattctcagaaaattgttcaaatactcgtttaaatttaaagaaatatgtgtattgttgtttgacttttaatacaggtgaaggaaatacacaggaagcttctaartaaagtaaggaagtcactctacttgagaacagtggaaatgtaatgagagtatctctatgcagtatccatcccattagtaattgctgatgagtttcaaagcacatcagttaaacatggcagtacttcttagctgtgtttagcttgtagatctgtttctgggttttcttttcttctctccccttcaccttaaaaaaaattatacccattttctgtctctaattttggatcaaccagattgactggaacttgagatggcatttcactaaagagtgaatggattcaatacgtcccttggaactcacccaaaggactatgattactgaagagccaagtgtcccataagttaatgttatcaatacgagaggccctgacaatagcattacagtggggctccaatagacatggttattttcatagtaacgaaattcaacatagaaaggaaaattttcatgctttctaccaagcctgaagcctcttttctctaagagaccttgtgggcactgggctggagaagactgagtgaagctttactgttgcacagatggtagaatattttcaaaacactggtaaaggaaaggcagctttcttagcaaagatatgtaagaaaaattactctatcatttagacagcattgaataagaatttacagtgttcactgactgagaactacatatttagttactattgtaggccttacgtgtaatttcctaagagaataggattgtttaattaatacagcagaatatgtttacataaatattgataaatattaatgccttttaaaaatccagtaaaagcatcctttgaatatttaaagcaaactcctataaaagtttatttatttattctcaagtaatatagtttctgaaaaaaacctctttataataaaaataacaataatggtgatttttcattgtgcttactatgtgctaggtcctatgctgagcactttacatacattattccactttaccctcacaagaacaatactacacagtaggtaatgttatcttctgtgatagatggcaaaaccaaggcttggagagggcaaataacttttccatagttacactgctggtctttctgccatccaaaccatgcttattatcatatatagtatagtgtcaatatagatgattcggaaaaaaaagtgcttgggaaagttttaaatggattgcttatttgtgactagtgaccaaaactttaacataaacattgtgaagttgtggtaggacagatagtttaaaaagtctttaaagaggctgggtgttggtggttcacacctgtaatcccagcactttgggaggccaaggtggtggcaattaagttttgagtttgggagttcgagaccagcctgaccattgtggagaaaccccatctctactaaaaatacaaaattagccaggcatggtggctcatgcctgtaatcccagctactctggaggctgaggcagaggaatcgcttgaacccagggggcggaggttgccattgcactacagcctgggcaacaagagcaaaactccgtctcaagaaaaaaaaagtctttaaagaaatgggagaggtaggaattttctattgtgtatttgttttcctagaaaatctacagatctacaacatattaattttgtatacatatagagcaggatgatgcccatattaagacacctcagttaaaaatctatttcttatggaatactacacacctataaaaaatacgaaatcaccagctacttgggaagctgaggctggagagttgcttgaacccaggaggtggaggttgtagtgagccgagatggtgccactgcactccagcctgggcgacagtgcaagaccttgtctcaaaataaataaataaataaataaataaataaataaataaataaatacaaaattgtgtcctttccagcaacatggatacagctggaggcaattatcctaagcaaattaacacaagaatagaaaaccaaatactgcatattctcacttataagtgggagctaagcattgggtaacacattgacataaagatgagaacaatagacactgagatctactagagaggggagggagggcagcaagtgttgaaaaaccaaatactaggtattatgctcactacctgggtgacaggatcattcatatcccaaacctcagcatcacacagtatccccatgtaacagaactgcacatataccccctgaatctaaaataaaaattgaaattattttaaaaagaaaagaaaaaagaaatgcagactcccaggccacatctggacccactgaattagcaatggtattttagcaagacatttccttccccacagtgaatcagagatgcatttatgcacattaatactcaagggtctattaaatggtctgaccttccagatgcggagctgggtttctcacccatccctttagtagcaggacaatgactgtataggaacttacaccagctgcctttgatttccatcttatttcatctggaaaaaaaaaatcaaagaaactacaaagacgtttctccaactcctgaattgtcagcaccatatctccactgcccctactttgaaattatctttgggtttcacatttcctgatcttcaaaccataaagcaccatttattagagcaccaatggaatatttttgtggaataagacccaactttatctgttcatgtatggtctagcacctcttttcaagtgtcgcagatattatctcttggtgactcacattagccttccagcgaagcacttatatgtccataaaatatctgtgaaataatgtagagaaactgatgattacttctagggagagaaagtgagtggctttgaaaatgggtgggtgtgatgtctccctgtattctcgcttgtaactgttgacgtatacacctttaccaagaaaaaataaatttaaagtaaaaaaaaaattttaaatggcttctacacagggttaaaaaaatcagattaacagatgaatggaaaaataagatatggtagatacatacaatggaatattattcagccttttgaagggaaataacttctgacatatgctatgtcatagatgaaccttgaggacatgacgctaaatgaaatgagccactcaaaaaaagataaatactgttcgattctacttttatgaggtatctagagtaaaattcataagaacgcaagtggaatggtggttaataggggttgtggggaggagcagtggggagctgttgtttaatgggtatagaatttcaattttgcaagttgaaaaagttctggaggttggctggacaacagtgtgaatatacttaacagtactgaactgtacacttaaaaatagttaacatggtaaactttatgtaaggtattttatcacaattaaaatttttaaagtcagattaaagcaatgcaattcacttatcacacatcatttctcttttggaccaattttattagttctgtttttgtttttactaataccagaataattcccaactttcttatttggagcagtttgcttttttttttttttttaacttgtgcctaattatgaaactgaatggctttaagctggacatggcagagaggtgccaaattcaaggtctctctggggaatggcacaagcaagtcacttacagaactgtggttgacacagagataaactcgcgagagttgccaactttgttttggtagcctccgaattataaacactcctgttatgatgcttggtaccctgtagccatgtttctcattaggcttactggatgctatggagtatttagatggaaagttcctcaaatgttatgaatttccagcatccactctttggtcgtttgtaaaaataatattctcatacctcttagaagacaatgaaatctttaaaggatactcactctaaatccagactgcttattgatgtgttgagagttgtagagtttaacaaaaatcatgggggttgggaacagatagagtgaggtacttagctgaggttccagcttatctcwtagagatgtttacttagtctattctttagaattgttggatgcttggacaaccagacttaataggagccaaatgagaaaggcatgttagaagaaaaaaaggttyatattacaagagggtctgacaatgacttattgtgagcaaagctcgtccttgtcaacagaataaagccactccatgacagggttgttccctcacaatgagtcagttgtgcagaaagtatgcacacaacattctgcatccaaaacattaaggacggagttggagaaaacagtttttctgcagagtgtcaaggacttgatatcttttatgctgtctctgtgactataatagtctagaaaattctgcgggaaaatagctgcaccctgattgtccttgcattgcctcttgtttgaggggaaaaatgccattttgagcccccaagatatcttcataactgtccatagtgcctagggtgcctgaacaaacaccagctctttattttataatgaatagttctatgtgttaaaagaagtcctaggcaacatttaaaaataactaaaagtacataattggattgtttgtaacacaaagaaaggagagatgcttgaggtgatggatacctctctttcttcccctttgaaaaaaaaagaagtcttgggcagaatccgggaaggcagacattgatttactttgagactcaaaagtgaaaatgaagactatgtttccctatctaatccttaatgtatacactgcttattcagacccttcacccataagctgtgtgaccatgagcaagtctcttaacctctataatccttactgttctcatctttgagaggtaagcatcaatttactgatagaattaagtgagatgatttgtgtaaagtgtctggaacatagtaaatgatcaataaatattgggacaaactagctataagaacttggaaatgaaacaacccactctgtctcttcatctgtaaaatggataggttatataggtactctctaaaatgaacaggcagcttcaggagttccccagttccttactacgggaggcattcaggtggactggggtgtaagttctccatcctggcatattagaatcaaccagggtactttttcttttttgagacagggtcttgctctgttgcccaggctagagtgcagtgaagtgatcatagctcactccagccttgagctcctgggctcaagtaatcctcctgcttcagtctcctgtgtagctgggactacaggcacctgccaccatgcccggccaactttttgtaaaggtggatttcaccacgttgcccaggctggtctcaaactcctggcctcaagtgatcctcccgcctcagcctcccaaagtgctgtaattataggtgtgagccaccgggcctggcggggggcactttataaaaatgtgatgctctggactcaaccagagattctggctgcattgggcttgagtggagcctgaacatctgtaattcttaagctccccatgtaattctaatgcacagacagcgttaagtaccaccaagccaaatgaccatgtagatatcgtttatgagactgaagcagaataggtagcatctgacaagaccaggagtaggctcttttcagatctagcaggccatgacttttcaggcaacacaccaacatatgtttagttcacctttgtcccaggcagcagaaactctgagtttccccggggactctggagctcctcaggttactaacccagcactagatttccattcttgagactctgagaaaggagcgggtccaatctggaacgctcatagattctttyctaggagggagagtcaatttgagttggtatctgtgttagtccattttgtgttgctaggaaggaatacctgagactgggtaatttatgaagaaaatatgtttatttggctcatggttcagcaggctgtaaaagtatggtacccacatctgtttggggcttctggcaaagcctcaggaagcttttactcagtgagggaaggtgaatggggagcagatgtgtcacatggagagagagggagcaggagggagaggccaggctctctttaacaaccagctgtcacatgaactgagtgagaactcgctcattatctcagggagggcaccaagccattcatgtgggatctgtccccttgacccaaacacctcccatcaggccccacctccaacactgaggatcacatttcaacgtgagatttggagggaacaaatatccaaaccatatcagtatccttattgagagaatttaaaagtttgaggtaggtgttgaaagagaggaaaaacttatttaagatttcacccaatttttcagttcagggaaataaaaaaaccacaatgatttttacaaatgccacagctttagaatagcttgcctgcctctagttccaaatactcttccaatttgccctatttaaaacttcaggatggaaatgaacacacagaaaggaactgataagatgaaaagtaaaatagggtatgaatcttcaaggttctgatagcttataaagagctagattaataatcggaaatttcactgtgaacatcagtagaaattataatcctgggggaaagatgatgctgcagttggggccagatgcctggtaattgatcctgacagtagtttgagttttaaataagtttcaaccttatctttctttggaaaaagataaggaggatacacagcaccacgaaaacacgaaaacacgacccctgggctatttacacatggcaaaggaacaaagagaccaatttctctcctaggaccatggaaaatgagaaatatgtaccctgatgtgttttctcaacaatgctgtggtgatattttatcctattattttgtgaatgcagtagatgtaggctgtttcttattttttcatttgtcttttctaaaaaataaaaataagtcattgtcacatgaataaatcagtatagtatagtgttacgagcataggccaaattgcctgggctgactttcagctctgccacttactagctgtatgacattgagtaagttactttatttatctgtgcctccatttcctattctataaaatggggtttgtgaaatagtctcacctcataagataattaaatgaattaacacacctaaagtattcagagcagtgcctggtatttaataaatgctcaataaacattagctattattaaaacatggaaatcaggaaagatacattgacattttatcaaattagctcaaattaatagacaatagatttctttccaattaatactgcttcaaaaaatactagaatacagcagtgctggtaaacaagaggtggaatgcaggatgttcactaattgccagtgatcactgacatgcctttgagcaactaagttatcttccctgtctagtttttcctcctttgcgatggatgtaacttagcctttcccttacttatgtcatatgagacatgtaaagaaaaaacacacagatataaaaataaaatttattgaagttctataaagtgctttgagccaccaaaaaaaaaaaatgcctcttaaatcctgtgttttctattttaaatatttcttattccctcctctgtcttctgtgtgttttgtggcttccttgtctcttcagtggctcctctgtgcctccttagaaggctgctttgctaaaggctgagaccgccaggatgggggaaagacctgggagggcttatcttcccctttcttggcccttaatgtccagtacctaaacccttgggctctttacttgagtaaagtgaaaagaatgcacttaagtgtgcaaagaaaagtgttttttaaagagaaacttaacaatagcatcttctagctttcatacatttaaattattaacagatttttaaaaacctggcaatgcctattaatagtttgatcttttaacatgttttattttattttttaatttagtgaacttttccttgtcgctgctaaatccaggcaaaattctggaagaagaaatgactaggtaactcatatatatggtctacttttttaaagtttcatttgaagataatttccaattacagagttataagaatatacaaataacgtgtactctttacccagattcacctattattatcatttttgctcccaaatcccaatttaaagtaagatgcacacatcatggccctttactgcagtatgactcctaagaataaggatattttcttacataatcacagtacagctattagcttcagtaaatttcagtacttttatctaatataacatctatattccaattttgtcatttgatccaataatgtcatttatggcattttctcctccttctagtttctcaatagaaatctctaaagcctgtaagcatgatgtttgtatgtctgcatagcagtgttgctgattgtaacgagtgctgtctgtatgctaaaaggcctgaaaggtgtctatctggaagcagtttataaaattagataataaaaatttgaaagtattgatatgtacttattattttttaaaatactaactttctactaatttggtaaaacattccaaattcgtttgaattcatgacattttatcatatcttttttaaaatatttcaaattctgacaaataggaacaaagttttttggttctttttataaagaatgtggaaaaatcaatatggaaagggcgatttcacatgttcaatctgcttattactatatttgcaatatgtaaatagtagtgaacttttcagtacaataagatatacaagtctagaatataattattaaagaggagttaaattgtatccacaagttatcaatatcagttaaaaacaaatcattaacttttttgcagttaacaacaaaaatttatccattttctttggctaacagttcaagtaaatagatttgccatcatggagctcatcactttataatttaaaaaaagaaaaatgtaatgtctgtttgttataatgtcctatacagtttttgttwtaagtttagtaaattgattaatttccagttctgaaaatttctcctgaaagagatgaataaaggatggtagggtgggggtggtggctcatgctataatcccagcactttgggaggcggaggtgagcagatcacttgaggtcaggagttcgagaccagcctggccaacatggtgaaaccccatctccactaaaaatacaaaaattagccaggtatggtggtgcatgcctgtaatcccagctactcgggaggctgaggcaggagaatcacttgaatccaggaggcggaggttgcagtgagctgagatggtgccactgcactccagcctgggtgacagagtgagactcagtttcagaaaagaaaagaaaagaaaaaagaaaagagaaggtatttaatagagcctttctcttttttttcagatatgcatattactactcaggattgggtgctggagttcttgttgctgcctatatacaagtttcattttggactttggcagctggtcgacagatcaggaaaattaggcagaagttytttcatgctattctacgacaggaaataggatggtttgacatcaaygacaccactgaactcaatrcgcggctaacagagtaggtacattgttaatgtcacactttcatatagaaattaattactgtgtgaaaatatgtcaaggaaagattttaaatgaaaaatgttactagattgagcatctgatctatattagaaatcgatcatctggcagccatgtctagcagcatctatagcctatgccattgcatgttggctttcccccaaggtgcatagtaggtttatttgaggactgaaytcacatcttatacctgtttatttctcatggaactttctactgcaggacgtgacaggtgctagactgtcagtaaagatggttgaatcaatgaatagatgattgaattaatttacaaagagacttgctttagtaattgtcaactcttcacttattcaacaaatatttgagggtgtttcatgtgygaagtaccattctgtgtgttcgtaatatatcagtgaacaaagcacagatctctgtccttttggtgcttacattccagtagagggagatagatgataaactttcctgactgggagtcctggcaaaggcatcctgagcaaataagtcaaaaaaaaaaaaaaaaaaaagggaaaagcaagacatttagggccttgtaaacctccacaaagacttcaagacttcagctttcacccagtgaaatggcagccgctggaagtttctgagctgaggagtagcatggtcagacttgcattttcaaagcatcccactggctgctgtgttgagaatagacttggttgggaatagggacaagagtagaagcaaagatctcttccctattacttccctwtaagaagaaatgcagtaatacttccctactactgttgcttattattgttgcaatgttcttcttaattcttgcttttaaacagatacatttttatgctcaaaatgttaatgcttctctcataggaytgactcatttaatagtatcaacttaatgatactaacttattagaagcattgatcaatcctgaatttcttcctttgtgcggtgtttaggtggggaagatgttattcaagaggctaagactctgaaagaggcttgcagtcagtgaacaaattttacttgtctatgtgtttgttggatgtctacttcatctttctaactgaaacctcctgcctgtaaccacttaggtgtgatcttttttagtgacatctccaaaatcagtgaaggaattggtgacaaggttggaatgttctttcaagcagtagccacgttttttgcaggattcatagtgggattcatcagaggatggaagctcacccttgtgataatggccatcagccctattctaggactctctgcagccgtttgggcaaaggtatgtgaaagctgggcctttttatgtgtgttaacccctgcacacagtaatctttaatatgcagaagtctcgtacttgtacctgttcaggtctacattaaatgtcagttgaaactacatccagtaacatggtgttaatatgatgctttcataaggaaattaatttttaacataattcaaaatgtcacaggctgggtgtggtgactcattcctgtatcccagcactttgggaggccaaggtacataaatcacttgaggtcaggagttccagaccagcctggacaacatggcaaaactctgtctctactaaaaatatgaaaaactagccttgcgtggtggtgcatgactgtaatcccagctacttgggaggctgagacaggagaatcgctgaactcaggaggtggaggtcgcagtgagcccagatcatgccacttcactccagcttgggtgacagagtaagacttcatctcaaaaaaaaaaaaaattcacagttcttacttcgattacccttagttaaggaagtgcaactttaaaatataacatttccctcaaattattgcatgaacataaaaattttaaatagagtttgkatttgttctatttgttttaatcattacctgtgatggttaagtggcactctgccagttttgcctsgcaataaaatacacaaaatgtattctactttagccaacacttcagagttgagaaattttactggcaatttttgctcatcctgacgttgatgatttrcacagtgaactacctgtatctcttttgttttgattcttcctttgcttttctcctgaaacatcttgtttggctatcttattattcagcagaatgcccatgaggaggtctggaagtattgtttttatagtaattaaaaattgtgacacaagtccaaagtgggtggatcacgaggtcaggagattgagaccatcctggctaacacagtgaaaccctgtctctactaaaaatacaaataattagccaggcgtggtggtgtgcacttgtagtcccagctactcgggaggctgaggcagaagaatcacttgaaactgggaggcagaggttacagtgagccgagatcgtgccactgcactccagtctgggcaacagagtgagaccccgtctcaaaaaaaaaaaaaaaaaaaattgtgacacaataaagttaagaatggtaaattctttcaaagcagtaaagttttattttattttaccttacaactaacaaagaaaaacagtagatgtggaacttgacagtgttcccaagagtgctatttagagaattatgtgtggattttcttttttcctgagtactcttggggagcctatcascagggtgggtcagatatagcctttgagggatgtggacgcagccattggatccagaacactggcatttgctacatgactttaatatttgttaaaggagagggtttgggaagaaaaagtaggttaaagggttgaccagagtgcctttaaacttttctccctatacaaaagtgatcactgtttcttttctgtccagatwctctcggcatttagtgacaaagaactagctgcttatgcaaaagcaggcgccgtggcagaagaggctctgggggccatcaggactgtgatagctttcgggggccagaacaaagagctggaaaggtcaggaaggttctttagccactggtttaaggaatgtgtttttacattttgttgcttcttctttgtggtatgtgttttttaccttccctttcctaatattaacccttctcgcataaattataagcaccctttactgatggctatagttgaatgtcagactctaaagcaagattcttaatcwtttatgttccatggactcttttggctatgtgatratacaaatggactcccttgtttttaaatgcataaaccaaaatatgctagccctttgggaagccaaggcaggagggtagctggaatccaggagctcaagaccagcctgggcaatgtagtaagaccctggctctacaattttttttttttttaataagctgagtgtggtggtgtgcacctgtggtcccagctactcaggaggctgaggcaggagaatcccttgagcccagaatgtcaagggtgcagtgagctgaactccagcctggatgatagagtgagcctctatcacaaaaaaagagtaaaaattttttaaaaaccaaaaaataaataaataaaagccccaaaaaacaaaataagtagggttacaaaggaaaataattatattaaaaatacttatcaaaatattttttattttattttactccttaatgactatgaactggaatatagaagagaaaaacctgagaaaacatcgacttcctagttatagcccagaattctttgtagggccttgtgggtcctccataacaatgaggcagggcttcccacccaggcctctggcattcaactttaatgatccaggataagcctggaaaattgaccagtatctggaggcatgttgcaaactcttctctgaaaaaattatcaaggcatgattgacatatgaaaagctgtgtatacatctttagtgtgtatatctcaatgagtttggggataagaatacacctatgaaaaaggctattctgctctacttaaatgaaaataattacttagggttttatttaaataacaatatcccctactgtagttgaagtatgattccatataaagtattttctttggctattctatgggactcttgatactcacaactcttggatataaaaattctctggaaattctctagcattaaaaacaaagtttcccttattccccccatttaattttctacttttctattccttaatccctcttcaaagccaacatgtttctgatcctctaacctcttccttttttctctctcactgctgcttcctgtacataatagtccacacagaccacactaaccctcagttggacctcaggatgtcagtgtaatctgtgccgctccattagccccggtaagcgagccacctaagcaaaggtaattacagtgtgtccgctgctgtcactggagctgtgtgtcacactgggcagatgcaagtcttcctgccacgccttgaggctcagccacacaggagaaatcacagcgctagctgtggcctgctggctacccccagagatgcagctgtgctctatgaatgcagcccccaaccagaggaaagcaccctgaagacctgggtgctttacgcaataaaaaagacaaaccttctgatggcagaatatgttttttaaaagactaatgaattctcatgttttatttggttcaacactaaaactggtgttgctgtgttttgttttttgtttttttttgtcacaaagaaaaatatcctagtttgtgtgatattttcccctcgaagtgtcattgcatacccattggatttttctttaaatttcagggagcccaaattaaattttacataccctctgggtctagtatgaaaaagtagatttgatttaacttgatgaaaaaaaattgtaatttaacagaatcattctagatattttaaactttatatcaaatgccagcagccagtaataatgcatttgaattatgattcaaagatatgatagtaatagaatgagcaaaactcaggaagagataaaagttgaacacaatgatactaatataatagtaagagaaatgatcaggcttgctaactatgaaccagctactgtactactttctacaattatctaccaacctcacaattatcttgcaaattaggcattattaaatccatttttcatatatgaaactaaagtctggaaaaattgaataagaactcatattccataagtagtgactaccttataacctgtatctagcttgacagatgaaggtcagcctgatttttaaaaaagtcaaagagagaagcctatgtttatgtacaacaacatgtaaaattttcatccctcacccagtggacaatagagggacgattttcttttctccagagaagagacattgaccagagttaagaatctaactgtttatgagttccagtgacatttacaatcaattctggtttggcttggtttctctcattccctcttaaccctgacttgtgatattgccstgaaggtgatggagaagctcttccatatcccagggtgagccctcaattctggaataaccacaggaatgttggttggcttggaatggatgaagggaaatggaaccgggccagtaaagagaaggcttggatctgttctaggcctggctgatcctgaattagttcaattcccaaagatctgggtctcmccatgggttcattaccttgactgactttgttacttaaacctccaactatataggagcckagtgtgactcggactatggattgttattcttaattataatgttttccctctcatttttctggtaggtatcagaaacatttagaaaatgccaaagagattggaattaaaaaagctatttcagcaaacatttccatgggtattgccttcctgttaatatatgcatcatatgcactggccttctggtatggatycactctagtcatatcaaaagaatatactattggaaatgcaatgacagtaagtagttctcctaacatttatgaagaatatgaaaatcttatttctccatctaccttctcttttctttgatatcgctcctttttgaaagatgaacatgattataggtttttgtttttggtgaatctttccactgtccagtgggcagagctgactttctagtatatacaagtcataattatgagtgtggataagaaaatagcatgtggttagaccatttgtgaaacatatacaatgtataaaaggaaataaaaatgggatgaatttaggaataaacaaatatggatgggagccatcctccctctgccgttgagttttattgtataagaaagtaagcatcattattacagaataggtcattgcacaagaaaatgttacatttatatcacttaaaacaatcagctctctgaaatacaagaagagatgttatgttagtttgtttttatttatcaaaatgaagatagcttcattttatgattgttaaaataatatatactaattttacaaaggattaggatacagaatttttaaaattaaaattacttacaatctaataatttatattctcttgatgataatttttggcatatatcttccaggtcattttctatatatatacacattgttttctttcaaaactgggatcatactatgtatatctttttgtaaccacatttatgaactaccaatattttgtgaccatcttttcatgtcagagactcagaacaatatgtaactatttaaatagaaatcttttaacatctgtacttccctatcttgctaaaatgaggatactgagcataatttggccctttgatgatgacttggggtcattatgaaagtgaatattttcagaatgctttatgcagtggtatcttcagacttcattgagaggttgtgggtgttcgacttggtgagccctcattaatgctgagtctaatttttctcacttccatcttctctctggcagtcggtttggaagcttgctaccctttcttcacttcctcatttactattgatgttttatgaagaagggaggttgaatcctgacaaccgttcacctttggtgatgagtttgtcctctatggccttaatttcctcatttgtagtatgtggataatgacacctatccggtagggctgagattgctatccccagagggagcccaagcaaagccctctgcatagagggcagggactctattgcattaaccttatggcaactattttggtcaacattatttttctttcttactggtccttatctgtattgcagatgggggatagatatttaactgatatttgagttatgggtaacatgaagtgttgctgtgttttgagaaaagccaaattatatgtagaagttttaccatgccctgagagaaaraaataatttatcttcacttatgtttttctcagttaagttatgctaataatctggattcctgaagctgtattctgagcttctttatatcaattcattttcctagtgaaaaaatactgtgaagggaaatgtgttaagtgttgtatgctacagtacagaataactgtgtaaaggaattgctaaccagtgcacactggagtgattttatgttttatgatgtgcaaactgttactttttatgttaaaaatctttaaaaatatatgtgacatggtgctttttaggagcattacatagggccaaaatctgccatgttttatattgaaccgtctatgtaattccatgcatagttagagaaaatcatataggatggaataataatactgactgaaaatgtttctttctggtggcatttgtgagtgagtcaatgaaataggtttgaaaaatctttttaactctgtatgtattcaggagaacaataggtagtttgagaaaatagacccactcaggcaataaaatgctatattagccttgcaaatgttgctcttccrcaaaaaaaaaaggaaaggataaacctaaacttaatcctttatgtactatgttacatatacatcacattttagataataatgaatgccagaatgtgacttaaacttttcctcatgttattttgctcaggtttttttttcaatcctaattggagctttcagtgttggccaggctgccccatgtattgatgcttttgccaatgcaagaggagcagcatatgtgatctttgatattattgataatgtaagtcatttattattttagtgccaaaagaagtctttgagcttgtataattaaatctggctttagtttgcatatttttgaatcaactacattgaataagttgtactgactaaagtgacatttaattatatgaaatgaatgacctgttagtaataaatgaaagaaaatacctcttattaatattttttaaatgtatctttagataatataataatactgatctcattttggaaaaggacatctgcactagtgcagagcaaagacgtttctcttcctagtttttatctttttcactttcatgttgtagccagactgagaatcttatgatttctatatgggatggggggtagataaattatcggtgggaccaaaattgacagtatattttgctgtgggttccccmtctccaaaaaattatcactgcatgtttggtatgattttaaataaactacattaaataaactgactacagtgaaaaagaaaaagttttgacgtaaaaaagtaagtcactgcattcaaatattgcaaggtagctaagtgaaatttgatcatttaatctaagcaatttcctttttcattgatccaagtcgtgagaaaagtgctcagtttctgattgtattaaaagtttacattatttctaaataactgctataatcaaccattcaatcttctcaattcaatctattacatttattatttaggaatgagctaattttcactaaatgctgaaatacttggctataatatatatcaattatagcatatttttgttattgcacttgtataaatatgcatatctgaccatttagaaaatttatgaggatatgccaaaaacttaaagggaaatattatatgaaatgagatgaatatctcttacgtacttttcaggaaaacactattttctgaaaaggagtatttctttaaacagcacacatacatatacacacaatcttcatcttgggtttttcttatgtaaaggggattgtgacattccaggtcctatttttggaatttgctgaatcatattccttaaaaatgcaacttgtttgtgctatgatggaatagtcattacattttgttttatttagaatcctaaaattgacagtttttcagagagaggacacaaaccagacagcatcaaagggaatttggagttcaatgatgttcacttttcttacccttctcgagctaacgtcaaggtactgtaagtaatatttataggaattcctaactgaggttgattgttgaatcattttaaagaataaagtctctattattttgatacttatgtgccttttcctttgggggttatattcccttatttgatacttttttttcaaatttcaarctgaatcgaattattcccattttagggctttgttgtgaagtgtgttcttttttctcattttccttacagatcttgaagggcctcaacctgaaggtgcagagtgggcagacggtggccctggttggaagtagtggctgtgggaagagcacaacggtccagctgatacagaggctctatgaccctgatgagggcacagtaagtgggaagaaccaagctttccrgagtgggaagctggatacaaattggccctttgaaattggtttttcagtaacaaatttgcgtgtgaatccagttttggtaaaaagcctacaaaatggcaatgccgatggataatgccttcacacccttgggctggtttcacaaatgcattaaataaaagtcataaaagctgtggaagctggacaaagctctcctctgttctgactaagctttcataacacattaaattactgcaaagcagtctacaaaccactgagaggattactttcaatgagttagagtttggtcaaacatactccatatagcaattgttgggaacaattgatgacaattagggtcaccagatattttaggacagcaattaaattcatccaagacagttgagttttcttaaacttaggaatatctaagggggaaagtgggatggtctcttaagaaactagtctcttgagaaaattctagaaacacagagacagtaatagcctagggtatgtttttttgccatttaaaagttttgctataaatttgaatttacagaaaattgtaactagagaactcacagatccttcacccagatttagattgtttatattttgacccacttgctttatcatcttctctttctccgtgtgtgtgtgtatgtgtgtgtttatgtgtgtgtgtgtgtattatgtatacccttatacttcagaatacattcctaaaaaggacattctcttagattaccacaaaacaatgattaaaaatcagtaaatttaacattaatgcaatatacaagtccacgagctatattcagaatttcctcagttgtcccaattttagagcattgagtttatctgatattaaaatggattataattcaataattgtgaaaacagaagattataaggtaaaaagtaaaaataatggcatgccaaaaccaaaaatcataaaaaggcattgggacagaacagagatctccagaattaatacataattttctacaatacatggaactatttatttaatttaataaaattaatattattggaaaaatctgatattactatgggggaacataggcccattctcatttactaaagtaaactctgggttggttcaagtgtaaatattttctttattttttaaaaagaacctggtaaaataccaaccattgagaattaaattattattgaaacaactgacatttttaaagaaagcatatgttaacagaaaaaaaagatcttcagaaattctataactcagagatattcactgttaacatcatgatttaacaattttcttaccactgaaataatagaaaaaaatgcccagtggcataattgattaattcagttgttccttaagcctctttccaataaaaaccaataaaactatgatgaaagaaagcaataaaggcctgacatggtggctaatgcttgtgatctcagcactttgggagattgaggtgggaggttcacttgaggccaggagtttgagatcatcctgggcaactaatgagaatctgtctctacaaaatattttttaaaatagccaggcctggtggtgtgcacccatagtcctagctacttgggaggctgaggcaggaggatcacttgagcccaggagttcaaggctgcagtgagctattgttgcaccaatggttgcaccactatgctcctccaaagcctgagtgacagaatgaaactctgtctctaaatttaaaaaaaaaaaaggacaaaaataatgaattggaacaaaagatttattatatatggaaaaagtattatatttattattagagaagttaatatgaatatatgaaggtaaccctgctcattatgaacatgcgactctctggaatatataaagatttgtaaaaagtttcaagaaatggtcaactttataaatgtatacaaatgaaaacagatataagctatcacctcatacctattaattggaagaaaacagattaaaatgataaaacccagtgctagtaaattacaatgaaacagatatatttatatattcctgttgacaatgtaagttattaaaatgttttaagataattatttagccttttattaacaagcaacaaatgcccagcaaatccagtcattgtacatgtaagcaattgttgtcaagggagaaaaaataaatcataatcttcaacttagtaattctctactcttgcaataaatattgaagtaagtcaaatatttaagaagaaaggaagtaaattaaagcatgtaaaaaatagcaaaacatgggccaggcgcagtggctcatgcctgtaatcctgtaatcccagcactttgggaggccaaggcgggcggtcacgaggtcaggagatcaagatcatcctggctaacatggtgaaacaccgtctctactaaaaatacagaaaattagccgggcatggtggtgggtgcctgtagtcccagctactctcgaggctgaggcaggagaacagtgtgaacccgggaggtggagcttgcagtgagtggagatgggccactgcactccagcctgggcracagagygagactccatttcaaaaaaaaagcagaacaccataagctatcaaaattatatgtagaccaggaaggtaagtgtgcatttttatttaaatttaatattggaacataaaaataatggtatgccaaaaacataaaacccaaaattgtttatggcaaataatccttccacgaaaaaactgtatatatgaaaataaatatcaggagagagcatragctttttatttttgttcttgcatattgctgtttatttctaattattatttctaaacactgaaccaagttaaatattaggtaggatgtttttcatgaatggtcctgatacttcagctattaratggttaaatacttaataggaaatatttctttctttcagattaacattgatgggcaggatattaggaactttaatgtaaactatctgagggaaatcattggtgtggtgagtcaggagccggtgctgttttccaccacaattgctgaaaatatttgttatggccgtggaaatgtaaccatggatgagataaagaaagctgtcaaagaggccaacgcctatgagtttatcatgaaattaccacaggtaaagcctctgataaagtagttgtccttgaaattagaatttcacctcataggactgagtttattcttcaaaggtttagctaataatgtttgagatgcaagattgtccaactttgctagataagtcccctgaatgactcagttaggggttaaaggattatagcmtggtagatgattaatataaaattttatacagcatgtgtcagttttttataattcagaattcatttatcttatcatactttatgatacattaaaatagttaagacaaagctccatgttgtctttatgtagttctatagaattcctagcctttttaaatttaagttacttcaagagctgatccatgttttctgtgttagaaatttgacaccctggttggagagagaggggcccagctgagtggtgggcagaagcagaggatcgccattgcacgtgmcctggttcgcaaccccaagatccttctgctggatgaggccacgtcagcattggacacagaaagtgaagctgaggtacaggcagctctggataaggtcagtagactctaaaaagctgaaggaccaccacattgaaacctattgaagattcttgccagtgcttccggagtctgggctgagaaacagaaacatagcaaatggagctacctcatggagctgtattgatttctcctttctgtcaggttacattgtcttcagagacaggtgaagggtactgacttgttttgaccatggtgcagtgagcccagatccaggtctttataacaagccatttagctttgtttatttcttgcacatgggctattgcaagactacttttgaccaaaagtagtcatgttaaaatatatatatttttaaatccggttacccagacactggtccagctgaaaactaattcagaatactcaccctattttgtaggcagtgacatcatctttatctattcatgtaggtgaccaggtgcttttctggaaataaagttcaactctgtacttgtctaagcatataaataaacaattcattttaagggtgctgagttcatctgtccagctcagrtatttctaagtctctcattagcatttttactaagctgaagtgtcacaggaaagaccttatcttggtacacttttgggggtaatgctgatgtcatctgtattaacaacacaatgtaaataccagagtcagatgacaccatagaaattagtttcaaacacataaatatcataaatatatttgatttaagacagttcagtaataatatgtgcaagttccttaaggaattctatctgaaccacctcttacaatttaagagacaagctgcacgaaccttattttctcaggaaaatttatatctgaatcctaagttaacctaattcccttttatgctgtaaactgtagttaattaatgcctcatggtttatcagcttaatatcttgactctttttgttgttttttaagacagggtcttgctctgtcacccagcgtggagtgcagtcgtgtgattatggctccctgcagcctccacctcctgggctcaagccatccttccacctcagcctcctgagtagctgggactgcaggtgtgcgccaccacacctagctaatttttgtatttttggtagagatgggtttttgccatgttgcccaggctggtctcaaactcctgagttcaagtgatcatcctgcctcaacctcccaaagtgctaggatttatagatgtgagccactgcacctaaccaatatcttgacttattttatataatttaataatgattaataacacaataataattattccttacaaattcttgcactgaattatactgcttttgtgtatattaaatcatgatattaaggagtcaaaatataatgcatatgagactggtatatggttggttattctgaagttacttaaagcagtacatcataaagtaatacatgcataagttattctaacttaaaaatataattagacattcatgtattggcatagactttttagagtaaagtcgggtagaatgagagatatatttaccaaaaaatcaaaaacaaaaaagagtcctattcagccctggagtctaggttccaatcatttccaggatacagatattcaatatacaatatagttcttgctgtgctaaaagaatagaattattggagatgaccagtatgtattgtttttcataatatgacctctgccagaaaaactgtgatcttgcaagttttagtacgtatttggacaagtcaattcattcaattttagctgtttcttcgtgttctataggatcatagcacactcctcagttgataaccttttttatatttactttaaaaatagctgatgaactactcataattttttaaagtctccaggaaaagccattagcagcttagggtgatggttaagagcacaggctttgatgctaggctgggattggagtcctggctctgttcttttctagctgtgtccttgggcacgttaactaacctctctaagcctgagacatctctgaagtaataggggaagaggggacagaaatagtatcataggattatttaaagaataaccaagatactgcatgtaaagttattagcacatgcctagcacatatgaaacacttgatattgttggctgctgctattattatggtgattagcattaccaggattattattattattattttttggttgctaaattggttacctattgctatgtaagaaactatcttgagtccacgcttaaaacaattcagtgtattggctgagtagatcctctgttctttccacctgagcacatggctgcatttacctggagggctggcttcattaaaatggtccatggtggcctcactcacacgctggctgttggctggccatctcaattctccatgtgacttctcacactcatacaataggctaacctggcttccttatatgaaagtttcagggcagtgtacccagagagcaaagactaatgtgtgaagtgtccagaggattagactccagaactcatcttgttggtcacagcaagtcataggctagcccagatttgaggagataacagactgtgcctcttaatgggtgagcagtaaaaaatctgtgaccatattgaatcttctaaagcatgccctctgtcacaattatttacatttcttccacatgcaaaagaaggtcacctcttcctcagaccctcaaaatgttcatacagtgatagcatctggctcaaagaccagtatctgaagatctgcatgtggtctaatacagatgagggtcttcattttcagctcatcttgacccacagacctatgaaaaagacaagttatcatcaacacatactctcaacatagagtggcggtgcagggacaggataatcatagcagatactcattcaaaaaggatgagaacagaaagctcatagcagtccttggccatagcaattctgacatgcagccaattaccccactactccagggaaatgggatgtttcttgattaaggcctgattctgctccccaggagtgggttccctagtccattgttctctttagttccagggtcttttaccttccctctaagagggctttcctttttcataagaaatgatctgtatctgcagctgagtggatttctttgcatgtttctgcccatagaaatttggggcccttttcattttgtatttttttcagtctcttttagactaagctgaaggactgtcttaaagactttgtgagtttacttagaatctagctgtcatttactcaagccccagaagttatgcctatatattttattttgagacaggctcctctcttctttgggctgcaagtgaacctgccatcagaaaactcttaaatagtttttaaggctttttttttttttgtagctgaaagtgtccactaggctctgcctaaaatctttcagagatttttgctaaaaatcttacacctacacactctgatttttgccctaattttattggatgactaacaacttcattttccaactgagtactggggtctgctttattgtcttaaattctccttgtaaccaagtagctcattctttagctgatcattctcttcccaaacctcattgtacacagctaggggaatccacttgtctctcctatagtctgtctagagatgtctgaaatctcctcagccagatgtacaggttcattaagtaaaatgtctttcttccaagtcactgcaggaaatatttttgtcaaattttccaaggttacataatgaaggtactccttttctatcctctaatagcaatttctttactcttgtttcagtctccactaacaatattatcaccttcctttcaaccaccacctaccactcaatcccaaagccaatgtcacatgttttaggtttttggttacagcagcataccaatctaattactaatttctgtatcagttgttttaagccaagaatttagtgacttaaaatacaacttttattgcccacaaatttgtgggttggtaaagtggtttttctgttggttttgcctagtcttatttcagctcagggtcacctgggctggaatattcaaagtggcctcactcatgtgcctggcagttggggatggctgttgcctaaggcaggttgcttttcctccctgaagccagttatccttcaggaggctagagaaacttcctttcactgcggttccagggtaacatccgaagatggcaaacagacgagctgtgtgagatcccttgaggcctgggctccagaaattgtagaaatcaatttctttacattttctttgtcaaaacaagttacagggcctgcccagatatgaggaggcagagaaattggctccacttctgtataggagaagctgcaaagtgtttgtggccatattaatctgccatagttgctatgaaaacagtttataatctgcactaattggctccacactgcaaggtaattatgctaatatttttacagacaataaaccatacctttaaagataaaccctttattactatgtccccaaagaagataccaatcaatcagttagccagtcactctaacttacaatccaactctctttttaatgatgaaaagttgaatttcataaattgtagtcttgcctctgaggaccataaggatgtatcactattatatctactgttatttctactcaattacccatcctggaagaataatatttttattttgtggatcctttatacattgatcaggccttccttgtgtggcaacagcttactgtagttacctacttatttttatgccttctctttcctaggaagaataaaccaccccaggaggcagaattaataaaaagattcatatttgaatctcttcaacagcccagtgccttgcacatagtagaggctaaataaatatttactaaattgactatgatggcccagctcattgagaaaatatgtctacattaaaataattttttttttgagacggagtctcgctctgtctccaggctggagtgcagtggtgtgatcttggctcactgcaacctccgcttcccgggttcaggcaattctcctgcctcagcctcctgagtatctgggactacagtcacatgcaaccacgcccagctaatttctgtatttttagtagagatggggtttccccatgttggccaggatggtctcaatgtcttgatctcgtgattcgcctgcctcggcctcccaaagttctgggattacaggtgtgagccaccgcgcccggccctaaaataaattttaatagtgatgaccatattagcttttgactctacagatagcaactatttgtcaaaataaataaaatgctattaaatataagatcttgaagaaagatataacagcagattttgtattttgactcttttaaagaaaggcaatacagtttcatacctacatgcacactcctgatcatggtgttatcatagaagaacaggaaaagaaacaaaatggtggccaggtgtggtggctcacgcctgtaatcccacaactttgggatgctgaggctggcggatcacgaggtcaggagattgagaccatcctggccaacatggtgaaaccctgtctctattaaaatccaaaaaaaaaaaaaaaaaaaaattagccaggtgtggtggtgggcacttgtagtcccagctactggggaagctgaggcagggtaatcgcttgatcccaggaggtggaggttgcataagccaagatcatgccactgcattccagcctggcaacagagcaagactccatctcaaaaaaaaaaaagaatgaaaacggtgattttatggtgatttttataaaaagattccaaaaggtttcattctgatgctgttttaccaaagttccagaaaggctagtagattagtcctccctttgtttaggcccacctttcatccctgaacatcccaaattagtcaaaggtctaaatttcataatagctggtgtccctaaatctaggatatttatttatcaatgtcctgtcatcatcagggtgtctgggagctctgaaaaaaaaaaaaaaaaaaacaacaacaattttttgtgtcaaagctctactttggccaacttctcttggtcaaaggtgacagttgcttacttctaaattgatgaacacgtactttatttcttttacatagcaatcattcactcatacatctgattccaattcctttgtgtatatatgttgacatatcatcaacctattatcatcatcatgataatatagtcattgttagcaatttattcatcactgttagcatcatgaatataattacagtaatcaaattattttgtatatgccttattatatatggactaaacccagcttccatataagtaaatatttgtgagtgcttctttggggcttatatactaaaaatcaaataatagtcttaaatgttgtccaagagagctgtgttctagcctctctctctttccagtgatgtttctcttttatatttacttaaaaacaattgattcatctggatttattttaatgtaaggactaaagtagaaayaccacattactttattaaatggctgcacaattgtcccaataccatttattgtataattcaccttttctttaccaataggtagtaccatatttattgtaattaaattcttagatggtttatgtctatttctggactctccatttggttctattgatcaaattacccattcacgtgctggtttttcctaggttttactattttaattgctgtagctttttatatgctaatatctgttagagatatttccttctcattactcctctcattaacttctttttcagaattttcatggctatttttaaaaaattgagatacaaacacatgccataaaattcaccctttaaaaatatacaattccggggtttttagaatattcacaaggttgtacmaccatcactgctatcgaattccagaacattttcaccacctcattaagaaaccagtcactctgcattccaccctcactctagcccttggcaaccatgaatctaccttctgtctctatgaatttgcctactcttagatatctcatataaataaaatcataccatgtgtcatcttttgtgactggcttctttcacttagcacaatgttttcaaagttcatctatgttgtgatgtgaatcaaaatgcattctattttatggcctaacaatattccattatatggatataccacattttaaatctgtttgccaattgatgaatatttggattgtttccactttttgcctattatgaatctagcctctcatttttaatttatatgttaaccacttaggtgaattagactattctctaataaccatcctaatgatgtggtttgattgtctcagagtaggagtgatcttaagctattgggtaaaagggctaatgagtgtcagaaagagtagccattattaatgacataatatcaatacttttattggcattatccagggtttaaatgcccatttataaatccacccagcaaacatatgaggccactaaactagttagacaggtgatttgtagattttagcatgcataaaaatcacctagggcacttgttaaagagcagatttacttgccttactctagagattatgctttggatggcttttgaaccataattttaatagtcctgatcccaaggtacattttcacctaaactgcctgctttcagttcatcagaattagttaagatcaggctcttaaaaagagatcctacagcagtgctctggaaaaggctgtcacttggcaacaacttccctaaaatatttctggtratgtctctagcattccatataacttagagctagggcttctcagacaagtgtgaaaacactgaagaaggatcaaacccttatttttcttaagtaaacactgacactaccataggtttctggagaaatcacccatcctcctactgaaggggttagccacttgtctggtcccaaactcgtctgactttaatttttcataaagagtgatgcctttgccataatcacgcagagatctggagtataaactactctctaatcatctacaaacagcattcatccaagtgcttaactgtgcatgttaattgacagtgtgccartrctgtaaccctgatgcaccacatttttgttcttttaggccagagaaggccggaccaccattgtgatagcacaccgactgtctacggtccgaaatgcagatgtcatcgctgggtttgaggatggagtaattgtggagcaaggaagccacagcgaactgatgaagaaggaaggggtgtacttcaaacttgtcaacatgcaggtactygcttttcaggaattttttctgctatttgctcctcaatatagtgttctttaaatattaaaatatgatccagtgaatgctatactgagcaagaagaaacttcaacaagatgcctaaaagtgtatatctgagactttaaatcagaatctgtaaagaggtagcaggtgagaaaataggggaaagtgccaaaaacatcatggatatattccttaggacagattcctaattgcctggggaatgtggtcaaactaaaaggtcctttctaccataatgggatggtcagagttttgggagtcagaggacgagaaaagtgtttcgacttgtccgaggagccccggctctgagttatatggaatgccagagactttaccagaaacattttagggaagtcattgacaagtgaccgccttttccagagcactgctgtagggttccttttgaccagccaggatctctagtggttgagggaggtctcatgtgatctaaaattgtttcccagatgatcctaataagaccatcatcaagatttgtggctctaggaagtgaatagtttgtcttttaaaaggaaaaagcaggccaggtgcagtggctcatgcctgtaatcccagcactttgggaggctgaggtgggcagatcacctgaggtcaggagttcgagacgagcctggccaacattgtgaaacccccatctctactaaaaatacaaaaaattagctgggcatggtggtgcacgcctgtagtcccagctactttggaggctgaggcaggagaatcgcttgaatccgggaggtggagattgcaatgacctgagactacaccactgcactccagcctgagtgacagagcgagactctgtctcagagaaaaaagaaagaaaagagcactcattcattctagttcctaaaacaggttatattgataatgattggtttttcatattattaagacatgttattatactcagtcacttgagcaacattgcagaataaataacctaagaatattttattctatgaacrattctatttgtgaaagtatatacatttgctttgatacaactgtaattagcatgtacacacatatttttgttcttttttcttaacatttcagatatacgtcatccacatactattattttaatgggtgctcagaagttcattttattaatgtgtgaaattagtcatttttctaaagttagatatttggtctgtttccagtatttctctattctaaatattgccactgtgagcacaagtagatcaaaaaaggttgtcaaaattttgccttgctttctgacaagtaactcttctgagcsttcgtttctacatttggaataccaaacctaccatgagaggttgctataagtttagaaaaataaacatctgaatacttgtgtactaaaaacaacctactgaaatgtttaaaagggtggattttgtgatatgttaattatatttttaaaaagctgtttttctttttttttttttwwaaaaaaaaagacctgacacaaattagatgatgataaatggtggttactaaaatttgcaaattccyccaaatgaaaataccaaatgaaatgacgaaaagttttataactcaggcttgcatgtgccagagggtgttctacagtggagggaatcaatgatagtgtctctgccgaatgctaccatatggcctagccaccataaagggtctttgtcatttcactagttaggaatgcataaaatgttactttaaatccattttagttttaatttcatgagtggttaccaagggtctgtgattttgcccataatgacatgttgaatcctcaagtgaaataaccacttggctgtcctattgccataagctcttgtaagaatgacctctgcttccatcaggacttggattgggagactgctaaagagatgcagacagctctgacctttctatatcaaattcccaagcttactttcttaggaaaagttgtacatttgaagactgaacagtcagtggtctggcatgatagaaatctgtcaccaactaggcaatagctttgagcaagtcatttaaccaaattgggttttgttatcctcacttgctaaatgagcaggggcttcaggtaagatgacctctgatatttctaccagctctggcattctgtgattctcagcccctttgaatagttccacctgggtacccccacatttcccatttctgatttgagttttgccctcccacttacttggtgaggctggagagatgagggaaagacccactgtgagcctgagagtcagcagatgctcaagctaatgcagtactcttttctcaagtttcaaagaccaacctggttttcattcacccttgttttggtattgtttctaacaagtatcactgcttttccattaggtagactgttggctcttagttgtttcttttaaatgtatcttaatttttttctgattataaaggtaatgcattctttttaaaaatcaagcatttttttaaaaaatccaaacattacattctagaaacttgaaagtcatcataagccaaatccctacaaacagccactgatagctatttcgtatttatttttcatctttgccagcctaaagagttaaacagtatcttcaaatttaactatttataagattgagcttatttctacatttttattggccatttatatttttcttcctctgtgaaagtatttgttcctgtattaggatatttttctgttgtgttgttcatgatattctcattgatttgtgagaactctttacataaaaagaaaatacactcttctcttgcgtgtattggagagatttttttttcctgctttgttcctttcaatttcactttgttgtatttggctgccataaagaagctttaaaatgtatgtaattaggttgtcagttttttcctccatgtcttcaggatttgaggttgttctccgaaaggatatttaccccatttcctttcagcattttttgttctgcttttttacaattaaatctttgagacaactgaagtatacctgggtggaagaaatgagggctattggttttaaatagatactttttaacacctggtggaaaagtggctatcttggcttggagctcaatgacctttcagctgaagcacccaacaccaactgagtgttttaggtaaggcacagaaaaaatattatgaaagagacaggtaatgttcatttggtcatagaaggaagctaaaatctgaatgggcttattggaagaactgtccattgagatggacctcttgatagcatggatgagattaccaaaagaggaaaagttctggggaggtattcatgagaggtggtctggtttgacttgccatgagctagatttttggggatccaggcttgggcaggtagtgggaagctggggatgattttgagctgccctttaggaaaataaatctggtagcagtgtgggaacagatggcagtgagaatgcaagggatcaattacaaagtctgcagcctaggttggtttttgttgagagatggtataaaactgattcagtaatgagcaaataaggaaatccaccaagcagaacatatcactgcaatgtggttcaaggcaatatataagcacatgggcagtgttctgtcagatgttgaatgagcaactggaaaactaagagatcatgattggctattgtatgtacagtaaggcactagccaaaggattgggttcagggcaggtcttgaagggaggagcaagaacaagacactactacaaggactaagaccctgaacaaactattaagatgtgtagttggacacatcttaatagtggaggaagcaaatagggaaccagtccaaagtccaactccagcagggcttgatgttccctcacccttactaggcagtgaactagaagtccttagatcagcacccccacccccattcccattaaaaagagaactgatctcacagccagcaatgaggctgagsctgcatgttgggtctcgttgtgtgcatgagagcaggactgtgaggaaggaagatgaccatactcagccagtcgaggaagacagttttacctcccgtgggtagtgaccaggccctttgattcagcttttcttgtttgtagctttaaaaacaagcccttgttagtgtttccatgtagtcttcttccctttcttggtggccatgacttgttccctggattattgcatattaagtaaattcctatataccttctggattacgaaaaatgtgtctttaaatttttagaaaatattcttatactccgattttcttattgttcaaattgaatttaacctttctatactttatagttttctagctatccttgattgagaagcagttaggaaatctgaaaatcttgatacatgtaatattccaaattgctttatgattctaaacttggaggttacatccatttggagacacacacacacacacacacacacacacacacacacacactttaatgtcttgatattctttcagacatcaggaagccagatccagtcagaagaatttgaactaaatgatgaaaaggctgccactrgaatggccccaaatggctggaaatctcgcctatttaggcattctactcagaaaaaccttaaaaattcacaaatgtgtcagaagagccttgatgtggaaaccgatggacttgtaagttgtttttcacttaaattaagtcttttactttgtagttttgctacaattrttgaaattcttagccttgcaaatatttttcaggcacagatgactgctactatgagccatactctttgtaaagaaaraaattttcraattttaaatgtatttgacaatgaattgaaatcagttccaattataaatgggttttcaagggaaaaaaaatccagaaatgtagtctttacgctgagatgcttaatattaaaattaaatttgacattcatctttgaggtccagaggtaataagactggtccaaaacgagaggccctgatatttgcatactctattgggtaggattacatttgattatctatattaggaaacccagaatagcatccgtttaagcaaattaagagtttttatttctgtttcacatgccaaaatmttagaggtgaaaaacccagggctagaacagtagctccacagtccccatagacacaagctcccttcatctttatctgcactaccctggcatcaggtttccatcctcagggtcacttatgatctaaggtggctcctgaagccctacctatcacatctgtggtccaagcaacaggaagaaacaaagaggttttccagaattcccacacaatactattacttataagtcattggtcataattcgatcacatggccatacttagcaatgagtatggaaaattcaattttttttttttgctgtatgcattgacattctaaattagattggaattctcttacttagaaaaagaggagaatggtgagaaatagcaacgttggatttaggagattattaactccagttaacaaataattttatttatttatttatttttaattttattttttgagacagggtcttgctgtgttgcccaggctgaagtgcagtggtgcaatcttggctcactgcaacctccacttcccgggctcaactgattgtcccacttcagcctccttagtagccgggactacaggtgtgtgccaccacacctggctaatttttctgtgctttttgtagagacgaggttttaccatgttgcccaggctggaacaaataattttattatacagagggaatccattccaaaaaaagatttccttatttcaagatatagttttgatatattttgatgttatttgttaatgaagactgagtttatttttactcttgtgttggcctgagaaaactaattctaccaataatttattgcatctgtttttatctgtgcatgctattactgcagaaattacaaggactctcttagaggtcttaatcttggtatatttatagaaagaagaataacaattgtaccattttggagcgtcattattataagtcagataagcaatttcccctcttttggctatgaaattatccacttttcatttcctcatttattttgagagttattttgctatctctttaaactccagtattttataggagcacgtctcttgaagaaatgcacagagaagagggggaggcaggaaatgctgcaatcaacaagattgtcccaagtaccatcatagggagaaaacaacatgccaaaggagagggagagattaagtctgattagagggacctgtttgtgtgctgaagagcagtaaccaaagaaaaagattcattcattatgctggagatagggacttaaagataatgttaactagggaggaaaaaaaaaaaccctgaaatacagaaaaaatgggtaatttgaaagaaggctcagtagaacctacttctatattctctgttttatagagatataaatataacctttctcagtgacctcaagyttttgggattccatagtcacctctgtctcaagtttaatgttaaactgcttctatcatcaaaacattctttatgagacctaaatcctgcatgcttggccagacatttaattaaacatttgctgagaatcttatatgtgccaggaattggactactttctaggaatataaagacataatctttaccttaaaaaaagttacatactagaaatggaaatatgtaaacaaaaaaatcacagacaagctaagctatgaaataagagaagtctgcacagggaaaagtgtggtaagagaaaaggaatgtaattaatttggttttgtgagttggaaatatggtacagaaaaggcaaggttttggggtgaggaggccaagcccatgttctccagttagtaatggtttcctacatttgcaaagatgtttatccatctactcaggtgtattgtctcatttgacccagatatcatccctgttagagaggcaggactgtatcataatatatgagaaaactgcagctcggcttatgtggtccagccatgactgtcacaccaatacagtgttgtgtaactccagagctggatgccaaggtatttgtgcccagatcctgctacctcgcagtctgctgaggccagaatagggacgggctaagcatcccatgaaggttatttcttggccgaacaacccatactcagcttatgatgtgtaatcagtaaacattgttaacatgttataatatactgtcctactctctagtagtttgcttgtcattctctgcacctagtttgcgagtcccttgagggcaatggccatgccttttctatgtctacagactctggtaactgttgtgtcatcaccagtttgccctgatgtttatatgttctaggaagcaaatgtgccaccagtgtcctttctgaaggtcctgaaactgaataaaacagaatggccctactttgtcgtgggaacagtatgtgccattgccaatggggggcttcagccggcattttcagtcatattctcagagatcatagcggtaagtttgcaaacaycacataacagcctgaattagatcaattcatcagctgctgcttctcccaacctcacygactggctccattctgggattaagcagccttaaattaaactaagccaaagtccttaaatcccttttgagaaaagctgtgagggaaaagataagtagcctttgaatcactctaagttatgatattaatgaaattataaaatgtaaaatcaatgaagaaggcattctaatgagctctcttcatttggtgaaactggtgtcagacaatgatccccaatctgtttgtgtagaaaagctggtacaagtcgcacagtgaggtggagagagagtggagcagggaggggttaaagtcatagagtttaataagagtccaggcactgggtatagactggcctcaccactcaatagctctcggtacctcagtttcttcatctatacaataaatctacctcataacatggctgaggattaagagattatataggtaactatctggaaagcatttaagagtgtgtgccttgtagtaagtattcaaaaagcgatagccaccccattttagcaatccttccaaggcttggggagtccaagactaagaaagaaaacatactagccaatcattcaattaattgggggatatttaaaggaagttatcacaaatataaagcctccatcaattccatgaaatccagaattcatattctacaatttcagtcaagctctaatgttattggagagactttgttgttgaggataaataattctccatcatgttacgagtttattatttttgtgatgttggacatcgatccacaattaagaccacaagccaaaaaataaataaattagaaaagatcctcctccaaatcttttaaagtttcaaaacaaagcaagctctggctctcttgcaattcaaggcaatgtggactatatattttggggcatctrtctgcctagtgctgctccaggcactggagatacagtggtacacaaataaaccaagttgtgccctcaaacagcggtttctgtcggggaagacatgcaatggacaaacaaaaaaataaccccacaaacatgtaacatgttgagggataacaagagttttaaaagatgggtagggtaatagagaggtgttagctgggggtgctgtttcagataggatgctcaggaaaggcccctctgggtggaagcctgatggaatgagaagtggagggctgggacagggaggagtcacagggagcaagggacatataggaagaggaacaaatgctaaaatgtgcaaccactcacagtccatatgcagtatgtcaacctatgttaacaaccatgcagtcagaaagtagaatagagattaccaggagctgggaggaggagggaatggggagtcagtgtaatggtatcaagtttgggaagtttgggaaggcgaaaagttctgtagatggatactggtgaaggttgcacaacaatgtgactgtacttaacgccactgaattatacacttaaaaatggttaaaatggtaaattttgtgttatgtatattttaccacaattaccaaaaccctacatatttgaagcctagttttaaacatgtgacactcaagccactatttatgagaggaatgaagaaggatcagttatgtaatccaagtgggcgttttaaatattcttttgtagatttttggaccaggcgatgatgcagtgaagcagcagaagtgcaacatattctctttgattttcttatttctgggaattatttctttttttactttcttccttcaggtaggtacccatgatttgcctttctcatcaagtttataatttaattagagaaattaaattaaacctaatggagcttccaaattcttayagtgaaataaattgcaaacatgattggcataaggctctgctggagggtagactccttatcagggggaagtgtgacttccctgtgtcctaacttatattacattacaagtttgccctcagcagacattcattaccaaggacaagagacctcagtttactgcagaacataagagtaacttaaattcaacaggttgggaactgggaaagtacagtccaatagcattctcttttctgttgttactctttatagaatatcaagtaacttctctgatcttttcctacttaattgatgaactatttgaaagaacataatattttgcattctaacgttgtagacctggccaaaataaactagtcaaactctctaattgtacttttctacccagttagacttctctgtaatttcttttgtctctttaacccagtgggcaccacataggcctttcgaatataatacaatccatcaagtcagcaaaatagtgtttcctagtcatgccagcatgcttctcttttattattgttgaaccaatggcaaagtaaaccaagttttttatttagaaatcattgccctactagacacaactcaatgatttgatccagccccagtccctggcatgctagggagtgcagctagaaaatgtgtttcaggggccgcaggaacagtgggctgatgcatagaacctgtagcaatccrccagcaaatggagggggagggcagtctggtcctggacaaggaacacctggggccgattcactgggtgcactgatcatctatccccctggcttagtaaacagttctgatgtgcactcccccgtgtgccctcggcacggctaccccaacactcacactgtggctggagactcacacgtcccagaagtaagcccacttctggatatctggactcctctccagtttggatgtggtaattagaaagtaggaaattgtcccaaagaggctggggaaggaagagtaccctgattgttccccaatctgagtgcaggtggagctgtgaccaggaaccagcatactcatttggatcttgtttctaaggtcatccttcctttacactgcatgagccaaaatgaattcgtgtgtaggactttgttacttctgtatttaactggtttattggaagtagtaggaacacactgaattttgtagttaaacacagtatctttgtcactgagatgttgtccttcaaagttttgaaaaataaacctatttagaatggtttagaagccagaactggacacctttaagatttttggcctttgattgtaatgcatactgatgattttgcagtacatgaatttgacgtgggggctttgaattcgtatttggtcctggacttttgttatttaaatagttaacatacaaataatgtaaaatcaatgtgaatataggcacctgtgtcagaatactagcaactgttacccacacaacgggcaggtttggtcacttggtgggtttcaacccaatgaccacatcaaggaggatttagcaaaggaattttataacttgtcacaagtgagaagctcacagagcttagttcccaaagcagtatctccccaagctggaggctgggtcaggttttataagcgtatggtaatgaagtgtgatctgattggatcttgcaatgaagtgatgccgggaagcaccatctgactggatcctgccatggggtggtgtcagagctcaatctgattgaatcctgcatcctgccatgtggtgtctgcttcttaattcagtccctgattcttgtttcggagcacttaggttcctgctatggttgcatgcttgattcatctggggctgctcaggttattaacatgacttgaggatccgtggcaactgtaaaacaactcataactttgctacataaaagttgaacatgattggtctggtgcaattacatacataaagatcaaaagagaccatagccttttttctcaaccagggtttcacgtttgggaaagctggcgagatcctcaccagaagactgcggtcaatggcttttaaagcaatgctaagacaggtaggagtgtgcgctggagaatgccttctgatctttcacatttcttccatattaagcttcttactgttcttattgttatgtcgatatgcatgttttccccccagggtattcacgcaaggatggggcagagtcctgcaaattgtcctggtccttcaagagctaaagacttctcatgttttttttgttttttttttgttttkttttttttcatagaaataggctttatttgggtagctttggcttattctgtaaatatctctctccatgtagacactatcatttcgaagacctgtatctcttttctggatcctgtgcaggccctggtgagtccattgagactccaggatgtctttaaaccaagaaaaacctagttgatagcatttaatctcatgtaccacmatctaccatactaactgtaggtatcctcaaatgttaataattgagttttgtttatttcttatttgaggtctattttcacattaattcacttgtttgtttattcaaacattacttatcatgtaccagacactgtgctggtggctggtactgtataatccattatttgctctcctcgtaagttcacattctagtgcctgacataggaaaatatgcaaacatgaattatctatttttatagaaaatgcctaagagagggccagaatattatccattcaattgacaggaactgattacatttctgttcacaaatgggcacatagtaggtagtatattctgattaaatctgtctacaaatcctatttcagtatctcctaaactcttgctatgcaggaaaaattattttatgtgaaggtaaaagatgccatggatgagtagcttacaattaaaattaagtctcagacatgcttctttttttatccctgtggctaactggagatcagacacactttcaatcagtgtttaacaaaaaatcaaacaaaagcttggtgagaaaccagtgcttattttctcctgcctagaatctatcagaacaacatgtccaagacagctccaccaccctttatgagagacaacaccatatcagggcagaagtgtccatagtgaaagacctgatgattgggtgaatggaatgcctaccagcctcccagccttgggaggagctggcaaggagcatggcagccatctgggtgagccctgcccccctagaccagagatgccctccctgctaccacagagcagtcaggaagctgggttctgctagattctgggggtgtgtgctcagagcaaggccagggactctacactgcatatgaggtctcccctaaatttcctcagcattggagctttgggaggctttgtctggttttctttgcttgttttaattttgaactaacataaacgtgtattttatgccataggacatgagctggtttgatgaccataaaaacagtactggtgcactttctacaagacttgccacagatgctgcccaagtccaaggagtaggtagactgcactctacttgtagttttttacataacrtggttttagataagcatgtagcatacccacacttgttaagatgcttccagctagaaatagcagaaagctcaaatcaaaactgctgtaaacaataagcagaagattaaacttcaaggttgattgacccactgccccctccagatttaatccagaatccaggttccctcattggctttggctttatcccaaggctgattccctgcagtcacaggatggctgctaatagtaattagaactacaggcttccttatttcccatccagtgaaagagagcacacacctctacctcaaccaccaaacaaaaaccctttgctgaaatctaatttgggctaatttgggtcacatgccccaccctgaaccactgtctccaggggatggtggtgttctgagtggcctacgtcccccacccctttagctgaggtgggttactttgcagctcactgcttccacacaacaggagaaggaggaatggatgcagagagctgactgcaatgttgctacagccacctttgttttctgagtggtacaacactaattcatccttatatgtgctttgtggtggatgtctcttaggacacgtaccctttgtaacaacagatggtctctttcccttttacacttttgaattaaatggtctttaaaattacccaggtacattggagttagtttcctctttgaacattgcatctatgaaaaaatacatgcacccccagtgcccatccacaaagcagagaagttgattacttggttctagaatgttggttcaggtgggcargagaggaatgagagtgtaaaggcacaatgaagaaatgtctgcagagcctcatgagttaagcacaggtgttgtgggtttattgtaatgaaagtaagccaatgtakctcaggcatagaacccactcatcattctgaccaagaggctaaggctggagcgcatgcatttggagcttaaaactacagttgctttgtgctttttctctcccaggccacaggaaccaggttggctttaattgcacagaatatagctaaccttggaactggtattatcatatcatttatctacggktggcagttaaccctattgctattagcagttgttccaattattgctgtgtcaggaattgttgaaatgaaattgttggctggaaatgccaaaagagataaaaaagaactggaagctgctggaaaggtaggtcaaataagatttcaattggtgttaagtgttgtttttagacatgtgttttatttgaattatttatcatgatatgcaggctttaataattaaatgtttgtgcccactacaactaataattgtcaattgtgtatgaaatattttactgtattaaygtctagaacttaaatataaggtgattaacataaaacgttgagcctatagaaagcacttaacatagttatgataaagaacttctgaatattcaaagtgcatttcattttacttcatgtccaaatgctactgtttggacaaatgtcatccctgtttcacaaaccttcatgcagaagactgtaagtgaattgttcagggtcggacatgtgctggcatttaagagatcctcttctttttggctgtgatttctataattaagatggcagccaccagatggcagtaatgcctcaattttgtggttctcactataatggcaattgggcttaacatttacttgagccttactacgtgccagttattgtgctacatatttatatgcaccaatttattacatcttcacaataatcctataaggcaggcactattgttatcccaatttcagaaatacagaacctgagattcaaacagaagttagagatttggctgggatttaagttcaggtctagtttcaaagctcttacctctactatatggtctctttatatgtgtttaagtgtctaaatctacacataaacattttatttacaagtacatgcactgaaatgttcacatgtagattataaccatgaacattyttagtcttatttatgtaattattatcctttattgaaacatgaggaagtgaagcagataataaatataaattgtgatataggttttatagcattgcactttacaaagcccttttacaagcattactgcaactgaccttaactagttatgagaagtggaacagacagtatctctatagggaagaaggcgtcagagactgggtgagtgactagcttcagaggcaccatattaagagggaagattaacattcggacyaaccatgtttccactaaaccaattatgtctggtgaaatcctttcttgtcctcttgtaatcagcatcagctgccgctgcatgcagcgttaggtataatagtatctccaggtttccatcagaattcactctcctcattttcacgctgcatcctctccaagacttggagcttgctaggacaatatgtggttcccaggacttgggaacccctgggtgtctagagttcttgaagattctcttggctgctggctgtgggtactttagggcwtcatttccttgacttctgagtgtctcaactaactgctgaagaaacactgtgtagctctgtttcctcccctgcccctcaatcctgcttctttccacatttcatatgggagaatggtcagttggatggaatgaaaataaacttttcttagacaagttacatgatagaaaacatcttgaatctagttaatagtcttagctccattaattgttagaattttgtcagagtagagcaggtagaattgagcagtattgaaacaaaacaaaatcttgggttattagctttggtcttgctattcacagtgtgtgaggctgragaagatccccaacttctctagtcctcatgtcctaccttagtaaaatgagaaattgtaccagatactgccccaagttccttccagctaaaaccctgttattctaagcatcagagattgaataactcagactggccagtttaaatttttttagtagctactttaacctaatagggttatgaaatatgaaagattaaatatgaaatatgaaagattttaaatatgaaagattaaaaatgttttaaatgttaatatcagcagttcaatcatagtttaatattgtttactcagtcagcacttgcttaagagtcggaaagaaggttctagaaaaaccccaaatcactgtttatttaaaaagaaacactctcatttacctgggtacagtttcatcatcattaaagtacaacagggtttgaggtattcccatcccaattttccaaaaagggcttggtagtgagggtgttggttactgggcagggagtggggagggaagactgcctcataaccatcttgacccagggcttgtctggtcactgagattaagggccctctgtgccacagctaacccgyaagggagttgatccatgactagaatgtcaagaggagtgtcaagtcattactggtttctccttgtgtaaattacacagcaggggtagcagaatagcattatggcttaggaacatggactccacatcagatagtctcagttggaattcttgctttgctacttattaactttagaacttaaggcaattcagttaacttctctgtgcctcggttctctcatctgtgtaaataggaatactatttccctttcaaggttgtgaggctaaatgagatcatattggtgaatgaggtaatacttggacatagtaaaagctcagtaatttttctctattcttgtaattgctatctgttatatctttattacaaatgaaaaatctatggttattcagtctcaagcatcacatatcttcctttcagctcattgcagaagctaagaactgaggtaaaaaaaaaagtcttaaagctgttaaaaacctaaaattaagatcttatgctccatgtgctgttggtttagatgactcaactacagaactaagatttagactaaatagctaagtcacagacaatcaacatttgtcaagggtggtttggctgtaagaatcagagaactgctctggctggtttgggtaaaagcgatttgatataaggacactccaaagtgcaagaaatacaggcagtttgtgtgtaactggctcttacagccacaggctctaatatctgagtcttcctatacatctwttccattcctcggatgctgtatattcagaccagcttcttacacatacccaatgtgacatcagcctctgaagccccagggcctcacggttcaaacttgtgtccagggccaggaaaccaaatctgaytgacccagattagtcagatgtctgactctgatttaatcacggatttaaagcatgctcatgttgttgacaattgggatctccttcccattgtgggtggacagcttttataagaagttatactcagggaggaaataattggcagctccaataggcccttagaaatcacagcctaatcctttcttttaggactctgccttgtgaagaaagccaggccacaaaggggttgtgactaaggccagtcatgtaactgcctggtggcaggctgggaatagaaccaggcccttggttcccaggccacagttcttgcccttagctgatcagccttcctgagcatacaaagacttgcctaccatacttagcacagccagaagtaccagttttgtcataaagctagtcttgaacagattatgcctttggtttttaatttaaaggaaattaaagcctatcaacgtaaccttcaggatacttttgacagagccctagggcttatttttcattatttcagaagtgaaaacaccacttctaatgaaggtctattctgtgttacagattgcaacagaggcaatagaaaatattaggacagttgtgtctttgacccaggaaagaaaatttgaatcaatgtatgttgaaaaattgtatggaccttacaggtaatgaaccatatgattcctgctaagaacctagtgctttcctaaggctgaattattgtcccaaaaagataataaaagctctgctgctccaaacaatgatatgactataagggtggccttttttcaacaattctgtcactgaaaataagtagctttttgatgtgactaggacacagaattatattttttacatcttatgcaaacaacaagaataggtctccaagacgtaaaagatatagagaattgcacagtctttggttatcagtgcaggcaacataaataacctatctgggtgacttaagacaaacattcctttaaggaattgctcaaacctttctttgcagtgtgtagactgaaccaaaagtgagacttgctattgggtatgttccagaggaaagtatttcatttgttctctgaatgaggaccagatccaacctactctgaagataaagaaacacagactatttcagtggtttatagttgagcaattcaagaaactcctaatggcaccatttgccactcatttccactgcagcctgattttataaatgagtatgttttaacacaaagttgaacacaacttagattacaattttgcagactggaacagtagttttgaacacttgcaaatttgaacagatatctttgaaagtctcaatttatgccatctcctcagttatgcacacttcatatgatactaaataacatgcagctacacctttgtgtccatttgttgtttgacataaaacatgtatgcaccattaatgatgacctgtttttaacttcaaggagggttaaggaagaatagaaaggtgaagctaattatgaacttggttataatttaaagattcaatagcttcacagaatgctcaagttttgtaacaccatgttcacagcacataagttaaaccatccaaattagtaatactttgaatttttccttttgccaaaaacaccctcatatttgagagtaactcaattatagttcttttggaggattcagaagccaataaagtatagcatgaagtcaaattagaaactgtacaaaataaattatatacaggggcggctggcaggatctagcttgggaaaggacttctggtgtatatctatgtaaacttcagggactcaacttttgtgaatctgaaacatgaattttaacctaacagagtacaattagttacaggaaacaacataatagtagtaaatcacattcagataattcaaacttaaattcagatcctgacattttaggtatttttgaaacaacaactatgcttaataggagttgaacattggagtcatcagatattaatatgtaataatatcagttatcatttgaggaaccactatgaactaggcactgtgctagacatttatatggtttttgtcaaaacaattctgcattacagtgattatttccatggtataaatgtttagagaagttatcatttacccaaactaatataactggaggtggaacttaaacccactcggccagacttagaagccgtgctctttccactacacagcgctaaaggaggctgaagagatggttacaagtatactgatttgcttttcaggaattctgtgcagaagrcacacatctatggaattacttttagtatctcacaagcatttatgtatttttcctatgccggttgttttygatttggtgcatatctcattgtgaatggacatatgcgcttcagagatgttattctgtaagtagctttagaaatattaagattattctataataaggttttagtaggtttatgcaaaagtwtagagtaggaaaaaaatgactcctgtgtccaaagatgaggtcagggatttaaatttaccacagtttccatcctggcaggcacagagatctgatcttgttaatactccaagtgcagtttcattttgcgggctacaattaagcttatgaaaatgatcagaaagcacagttttagttgtacatatgatcctggtcaggatgatgcaaattttctcattatagaatataggcagaaaaaatcataattagaaagttgctggtgaccatggactcaaaacagggttatatagcttactattatctacaaccaaaacatggcctggaaaacaagatgggaatacttgttggaagtctggcaaaggcactctctccctaaccaggcctgagatgagacagccctgccaacatttgcctctcagcctctcctttttccttggtttccaaggcaaactactggtctttctgtttgatgccttctttcataatgtgctcagcacattccattaggttgcaatctrggcttgaaagagggaagcaactctttttaagatcatttggtatgtttctgctctggtgggatgattttaaagcagtggtgaacagccatttttgaaacagggtcaagacaaaaaagcgaaagtgtgttaagagctgggttttttttttcatccaaaattaaaattaccatgaaaaaatgtatctatataatctttgtatcagsatcccagcaggaaacaaatggcacagcaaatgggttaattgatgagtttgctaaagggtctatttacaaaggcctggaaagtgttaaggkaagcagtacccaagaaggaagttaacaccccagcaatacccagctggaaactgctaccaccctaagcctaaaggcaagagaagggaaagatagccagaactcagcataggtgctttctgtggtctttgatggagggacagcaactgcacaagcaatctgacaagaaagaagccaaagaaacaaataccttggcctcactcccttccagcctccctatcctctgctgtgccttccattggccaaatcctatgaaaccagaggacaagaaaaccttttgattcagttcatgatagttggaatccccagacatggagtagggggatagaaggtagagatgggtaaaaagtgaggagtgattttgggggacaaatggaactagcagctggggattacaacttagagtacaactatttattgtataaaaaatattgagaacatttctgaaagtgaaaaccgttggaaagtcacattattcctgcttcctttcttttttaaaatcattgaaatgttaaattatggaaacctagaagacagctttaggcagtacagggaagctatgcagccacatgtgggttgttcatcactattttaaaacttagtttttggcaactcaccttttcgtcaagcatttaaaggaaagttttactatacctctcatcccagcccctaggtattaaaacccatttttaatatcttagctttagaaatttgaaggtgaaaacttaaagttctccattattagtagagaactcccactcctttctctggggtagtgctggtatcagaagtaaattgctttgtgaagttgtagatctcaggatctttagcccttcctaaaagttgtcataatcaatatccatctttaaagagcatataattagaaaatagaactttagtttaaggtgacttttttttccagagtgctgtcaatagttattttaacttttattttaggttcaggggtacatatgcatgttcgttaatacaggcaaactcatgtcatgggggtttggtgtacagaccatgtcatcacccagatactaagcataataactgatagcatagttattttaattgtaaataaaaagctatttctagtaaaagcttattttccctaataaaaattatttacagtgatgatgattatcatttgtgtggtagtacagaagaaaccacaaactggaagtcagggccrgagctttatcagaaaaagcttacttggaactgatcaaggcccttacacactttgtgcttcaattccctcaactctaaaaagagtataaccagcaactaaaattagctgagctcacagatcagattcagttataagcctcttcttgaaagtaaaaacctttgggaagtcacagtagtcctaagaaattaggggctactatgcaaagggaagtcagaaagcaagtcgagaaaaggtaaaccctcaggaagtggatcttgcccctctcctagatttctcttkttactagaattttatgaaaatgtatgtcggggagaaaggggatgattaaggagtaaagggaaaaaatactggtaagcactatacctttagactttcaaacatcatggagttaattataaaagctaatttttgaattcctctacttctgtctagggtgttttctgcaattgtatttggtgcagtggctctaggacatgccagttcatttgctccagactatgctaaagctaagctgtctgcagcccacttattcatgctgtttgaaagacaacctctgattgacagctacagtgaagaggggctgaagcctgtaagttctctgatgcctgatgatgcttgatcaatttttccctaaggtttgctgtctgctagattatagctacaggataagtttgtgatgattacaccaacatgtgtttcatttaatttgtaatatttatatagctaatatttgggcaacttgactgacatttaaaaattttataggtggtttcaaggatcctgaagtttagcacatcaaaataaaaaaaaaagggaaaaccagatatattagaactgaatagtttccacaaaaatttagtcatttctacataaaggtataattctgccatgttaatgcaattagtaatttgactttaatcactttttataatagttaagatgtaattggtaagaagggcagttcgttcacaatgagagtaataatcctgtgctttattatctataaaggtaacttaaactcacatctgagtgttctttgtatgacacaagatgctacacgttgtaatatacaagcagctgtgtaggtaaagaggctaggacttaacacagtctttccaggactttcccaggtatttcatgttctgataaaattgctgtgcccagtgagtgagataaagaaagtgaacttaagaaactgccagggtttgccatcagggctgcccactgaaactttgggtagaaactgttgctaaatttccaagcctttagagtcttttggacactggcttgattccagcttcagaataagcagttgggaaagctaaatgaatatcttaaagaaatcagaaactaagttagataacaactcatggtaatgactttttgtctaatctcacctatacccctatctctcaccttcatttcacaccataataacttgctatcaatattaactggcaccagaactataccaaatatgaattttatgtttctctactacagtctttggtaaagtttccttgaaataatatttcttattccaataattatcaggccaattataatagcaacatttaaacatttattcaggataaatttgaaggaaatataacatttaatgaagtcgtgttcaactatcccacccgagcaaacgtgccagtgcttcaggggctgagcctggaggtgaagaaaggccagacactagccctggtgggcagcagtggctgtgggaagagcacggtggtccagctcctggagcggttctacgaccccttggcggggacagtggtgagcacatttccttataacttgattgaaggctatattttaattggcccaaccaatattgtcataatggaaaatattggacaaatgtagacctagaatcctgtttgatacaatgaccacattctataaaccccaactggcaccatatctgggaaatatatggggacaataggacagaatgtctggaattcagtctagctcagaaaatactgaatataagtttaatttttaccctgtcatgggcctttccagtcagtctgattgttctaagcaaatactgacttactggcttataaaggtgaactacagactcctgcccaaattcaaagctgacttccaaaacagggtgctacctgcttattgcctccccaccgctttcagttttgctgccttctcttaccttgaattctmggctctcgaactttgactttgatcctcaacctccagccctttcatatttggcttttgtcattgattttctagcatgtagccccgtggctctcttccttgagtgaagaccaactcttactgataatgcttgtatctgccataaccttgggacagcacccatgacagagccctgggagcctgtccccattagacagtcaccaaagtgttaagccttgtttcttttattaatagttgttaagcctaaatcagccttgttaagcctaatttagttgtttctctctggaaatcttctgctttgctattatagctattctgcaggtaacataggcaaaccagctcaccaaaactctgtaaatatggtgtgctgatacgatggtgggaatttttttctttattgagatcaagactagctggacttgtgtctattcctttgcctgtaagctttaccttacacgaggctgtattttcaagtacatattacaacacttccctaggagcaccatgcctcctgcctatagcaagtaaaacaaaaacaaaaccatcactgccagcaaaaataatcctcccaaagacactgccctttgtaacttgttccttttccatgggattcttgtccttagtgctatcagagaggtgagggaaagttaaggctagtagttttcagggaaaagagaggtagaggtaggaccagagtcaaccagcttttggggccctgcttctgatcagctttttcactgctgtgcatgggggaaggggaaatcaagtcaaggtgaagggttaggattattctggggacagcagacctgagtgggacaccttgatgcaggcttctttaacgcagagtaggacacagatggctggaggagggcagacaaggacaaagagaagtgtgaaaaaagagggtcaaatgtgctaccattttgccagttagaccaagatagggatggcttaatcaccataaaaatcatcatgttggccatgctggcctcaatggtataagtcttggagggttgttgttttgaagctsctgacaccctcatgcaacgatcctccaaatggacaatctagtaactttttagtttttttttcttttttatacccttcttatagtttgtggactttggttttcagcttctcgatggtcaagaarcaaagaaactcaatgtccagtggctcagagctcaactcggaatcgtgtctcaggagcctatcctatttgactgcagcattgccgagaatattgcctatggagacaacagccgggttgtatcacaggatgaaattgtgagtgcagccaaagctgccaacatacatcctttcatcgagacgttaycccacgtaagttaaagagtagctgaaatcagaagagactactttttatcccccaaacaattaccaaagttatgccaacaaaatcttgtaacaaaatatgttgatttactaacattaacaacttggacaaggcacttcaggataccaagcttccttatttgtaaatgggaatacattatgcctacctcatacaaatgtagtgagaagctcaaaaccaccatacttcaggttacagactggtggttgagggctgcatttagactgcagtcatgtttggtttagccctatggtacttttaaaacaattatagtttttattttgagataattatggatttacatgtaattgtaaggaatacagagatcttatgtaccctttacctagtttctgccaatgacaatatcttgcaaaactagtatacagtatcacaagcaggatactgatattgatacactccactcatcttattcagacttcccttgttttacttgcattcatttgcatatggatttagttctgtgcagctgtattgcagatggggattcatagatccactaattaagaacactggccaggcacggtggctcacacctgtaatctcagcactttgggaggccaaggtgggtggattacgaggtcaggagattgagaccatcctggccaacatggtgaaaccctgtctctactaaaaacacaaaaatcaaccaggcgtcrtggtgggcacctgtagttgcagctactcaggaggctgaggcgggagaatcgcctgaacctgagaaacggaggttaaagtgatccaagatcacaccattgcactccagcctgggcgacagagtgagactccawctcaaaaaaaaaaaaaaaaagatacagaacattctcatctccataaagatccctcatattgcccttttagagccatgcatatatcccttcctcccaccctcattcctctcaaactctggcaaacatgaatctgttctccgtttgtataattttatattttaaaaatgttttataaaaatatatacagtatgtaaacttttgggattaacttttgtctttcagctaattccctgaagttgtgtgtattcataggcattgctttttattactgagtgatattccacagtgtggatgtaccacagtttaaccattcacctgttgaaggatagctgggttatttcctgtttctggctattgcaaataaagctgctgtaaatacttgtatacaggtttctgtatgaattcaagtttttatttctttgggataaacacccaggagtagaattgtggagcagtatggcaatttcatgtttagtttataagccactgctaaactgttttccagagtggccatcccattttacattcctaccagcaatgtgtaagtgatgtagtttctctgaatctttgccagcatttactgttgtcattagtttttatttttaccactctgataagagtgtagtgatacatcactgtggctttaatatgcatttcccaatggcaaatgatgttgaacatagttttttatatgcttatttaccatctatatatcctcttggtgaaatgtctccatgttgtttgcccatattctaattggatttttatcttttactgctgagttttcagaagttttttttgtttgtttgtttaacgtattgtaattactgttggatatgtagtttgtaaatgttttctcccagtctgtagcttgtttattcatcctataagaaggtctttgcagagcaaaagttttacttttgatgaggtccaatttaccaattcttccttttatggattatgctttcagtgtcaagtctaagaactcgttgcctagccctaggcccaaaatattttctccatgtttttttctaaaagttttatagctttacattttaaatttcagtccatgatccatttttagttcactttaaacatgtgtagccctggaaggatggcttgaggtccctaaaagtgatggtagggacaattcattttatggcattcttccagcattcggggttccactgggttacactgacrtagagcttaattatttttgcttttattttctgctatagttagaaatcactcacacccacaaataaaattttaaaaccctttcattttggttagccttaccaacctttaatgcacattgacctgaatcaaatattggatttgactgtgaatagaaaaatttacagcttcagctcttaatataagtgaccactggaccttaggaaattaattcacatgatatacatcactgcataagccctgcaaactgaactgactcaatttacatctctattcatatgctctttctcagcctagaatgctctctcaaaatctagctccccaaacttctctaaaaagatttctttcatttatttccccttttttctccttctaccctgtctccataacaacttctatctccttcttctgatctttcatagtgtgctgtgtatactactacagtcctgtgttacataacaacattttggtcaatgacagactgcgtataccacagtggttcccataagattataatggaactgaaaaattcctattgcctagtgacatagctgtcataatatcatagtgcaacacaaaattcaagtatttgtggtgatgctggcataacaaagcgactgcactgccagttgtataagagtatagcacatactactatgtacagtgcataatacttgataatgacaacaaatgacttattgattcatatatccgttatagcatttgttattttagagtatcctcctcctattttaaagaaagttaattataagatagcctattgtagaataccattgagaattaaagtcactagttttctagtttgattttgaaaataaacactctgttaagttgaaacaacgttatagaaactgttattgactctaaatgtttttcttgtaaatagaactgtcaactgttaagcaacagttcattcaacatatttataayttggttaacttgcagaaatatgaaacaagagtgggagataaggggactcagctctcaggaggtcaaaaacagaggattgctattgcccgagccctcatcagacaacctcaaatcctcctgttggatgaagctacatcagctctggatactgaaagtgaaaaggtgtgtgtggcctcccaacttatgtcttatttaatttatgaaatagaagggattttgctgtcaaccatgaaaaaaacacacacaagcacagggggaaaaacacagaacgttagatagtggtttttatttttatttttttgagacggggtctcgttgttgcctaggctgtagtgcagtggcgcaatccagctcactgcaacctctgcctccagggttcaagcgattctcttgcctcaacctcctgagtagctgggactacaggtgcctgccactatgcccagctaatttttgtatttttagtagagacagggtttcattatgttggccaggctggtctcgaatcctgaccttgtgatccgcctgcctcggcctcccaaagtgctgggattacaggcgtgagccaccttgcccggctgatagtggttattttgaagtaatggaatattttattctaaawtttctaaaatgattatatattttataaagtaaagcattcaaaagaaaaaagctgcacaaattacatttttagcacattaggaatgaaaaactggaaaatactcaaaagggaactagttaaacagaagattagaaaatttaaatacttatgaatttttttacagcatgggaacccatttgtgttayatttaaaaagcagaacataactatgtagattaaatgttgattatacaaaatacacatgcataaagttcaaagattctaagatactagaaattaaaagttgattagaaaggtaacattttcaaatttacttgaatgttaaaactaatttatacaatttttgggataaggtgtctgtctgatttatcaataggttgtccaagaagccctggacaaagccagagaaggccgcacctgcattgtgattgctcaccgcctgtccaccatccagaatgcagacttaatagtggtgtttcagaatgggagagtcaaggagcatggcacgcatcagcagctgctggcacagaaaggcatctatttttcaatggtcagtgtccaggctgggacacagaacttatgaacttttgctacagtatattttaaaaataaattcaaattattctaccattttatctgacttgtaaaataagtttctggtttgtcatcataaaacataggtatgtctgtctcattctagatcaatttagaagacccaatttggggtttattacggcatttgaaatttgagagttagaagtgacacctgtcttgatgaagtattgaaacaacaggctagctctccctaagttattagaaacatccagaaaaagaacaaaattcaaggtaagtacaggtgtagaaatatagaagccacagacatagggaaatggtcttatggtcctgaatgggttgggtagacaggaaagtttgggaataattttcccaagtacaaaagaaaaataaattgttcaatagcctcatctctcttggtaattttctaaatcattctattgtggaatcaaagttttttaaatgaatgaatttccagctttatcatccaacatcaagagaaaatgaaattgccctactgagctaactctgaaagcacatatcggttccataaagcaagaaagagccctatcattaagtatttttttaaagttttaaactcattaatttaaaatgtacaattatcagtataatttcaaacatcaaacatcaatgatacatgctgagtttctatagcaactgcgttctcttttataaatagactacttttcccagaaaatccgtttttcctacaatgaaaggtatgtttagatggaaagcaaaaaatatagacaacccctagaagctaaccacactgaaatgtttcaataattttccctttgttttctccacaattttctgcaacaaattagttcttagcgctctatcaggttgttaaattcagtaaatcatccaaagttcttctaactgtaataagccatattaccaaagaatttttcaaatgtgaccactgtgtgagtggatcaagtttcagattaaccaagataaaagtggggcaaaaagtacattactgcagtgacccaaagtagtgtttgacctattcctgtataatgatacccaaacttgcctgatcagaatcatggggcatctattcgtaaacaaaataattgattcagtaggtctgggttgaggcccaggaatctgttttttaaaatacactctaggtgattattcacatcaggcaagttaggaaaagtggtgaagtgtgagtgagaggaggtttctgtgcaggtgatgcagtctccaaaatacgcaactcattacacattataggttgagtattcttatctaaaatgcttgggatcagaagtgtttcatatttcagaatatttgcattatactcactggctgagcatcccaagtccagaaatcctaaatgttccaatgagcatttccttatgtcagcactcaaaatgttttggattttggagcatttctggtgttcaaatttggaatgttcaacctgtatttataaaccaaccaaatgattctaaatgtcctcgctatctagtttaaaaccctgcattagaatgaggggaaaaggttcttagttcagatctcatcttccttttctataccaactgtgaagaaatgtatcaaatgctactgaagccaactctgaatgttttcacagagaaatagtactgatgcttttcaggacagaggctggcacagtgtaaagggcttaattgttagcaataaaccagtcttatcaaattcagagcgtacatgttttttaaaagggatgtatagaatcagtaccctgagtatgatgtaatctttacatatattaaaatgtctggcagattgctatagtacccataatcatgccctctgtgcccactcttttacaaagtgactttctcttatcaagatattactttttccccactccttgaatctggacttctcttgtgacttggtttaatcaacaaaatgcagccaggtgatggcatgtgacttcagggcctaggcctcaagggaccttcacctctcagaacactctcactaccaagtaaggaagctcaattctgaatactagatgatcagagaccatgtcaggagagacagtcccagccaccaaatttacagatagttggtgaggtgatcttaaactttccagcctcagtcctggctgcctgatgattatagctgtacaaataaacacaggcaagatgagcagaagaactgtctagctgttatcaatcaactgacaaagtaatgagaaacaataaactgattcaagacactaagttttggatggttaattacacagcaatatataactgaggtcaaaaagcaccagaaaagcaaacaggaatgaatcatttattcaaacaaaacaaaaagctatataattttgagaatttcattttttgagagtaaaaactacaaaattgaacagcgaggaggaaaaaattctgacaatgtgattcaacattaatcctttaaaagtcactgtaacaaatttaaacataagtgctttatttttctattcacaaaactaattataatacaccacaatgaattttgttacggttttatgtgtgtaatagagggtatacatctccatactactagctaatttgtctgtttgttcaaaagagttatttttctctttttttcttctttgagacagggtctcacgctcttgcccaggctatagcataagggcacatcacagctcactgcagccacaacctcctgggctcaaccgatcctcctgtctcagccttcaagtagcttggactacaggcacacatgcaccaccatacccggctaagtttttgatcttgtagagacaggaccttaccctgttgcccaggctggtctcaaactcctagcttcaagcaatcctcctaccttggcctcccaaagtgctaagattataggcatgagccactgcacccagcccaaaaaagttattttagatcaccattagattgtagtggtctttcccatcaaacataacaggcttgtatccctgtggtgaacatagaaggcattgatttcagggaaattagcatacaataatgtaattcataccctttggcagctaaaaaaattaaagtgcttgaaagatggactctacattgatgtccagagagaggatttataacccatgtaagtaccaacaaaaatacttaaaaattagagtaagacttgcattgttaaagtttgtagatttggattgttgaggcttaaatactgcatagttctatattcactatgtcataatttgcattgctgctgcatcagaggagcttaaaaatatttctaccttctatggcagaataaatttagagagcatgattctactaatttctacatttaacaagttttcttaacttgttaaaggaatgttagcaagtcaacattccttcccatctcatattaccaactcactcccagcactcagtttaatgatatgttttggtaagtgcttaatagatgattcatctctaaagatgagtagagttcatcagctgtatcatatcatgaaaagcacaaaaagtcagctgaactagcttttccgcatcagtctcgggacaggatttccaggctgaacaggccacaacaaacctgtgaagcataaataatgattaatgattacacaaaaggctccaaatagtgatggtgaatacaaccaggactttatttcatctggatattcatacatgaaatgtgaagtcttgctgacattaggtaaatgtaacctgacacaattgaaggtaaagccatatctgtagataatgctaagaaacacctcattcattagatgactagcacctagggacaaaggggaacaaattagctagagccctagagtgctctgaagctaggtcttactgcgtttaaaacagaacaaaaaacctccttcctagaaaagtccttcctaaagtgctactggaatgagttggaatatgaattcatgctacagtttttaatgaaatttaaactgtttttaaagagtacttgaagaaagtttgaaaaaaaaaaaaaaggcagagaaggatgataggtgagaaaggctatttctaggagtcaaaaagagaaactcttgggatcaagtcatgccttccaccatctttctcgagatactcctaataagaaatcccagatctggcaagtgagaaaagtggccctgggaagctgaaataaataggagagaagcctgacttagagctagtcttccactttacagacagaagtttctatagcgaaatatgaattaggctcaaaattaaaatgtgcaatgtaatgcttctggaaaaccatgcaattttcacatcacttaaaaaaagagtaaattatgtcttcaacatgtgctttaagttaaacaaagagaaataaaaataagaacatgctctagcccagtatataatgatgaaaccaatgtctgagtggattatatttgcagaaaagtaatacagaaacctttaggaagtcctgccttgttttcacctcgtgattcatgatcacgaatcattctccagctacacttggcatggaattcccagatatttagcagcatctaaacatgtttctctccacagattaaccattcttattcaagtgtcaattttttaaaaaaatttcagttatctttctaaagaacagcctttcctacatgtacagacaattcatgaaagaaacacaatgccaaaaacaatgaaaacatgttttacttcataggtaaacaagtaatttatgttattttttgcctgtcaaatgagtaaatacttttttttttttttgagaaagagtctcactctgttgcccagactggagtgcagtggcatgatctcagctcactgcaacctccatctcccagtgtgaagcaattctcgtgcctcaggttcccaagtaactcagactacaggtgtgtgccaccacaccagctaatttttgtatttttagtagaaatggggtttcaccatgttggccagactggtcttgaactcctggcctcaagtgatctagtgtaatccctcccaaagtgctgggattacaggcgtgagccaccatgcctagcctacagaatttttataataactagagttggcaatggtgtgatgaaatgagaaaggatacgtttataaccttatacattatttgtaatgatggaaaaacaaaatagtagagaagcagttagataaatcataggaatcctaagactggaaattatacaaccatcaaaatatctcaaagcatacttaatagcattgtaaactgcttgaaataataagcaagaatgaaattcacaaaaaaggacacaaatatttacagtgtaaatatacagtctacatacattataggttgggagcatcatataattatagtcttatgccatgtaatggaaatgtagataactttgttcttatgtagtttttatatttaacaactttttttttttttacaatcagcatgtaatacatttaaaatgcagtggtctagtcttggggtagaagagatgaaagaagaggcaggggaggctggcacactcagtgtaactttatgtaaatacattgtaatttctatctttttgctttttcatttctctaaaaatgtttctatactgtaccaacccttgccccacttgctttagtttcaatgctcctatcatagaagggtccagtgcatgtcataaaagccatcaaaaacagtcttgaataatcagaacgcttctgtgagattatctaacatcagttctggcactgcttctactatgtcttcctcctcgtcatttggctctggttcagaagcactcatctccttcaagtcaccttctgttaattcctctggtgtggtgactattagtgcgtgatttttcaaattttttaatagagatgaggtcttactatattgctcaggatggtctcaaactcctggcctcaagcaatcttcccaccttggccttccaaactgctggaaacacaggcatgagccactgaaactggcccaacatccataccttgaaatccttcaccctccacttttttttgccatatcgacaatctctttcatgatttcctagactggctctgtcgtaaatcctgtga

SEQ ID NO: 96448 - DNA, 32319 bp, Homo sapiens
attataatattagagctaatttgtttacagaatgggcacaaactacggcctcccttctaaaccagaaaaactgttgggtacgcagtgaattacctctttcatcaacctcaggcttaccttggcatatcaaataggctaatttaagccattccaattccaatgaatggtttataagagataaatgctttcctttccttttcttttttttttttttttttttttttgagatggagtctcgctctgttgtccaggctggaatgcaatggcacaatcgtggctcactgcaagctctgcctcccgggttcacgccattctcctgtctcaggctcctgagtagctgggactacaagggcccgccaccacgcctggctaatttttttgcatttttagtagagacggggtttcaccgtgttagccaggatggtctcgatctcctgatcccgtgatcaacctgcctcagtctcccaaagtgctgggattacaggtgtgagctaccacacctagccaatatttccttttctaatatatcaaaaagacaccagccactatccttcccttcctctactgaaacaaacaaaaaaaacacctttttcaattattctgtagataactaaataacatcaccactttaggctataccatttttgatgggcttagttgattaatggctacccaaattcaggtgacaggtaaagtactcttatgccttgagagacatgacaccagccacttccaggctgaaacctacaacatggggtggttgccacccaacaatgcaatcagaccctggtcttaactaatcaaagtggacagaatggcaaaataaatctctaagattgcatgctcatccttctccttggggatggttatgggcacatgggtctcacaattggctatacctaccttacaactggactggacaatgtactaggggtcaacattaccttctacgacatattgttatacatctaaattccttcctcaccaactgaaaaatagtcaaggcccaccatagttgatgacaaaacaggcttcttggtggttttatcctatggccatattctctcttcaagcagcagctatagacattgaattacaaataaaagctctagcaaaacatactggtgcggctttcaatgacactcatcaggctatcacacttctgacaggagaaacttcccaaataagaccagtgggcttgcaaaaccatatggctttatacattctttaactgcagccaagggaggaacttgtgtcttgaacaaaactgaatattatgttcctgattactgccataatatatcccaggacatgagttctctagaaacttgtattttggctatggattcccggtcttatgaccccataacagcatagtttcatgagctttccagcacttggaaagcatttcttttcagtatgcttggtattataatattcattgttattagttattgtgcttttatttctgttgtgtttattgtatagggttgcaagataaaatagtttagcagctgtttcacctttctatttactaacctagtatattaactttctagaaacaattgggatatcatgcaagcaaggagctcccttactccctgaagaggctcactgcacactattatgagaagaccctgtcccaaccatcaacatctactgcctccaggaaggagttacaaaagaacaaccttcaccctttatctccccttaaggttaagggttctctcataagtagagggggaaatgttggggaagcaggagctcaggagagccagagtaacaccattttaaattcagctccatcttgagactagcaaggcacgttccttgccagtcatgacccagtcataagatatttacagttgaggaaacaacctaaagatacttacaatgacacactcctacaacagtagaaagtccagatgtctcaatacccataacaatatatgtttttgagatgattaacataattctttgatgtattcatgcactaaaatgtcaaggattgttttctttaaatcaacagaataataaattttgtcatgctgtctgctcaccctcacataggcacagcttagtctttacatcgataagacccctatgtaagaaaaacttaaagacagtctgcttgctttctgaggatgtcctactctataatggagaagctttcaataaactgtctcttctcactgcactctgcaactcaccttgaattccttcctgcaagagatccaagaactctaactctctcttagagtctggatcgagaccccttctccagcaacagtatcacagttttctaagttactaataatattaatatatactaaaagattattaacatacctgattcaaggtatttttttaatgattcttcaagtgaaggaacaggcagtgatggaagagaatcctggtactgaaatgttcgttcttcagttgatttagccaattgattttccatgataaaatcacaataggaaacctaaagaaaagagagagagccctcacaacttcaatctcatagatagtgttacgtatcctaggtacaattcacaattcactaaaccagtatttagggaccacagcatatctaggacttggtaccagcttttatgaaatttataaatctgtcagatagagaaaaccaacttaaaaagaatgtgtagacacaaagtgctagaagtaaagagtgatcagtgggactggtataattagttaccatttattgaacacctagcatttgccaggtactccagtttgcattacagaaaacatgtgttagctctctaacttttatgttatctctgaaaggtggcattctttgcaattttacatatgaatatatcaaaactcagaaatttagtaacttacctaatgtcaaacacaggacccaaacccagatctgttaagactacaatctttcccctatacaaaacaacatgatagaaggtaagggaacctgcagtaaatcttagtgggtagatagtatttgatgtatagaaaaggattatgtgttgatattgcattgatatagaaaactttggagcacaaagtacaaagaggtgtggaagtgtccaactgtagaattaaagattattatagaatacataaatcatatgacaagctgctttaattgcacaggtcgtatgaggtctacacagaatggtctcaagtgttccaaagcaatcttgaacatattgacacgtgtattaattgctatcaaagaaatctaactcaaaatgtgaataaggtatacaaatgctaaataaaaaatgaggtttctcaaagcctttgtaaattatcatatattaattatattaaataatgtaatatattaaatgtaattatatgttaaaatagcaactgagaaatcaaagaacgttaatattgaatttgaacttcctattctctcaaaaactattttttaaaactgatagcaacgctaaacaaagtattccactcataggttacagaatcgaacactatcaaaaacatggacacagaagagactattttcagctaatacctgttttcctctgctttaacagaatcctgagttgtagctgtgcatacagcccccagttttatctttcctaccctctcttggagctcagtgtggctttgtgatgaccttgtgtgtgtcacttccaggtcatgctcccaaaaaggaatgcatgtgttctccctgcactttccctcctttttactacctgctaggtagtgacgaactaaacagcaccatggcctcatttatggaagtcatatatgcaggattgcagaatctccctactagtcctggactcctacctctagatgtatggaaaaaaaaaaacttctattttattcataccattgtattttgggctttctattgtagggagaagagcttagcctgtaccactaatataaagagataatttgaaaatgagaaataataattaactcaaagttctttagcttctttctatctattgactttggctgcacaccattttgaccatccataaaaatgggtttgtacctaatggaaatgtagatctggatccaagtacagactctgccactttctagccatgtgcccctagggcaaccaactttaagtgaatttccttatcttagagtggttaatcatacaattcaataaagtcagaatttgttttcaatgcctgtgaaagcacattataaaaacaaaataatcctgcctgaaaccaccatattgtggtaggcacaattactatgaatggcccccaagattccacccctgctaatccccagaacctgcgaatatggtgagatcattactcctgtgattgtgatattctctacagaactgaccttaaaatagggatattatcgaattggaactaatctaatcacttgagtccataagagcaaagagctttctctggccagtggcagacaagtaagactgctttaatgcttgagaaggatttgtggtgtctttgaagatgcagatggccttaaagaactgaaagaggctcaggctgacaaacagtaaggatatagaaatgtcagtgtgaattctaccaacaatctgaaatagcctggaggtggattctcccctagagcctccagaaaagaatccaaatctacagaaaccttggtttcggttttgtgaaattctaagccaagtactcagctaagcccacccaaacttcacatttacagaagctatgagataatacatttgtgttgttttaattgttgcatttgtgtaattggttaaggcagcaatagaagactagtacacacatacagagaagataagctattctgtttacctctgtgccacttaatagactctagaaaactggaagcaagagtattagttacatacccactatagtgcttaacccaccaaccggtacacattaaaaatataaattattggattctttcttgaagagttttcttgaattctcaaccacaaagattaagttaaataagatggttccaatagcactaagaaaatgattatgctagatttaattagaattgactttctgggggcaattagatatgaattcacagaaagtggaaaagaaccacgaacaatacgtgaaggaattgtcacataccagtacaccaagaagatgaactgcttgagactgccaggagcctgctgcaacaattgttttgagatcacagggaactggactaagtcggtgactgtgggaagaaagaaacaagcttaacaaatatttaagagggaaaaagaaatgaacaagctagtgaaagaaggtggaatgcagacaaactaggagttgggagttcccaagacaaacttttcgtgaatcactgcaaacacacgcaaatagtccacctgctagagagcaggagtaaatgatcatacaattaagtaggtttcagacaagtacaccttccattagacgggttcaaagggtagaggatacgttttcagtggctgggtaacaggttcgtcgcagagtggcaaggggtagaagcaggagcagagggcaatgagagctcggaggctcttcccaccaacccaagagcaactctgcactcaagaggccatcaagtgagagaaatctaagcactacaacggagcagccccgcggcccaaccttgagggtacccctgagaccccagcaggcgagatgcttgatgacactactcccccaccaaatccaggcacctttgcggttctgcacgacttaactttcccccgcccccgagttgaaggattaggggagggagggaatgctgcttcaacggacctgtccgtcctcaccgcccgcgcctcgccgcctctgccgcagcctcagcctgcagcagcaccggctcgctcccccttgggcctcaaaggtgcgggaattggactgaaggccgctagggtcccgccccgcattcgccggggaacaggattggatagaaagccgcgagggtcccgcccctcactttccggggaacgggactggacggacagctgcaagggtcccgccccgtgcctgacgtcsggggcgagccgggcctgcgcggtaktgggacccgaccctgtctccagtgggcgtcttgggccccggctctattctgggctgcgggcctgggaagggctcgccgggtgccaaatgagctgtcctaactctgcggggctgcagcttcctgcatgatgctggggagcttggcgcctgacccaggatctagaargcactctgggcaggccgcgctccgcccacgaaggtacccaaccctctgggatagawgcaggaagcgatggttaagacccattttcacccaacttctcgcsgcaggtctggcttaccacacgctcctccccattcccagtgagccgctttttgcagcaccaggcgaacacttacaccagtgctttgtaaaggaatcttattgtccaccccgtgtcttggcaaaagaacagtgatcacacagattcctacttgggctctttcctttaatcttcggaggctgagtttgcccaactcaggtatgccgcagcacactacatcatctcgggtctccttgctcttctgcagctcttcattgctacccaagttatttgaataccccagggatgcttaccctgcaagcttgggggcctatctgatgtcttttactgttgtgccaagaaatggaatctttaaccagagtggagctacccaagttctagaagatcataatgtgattgacttagtttcacagattaattcattttgcttttaccttctgaaataaaatatactgtttcatttttaattttaaatacactgtttcatttttttgtggaaggaaagaccaaatgtttacactgactctgaactagttatcaaagataaagatttagatttcaaattaacatgtcatgacaggccccattcctttgtctgtcgtttctaactcctttagcagtaaagtttgacctgaagggaagtgaggctatgtgtaactgaatgttccctttgtgtaaatattcataagttttctacagaaatattgtgtttgattacagtacagcttgctggaagtgtttcataatatatggcagacgtactattctaagaaaagttctgaattttgaaacatatctagccaaaaagattttaaataagggattaggaatttgtagttgtaatttctgaaggtgtgataaagaactttttctttcatatataagtgcgatgctctggatgatgttaaagtttgcttacaagataaagtttttaaattgagtaactaaaaactactcagaaaccttcgttgtattttttttctcctttttagtgagtcttggcatctctttaaaagtttatgcatgtttaatgcctgttggtgcatagaatttagaaccatttcgcttcactctttttcctactcttgttgtttatttcaatggaaacaagatgtttctgtaaagattcctgaattatcggatagacaaaaaggtgtgggagtgaaaaaatgaatggaacacagatttgagtatgtagaaaaaaatcttttaaaatatgttatactgataagcatatgtaccccaaatcaccaaaaacaggtattttaaaatatgtttggcttcaaaatgtgtgatatatattttaatgaaagattccaaattatgttgcattcaggttaaacttgaacgagtttgcatttcttagagtggagcgggagatattggctggtaaggaagatgttttaggcacttgaagtatttgtgatagcaagaagttgttccaagattaaaaattgactatgagtcaaagtaactttttggaggaaaatttgtaagtagtacaagtggtgataattttttaagttgccattaaaaaaatcttttatttttgttcttctgtagttcttactcagcataccacaaattgcaaaagactttatagataagtctagataaatttcaccattaaaaagtattaaaatgctagactaagaagttcatgtttcaatctgcataactggcttcctgctaagatttgtgactctaataagtaaggagatatggtaaatagccctaatctatgggagacctgtaacctcctttcattctgatgtataaaatgaacatgttgaagaaataattttgtgatgtttcttctttttaatgggggggcagtagaaatatggtcattttgggaagcagccaacagcaaattaaagtacactggacgcaaagagggcaatgtagcattaaaaatgaactccactgccaacagcagatgaacagtgtttgatacaaaaggtctctttttagtactaatcattgatttggggttgcttttgatgatatttacagtacatgaaaagttgccaccaaaatctgaggggaagagttaagataactatgatgtttttgcatctcagaaaaaaataccttcttactaaacaaaatataacatttaaaaattttgttaacatctttgttgaaatataatttacataccataaagttcggccatttaaagtccacaaatcaatggttttactatattcacagggttatgcagtcaccataagctaattttagaacatttggttcaaatatttaaaaagattattttctacatactcaaatctctgttccactcatttttttcagtcccacaactttttctatatccaaaaatccaggcatctttacaggaacattttgtttccattgaaataaataacaagactgggaaaagagtgaagcaaagtggctctaaattctgtgttaccaacaggcattaaacatgattcatcaactgactgatgaatgtatgaaccactttttgtttgtccattcatcagttcatggacatttgggttgtttctaccttttgtctatttaaataatggtactataaacatttgtgtacaagctttgtgtgaacaggctttcaattagtattttaggagtggagttgtggggtcgtatgttaactctatgtttaacattttcaaaaacygtcaaactgatttccaaaggaactgtaccgtttttacatatctgccagcaatatgagtttcaatttctctgtgcctttagttacaataacaatataacagcccttgctattgtcttttaaaaaaaatacagccactctaatgaatgtgaagtggtgtcttgtggttttgatttacatttttttgtgaagactaagagtgttgagtattttttcatgtgcttattggccatttatatatcctctttggagaaatgtttattaagatccttttcccattttttaattaatgcacacattttaaaattatattaaaattaggcaatggtctgaccataaaaaggctgcttatggaatactgttatgttaaacttcacttacaggatgctaaatccttagaactgaggttttccccagaaaaagattaatggaaacatcagttgcttttcagacttgattctgcttcaaaagatgattttacacaaataattttaaaaaactttagtacacaacgaatcacttttagtttggtatgcatccacatttcagcatttagtagtggtcctgaacagaaagtgaaaaacacagcaatttttccaggaggtcaagtctgccaatttcagggatctgctgtgtaccccaatttctttcttaatccctgctgaggatcttgagaagcaggagcagcaccaaaaccaaggcatgcactggatccaaggttctttttgttccagttgtgagattccaaactagaccccagtggattgcaaggatgaccaaatgagagccctgcttaaaacttcttcaatttttaaaagcgaaagcaattacaagaaaatgaaacaatgcagagggatcatatgtgctttcaagtgtcttcatgtgctctttctccaggtttaaccaccaaggactctgagagctggcaggtctgagtaaccctggtaacaattctcttcaccttatcaaaacctgagctaaaaccaatgcatcagctgatgatgacagcagagagtggcagggctgaggacccraagtcatttcccaggctggcggagagtgagtaaatgagattctaaaactaaacaagggaggtcagagactctttccaaccttacctgatggcttctggccaaagcaaggaagtgtcttggaaggtgttggttggtgatggtgcgaaaagacacttgagaaggagggaagaaaaagcagcgccccttgataaaggtgggggagagaagatatggggaaagccctgaattcctcatcaaaggccaatctcagagagtagcagggggttacaatctatgctttggccaagggcgggagtggaggagtgggggttaggatgatggcttggagcgggcatcatttaagacttaaagaaaccatgggtgcaggcaaagcaccccacacactaagcagtagtcccacaggctgcgacctgaaaccttcacatctactcttaacaagcccccatggctagagggctgttgcaaggggagaaggcagagaccccagaccatgtaatcaacagcaaggtgattgtgtgatgtgtcttttcccatatttaggagggtgagttttatgaatgactttaaatattatgcacttaatggttatgtttattacttcgtacaaaatatttctgaggccaggcacagtggcttatgcctgtaatcccagcactttgggagcccaaggtgggtggatcgcttgagcccaggaattcgagaccagcctgggcaacatggcaaaaccttgtctctgcaaaaaattttttaaaaattagcctggtatggtggtgcacaccagtagcccagctatttggaaggctgatgtgggagggtcacttgagcctaggaggtcaaggctgcagcaagccatgatcatgccactgcactcccacctgggtgacagagtgaaactcagtctcaaaaataatagtaatgtttgaggaaccattcaatttaagcaggtactaaagaagaaattaagggctcttccttactgaaagtttttccctgagaaataggaacttggcaactttatgcaaaacttcaaatgacttattattaggtcaawaaaaataaaataatgttgaagcgctaagattgttaaagaagcttaaagatattgttatattagtgtttacacaataatgtgtcaacttttattcagcattatctccttgctttttgaggcaaatatattttgtataaagttttgagaatgtctgaggtgtttcctgtacctcttctgggctctcagtcttatcttggtatataaaaccattcaggctttaggggcatcgtttttttccagatagaattttccaratgagcctataatattccggaataaataacaaaccattgtttataaaatttaaaacaaccttgataagcctcaagattccctagcaggatcattgcaattcagataattggatgaggcacggtaacatacagtgctgaaggggaggtctagaaacttaattctgttgctaaaagacatgtggtcttgggctaatcatttaaaccctactagttagacctcagcattctcttggaaataaaattattgctctctgttctccagaatccctacctattttatagctctcagaaactcccagtgagcttcacaaggtatctccaagcagagttcagtgtggcattgtctcctgcagggcagaaatcccatgagaaagtggagtagtcatgacaagtgtgtgatttacagtccaccacaggaaacttgtaggattccttagaaaacaaagtgggttccaccgtctcttgggtctgttattccctcttaagaaacctttcttattattctcccttttttcctcttcttggcccttcactagcaacccaggccaactacacaacctgtttcctcaaagatcgtttccactgcctgtctttttcacaaccattatgacctcttcacagctgcagtttcaccctgaggccttgtgcaactgaagttgtctaaccaggacagttaactgtgcctgggcaacttgatacacttagcacaggctgcctaatattgttttctttttagcattttaactactttggactctgctttggattgcacaaggttcacttctttttctttttgtttaatagaagctgttgtgtgattagttaaagaggtaaaaggctatacaaataagtatttattgaacactgttccttgcccagcattatgttaaatacagatacaaatcaataagacaattctgaattttccagttttgtgtttccatggatattacaactcatagaaggttagagtccttaggtatacttcattgtattttatggtgaagcaaggatactgtgaaaaataatcataaactgtccaagtatgtaacttctatacacagtgcatttgacattctgcttgtataaatataagtactgcacttatgtatcttttcattacttacactgttctcaatgctatcccttgcattaatatttgcttttgaataaaaatccaacatatggcacatatcattttattagacatacattgtgtgtctctaagacaatgccaagccaaaatggatgcagcttgaattgttatgtgttaaaaaagcacactggataagagcttttacctctgagttataagaatataggatatttttatttctttatactctcctgcattttccaatggcctaacatgaataataataattttatataaatatatatgtatctatgtatacatataattgtatgtttgtgaatatgtatatccatatatctaatggacctcaggatatcataaatttctgcatcctgccttcaaaagtgttatgtgccattatctctataagaggtcaatcatcagaagcccagtaatattaaatgacttatcaggaattatttaagcaggaagtgatggaagagagatcagaaccaagatttatctaactactagtcttgtacttttcctgtttaaatgcaaatgacaggtggaatttgggactaccctttcctccagcattatagatgtgtgctgcttactttaggttaaaactagcattccagaacctaaagtgtgtaatccaagtttgtgtgtttgtgtgtctactgtccttagtcaatttaaacatttttatctttttttgtataccgaagaatgtcttacagagtaaaatgcttatattagactcagtaataacaccttaaagaaaactataacaaaaaaacattagcagtggttgcttctgggttattgggtaatatttgtcttctcatttacactttcgtatgttttttcttattttctataatgactacttcatagtttaccaagtcatcaaaattgatttatttataaaaaggatattgatatttctgagttcatgcttttttcttttcctttaagtaaggaaaaagttttattcaacaaagccaaatatatatatttatggtaaatatttaacattatatagtgttgcttttaaaaaaattctatcacagactcctttaataatctgttggaagttatgaaacctttccttagaaaaatacaaatatatgtaaagccacaaaatgttttgaagaatttctggaggttcacagacccctgaagctcattcatttaaacctccagtattgctgaaaggatgggctatgatttttatcagaatacttgggatgtttgtattaaatgcagatttccagcattgcccctgactgcctgaattggatgggaggagtggggcccaggaatctgcccccttaataagatagtccttccctaccctctaagcaaatggaatgcaaagcaagtgagaaaatctcaggacctacatgtctagagagctcgtattaagaatcctaagtaagaataacacaaactaaaataatagagaatgtccagtgccagtccttgaaattaggattctgagcaggagtttgttaggtagagaatgggaaaagggtgtgtccagctgaggaaagggcagagttgaacaggtggaagcatgggcacagtaggaagtatggactaataacaagttgcctgggaaccagaaataattaaataaaggcagctggaaaggttcatgcttaatcgcagtcctacaggaatggcatataatagtcatgaggccaaaaatagtgatgccagactcaggtttgtattgtcttgggaaaataatacttaaagcagtctcagtaacatgtagctctgttaagtttctcattgtgagagtggaatgggatcccatggacaagtatagaaatagtatttacctggagaaaagatagaggcactcatgagaactttggactattccagaattataaaatgttaaaaatagaagagactttatttattatctctttcaactttctcaattaaaaaagtaaaattctttggagtttatcaaatcttgtttattactatttgagttgttaattctgtaaagttgttaattctgtaacaatacagccaccaaaaagaacaagatcatgtccaagatcatgtcctttgcagggacatggatagagctggaggccattatccttagcaaactaacacaggaacagaaaacmaaatactgcatgttctcacttataagtgggagctaaatgatgagaacatatggacacatagaggggaacaacacatactgggaccttttggagaatggcggggggtggcagggggaggatcaggaataataactaatgatattaggcttaatacctgtgtgatgaaataatctctacaacaaacccacatgacacaagtttacccatgtaacatacctgaacatgtacccctgaacttaaaataaaagcataaaaaagttaytataatgcatatttccttattttatggttgaaatggcaaataatgatgtgatttccctccaggtcacacactggcagagctgagtttggaaacagttttattacttaattgcttcttttcaaaaacattttagaggcagggccttgctctgtcaccaggctagaatgcagtggcacaaacatagctcactgcagccttgaacttctggctcaagtgatcctctcacctcagcctcttgagtagctaggactataggcatgtgccaccatacctagttaatttaaaaaaaaattgtagagacgtggtctaygtcatccacactgttcttgaatccctagacttaagcaatcctcccacctcagcctcccaaggagctgagattactggcatgagccactatgtctggctagattacttcttaaattacacaatgcccaacccaraacagcaataattgtgtgtttgtacattgtactatgtatccataagcaatctttgttcagatgtatgacagtgagaatgagcgttgggaaagctataacaacaggcrgaagcctagtacctggcaccaggaaccagataaacaccatggtagtgctttggaacaccgaaatttggtagctcctgaggaaaaaaggagtaatagtatacagaaccataagtgttttcagaaaatatgaaatcaatgagttgtatcatakttgtggtaagtgaaacctagactttggaaatgacattcaggcattaggaatattagtagttctagataaatgtcacaagcccataagcaagtgaaagtttttgtcctggttaaataccctaatatagtacattttaattttcctgtttgttcacccattcaacaataattactgtkgccatcatggtactaagtgcaggaaataaattaagagaataagactgatatgctttctagtctcatggaactcacaggctagacagggagatagccattaaaaattgaaatacactaatttaaaatcaaaatgtttaacatgctcttccatctatttcaaggacacttcccaccatctccacctggcaacacttatttatccttcagatctcagcttatatattatctctttagtcttcctttaccaccaaatataaattaatattttatttcacctaacaaacatttttaaatgacttttacccaaaagaaaggcaataaccaatgctggcaaggatgtggagaaaatggaactcttgtaccttgttkgtgggaatgtcaattagtacagccacaatggagaatagtatggaggttcctcaaattaaaaacagaaataccatatgatccagcaatcycactgctaggtatatactcaaaagaaaggaaatcagtatatcaaagagatgtctgcatccaatgtttattgcagcactattcacaatagctaagatttggaagcaacttaaattgcttcctaagtgcccatcaacagatgaatggattgaaaaatgtggtacacaatgaagtactatttagccataaaaaagaataggatcccatcatctgcaacaacacggatggaattggaattggaggtcattatgttaagggaaataagcctggcacagaaagacaaacttcccatattttcacttattcatgggagctgaaaattataacagttgaacttatggagatagaaagtagaaggatggttatcagaggcaggtaagggtagtaggggtgagggagtagtggggatggttaatgggtacaaacacagataggatgaataatatctagtatttgataacacaacaaggttactacagtcaacaaataatatatcrtacattaaaaaataagagtataattggaatgtttgtaacacaaaaaaatgataaatgcttgaggtgatggataccccagttaccccgatgtaatttttaggcgttgaatgcctgtatcaaaatttctcatgtatgctataaattatatgcacctacccacaaaaattaaaaataaaaaaatacgtacacagtgggaaaatatatattttctaatgatatataaaataagacaggggtctccaaccccaaagccatggaccagtatctgtccatggcccattaggaccttggccacactgcaggaggtaagcagtggagcaagtattactgcctgagctctgcctcgtggcagaacagtggttgttttagattcttacaggagtgcaaaccctattgtgaactgtgcatgcaaggggtctaggttgtgcactccttatgagagagaatctaatgcctgatgatctgaggtggagcagtttcatcctgaaaccatcctccccagccccgacccatggaaaaattgtcttccacgaaaccagttcttggttcccacaaggttgaggaccactgaaataaggctctaatatctagaatatatgaaaagaaactcttacaaatcaacagcaaaaatacaaataacctgattataaaaattggcaaaggacttgaaaagacatttctctaaagaagatagacaaatgtccaacaagcagatgacagatgagcaatgtcatttgtcactaagggactgcaaatccaaaccacaatgagatactgcttcatacctaggatgggtattagaaaaagtaaagtaagtgttagagaggatggtctagttatagatgtgaagaaattggaatccttatatattgctggtgggaagtaaaatggtgcagcttctatggaaaaaatgggcaattcctcaaaatgttaatgtagaatgtatggcccagcaattccaytcctaggtctgtacactcaaggaattcaacaggcactcatacaaatacttgtacagaaatatccactgcagtactagtcacaataggcaacaggtagaaacaacccaaatgaccataaacagatagataaacaaattttggtatatccatacaatggaacattattgagtcacaaaagggagcaaagtattgatacatgctacaacacgcatttaccttgtaaataatacaataagtaaaagaagccaaactcaaaaagtcacattgtaagattccatttctatgaaacatctaaagtaagtaaatccataggaacagaaaactgagaggagggtggaatggtgagtgactgctaatgagtatgccgtttctttctggattaattaaaatattccagaattagatattagtgactattggccaaatttgtgaatatatttttaaaaytactgaatgtataaccaagagggtaaatgctatgatgtgtaaattatatcttaatttcatartgaaaaaatattaaatataggcatctgcaaaatttttgtttctgtttctcacaacattcttattttttagttttaaaaatacaagataaaataatttcaaatttaaacgggctaatttccaaacccatatttataaacaatctgaatttatagaaggatgcaatttcaacagtaaatttaattttatggaaaagagaaaacttttaggagaataaaaggatgttcaaaaaatagaaaaaaagcagcctacatatcttaaagaaaaaagataagccacattttacagattttgaatctgtaaaatacaggttttgaatattcttgattcgagagttaactaattaataaaaatttttttgttaattttttttgagacagtcttgttctattgcccaggctcaagtgcagtggcaccacatacctcactgtagcctcaaactccgtggccccacctgggaccatacatatgcaaaaccacacacagctaattttataaattcatttttttttaaacttgcttgcaggacaaaataaaaattttaaaaatatattttttgtagaaaccaggtttccctatgttgcccaggcttgtctcaaactcctgggcccaagtgatcctcctgcctcagcttcccagtgctgggattacaggtgtgagccacagkgcctggccttaacagaaatttctaaaacatcaaaagatgcttctaaaaccagtcattcatgagcagttttgctgaacctttagaatccatgttggaacaaattttcatttcaaaaggaagtttaaatatagaagcagccaagtcattttaccaaatattcgtctgaaagagtatagaaatcctatttctagggaagcagaatactgaacttaaataaacatttgtgttccaaagggcagtcataacttaatgattctccttaaatgattaacaagaacatttaatttaaagtcaacctgtttacaacagagccttgaaatacatggttttttttaacagaacagggaaaaaatgttcacataaatactaacctgagctgctattactgtctggcgatagaacagaattcaaatgagttaccattggtagcctagtgaattatgtgagagaaaaagtcctcccacatctcctgaagaaggggagcttcaacaaacttcactaatttgaatgagaaagactagagagatttgtatcatttatctccgtatataacattaatagaaaaacactagcaacatatagtcagttacttgaaatagcctatttctgtaaccatccaacaggttctttctgcccaccgcacaaacaaaatcaactcacagagaccatggcattacagtaaagaaggactttgatgctggcgatgccacgtcrgagacagagttattactcaaatcaatctcattcaaggcttttaggtgagggcttttcaaaggtagtttggtgagcagggggctagggtatagggagtgctgattagttgggttggagatgaaatcatagggagcagaagctgtccttttgctctgtgtcccttctgagtggggccacaggagtagttggctgatccaggtggagccacttgtcgatagacttgccaaaaatcctggaaaaaaaatctcaaaaggccaaacttaggttctacaatagtgatgttctctgcaggaataattggggaagttgcatattttgtgacctccagaataatggctggtttatgtctacaccttagcagaattcaggcacctctgtcctcctagtctggtgttctctcattagctttaaggcagttgcattttggagaagggctattatcatttaaactataaactgaatgtctctcaaagttatcttgacctaagcccagtaataattaagggcagctaaaagtaagttgggggttggttaaatcagatctctttcactgccataattttctmactgctataatttttgcaaaagtggttcattttgactttcatctaattattgagccttatatcataaatatattaaacattagtgatttctgacagcatgatgatcatcaacatcttggtcctcaaatatcagtgagactaaataatgcttcaatcctgttggtgtcactgagattgaagaaaggaagaaaccagtcagacaggcagttagggggggtccttggttgaattctttcacacaaaagaacagcctgcaggctcagataagggaacttacacagggggggcttgcctaagacgtgcccacagctgcacagataagaaaggctaaacagrtgacttgcccagacaagcccacaatggaaaattccatcccctaacacaggcacagtaaggggaacaaagcaatatggagtaactcaagctaagggcccgcatgtgcactaggaggacagggtggagctaccagaaattcatgccttatgcagatgagatgtccagctatcatcagtttcttataaaagcctttgcattcaactgtaaaaacagcaaccctcttccaggccccctcttggtggtggagagctttcttcttttgcttattaaacttttgctccaacctcaccctttgtgtccaygctcgttaattctcttgatcctgagacaaagagttctgggtgatacctcacagtgagagacttctacattgtggtgcattggcaagactaacattttggtgcattggctgggaaaggaaagatcagaagaatgagtaggagtggacctccaactctactttcatttctgaggcttttcaccctcattttaaaaagttaaacaaaacactgggcccctgtcagccagttaaaagcttttagagtggctgccagccttacaagactcaggggacaggcttgctttagaggactttgtcaatccccrattgccctcatgtggtgggaatgttggctctgttccaatccagtttcctttcacagaggacctagccatctatgggactggaagtgagagacaggactagctggatttcctaggcygactaagaattcctaagtgtagctggggaaggtgaccacacccacctttaaacgtgggtcttgtaactcagctcacacccaaccaatcaggtagtaaagagagctcactaaaataccaattaggctaaaagcaggaggtaaagaaataatcaaatcatctaccacctgagagcataggggaaaggacaatgatcaggatataaacccagacattcaagctggattgggcaaccccctttacatcccctcccgttgtatcagagctctctctgttttcactctattaaatcttgcaactgcacattcttctcgtccgtgtttgttccagctcaagctaagctattgctcaccgtcacaggctagccgctgacttccacccctctggatccagcagggtgtctgctgcacttctgatccagtgagacgcccattgccactcccaactgggctagaggctcgccattgttcctgcacggctaagtgcccaggtttgtcctaacactagtcgctgggttccatagttctcttccgtgatccatggcttctaatagagctataacactcaccacatggcccaaggttccattctttggaatctatgaggccaagaaccccaggacagagaacaaaaggcttgccaccatcttgggagtgcccccctccatcttgggagcgcccccctccatcttgggagctgcccaccaccatcttgggagctctaagaacaaagaccccccaagtaacagaaggagaccctggggcaactgaagacatctggttggggctacacctcggtgttacctgaagacccctggattaactctggcccccaacagcccatcagggtatcggcatcaggacttccagacttttctatcgcatttccttcctttcttttcatggctatcayatctgctatcccttcttcgcatgctgtgttaagggactttttaaagcctggggagataatcttgttgggtaaagttagcaagtgccttagtaaccaggaatgtaactcaaaaaaattgctgcttctgtgatttccttgagatgggggaatttcaatatttcagtctagactttcacctattaaaggctttcttttcccctaataataagcattcatggcactgtgtgggaggatattttaccctgagtgaataccctcctctccatttgggttgttttttctcagtgtaagagctcagaaccgtccagtgagtttaagcagttcctttataagacaagttaagtttttcttgctaggaggcatattatggggacagcctattaagccccaaacctctctttctaacctctgcttggaaagtcagtttttccctaacatttcaaaccctacggcaccacctagtgggatgggatttttctctgtggggagccttgtcagccctttgccccgaaactctagttccctgattcctttccctcttacatccctctcccagtaatcagtccctatggcctatttgtaatcagaataactcccctttcagcagccaggagaaagctactctagcaagacagattttagcctcagtgctaaaatcatcagagggaggatggccagtcaattcttatgttattttgaggcatctattctgcatccagctatattggcatctaagtgagaaagggatcttatgtttagaagtcaattggtcccattctttaggaatttataactttgcctgggtggtagtaagaggatgtaagggatagatttaagacactcccccctttaaagggccttgcccaaattcaactaccatacagtctcttctgagcccctggggtacccccggagccttatgggccaactggatctaggaaattagcagggcagagagctagggtatcacacaggtaaacatggctactcctgctgactagctcctccagatccatgggtgaaggtcatgcttgcatccatgcrtggcacctatgatggttgccaggacccagaggagacaggagggaagaggagaatggggatgtcctttttgtctttctcgccactctgggtcactccgaaaggaggaaggagacttcttctcccctctttcctagataggtaacaacccatcttcaagcctgcactccccttgagtgcagcctggatcttctttaaaccttagaccctacagttcactctgggaaagccccaacatcactcacatatagaggccttccaggatttatcccaagtatttaaagtctcctggaaggatgtgatgtactcttaaatcaaaccctaactgctgctgagaaacaggcagccctacaggtagcagagaaattcagagacaaacagcttgtctcctatagccagtcaaaaaggaaagccagtcaaaaagggaaaggttgagaaagagacagaatccccattcctagtaggaagagaggcagtgtctcttaaacaacctaattgagaccccagtgataccttagatgagtgcaaattaaaacattttcaaatgtgcatattagagggcttagggaggaccagagccaagcctcttaattactccaaactttccatgatagatcaataactagatgaaaatcccttagcctttttggaaaggctgagagagtctttagtgaaacacacctccctgtctcctgattcaattgagggaaaaggtagagagaggggtatcttagaatggaatgcaggcttgggactccataagcttgcagttcaatctagcctggtaaactggtcagttacaagctttgctgcaggactccatcttgttttacattttgacctataaccacatggcagtactttgttttagactctgccattttacaatggcagcccaggttcaatcctggcttggggaatgaatacttgcaagttaatagctgtgtgacttttgccatttgctcattctcttcccctccatgaacaacttctagctcctttcttaaatcttccttctctgagtttcctttaaaggttctagattttgtaaaagtgtaaccacacaatgggttcaccctgcccgctgcctagacagagctgatttatcaggatggggaaattgcagtggagagggggtgattcatgtgggactggctgtgcaggagatggagttctgttattgcttgggtctctctccctgagaatttgtggagcagagtttttgaggatggctggttgatagagggaggccagtgagctgggagtgctgataggtcaaatcagagataaaatcacagggagttgaggctaccttcttgtgctgagtcagttcctggtttggggtcacaagatcagatgagccagtttatcattctgagtggtgccagctgatccatcaagtgcagggtctgcagaatatctgaaatgctgatcttaggagcagtttagggagggtcagaatctgtggcctctagctacatgactcctaacccatagtttctaatcttgtggctggtttcttggttctacaaaagcattctggtcccccaggcaagaaggaggtttgttttgggaaagggctattattgtttttgttttggactataaactataagttcctcccagagttggttcagcctatgcccaggaatgaacaaggacagctgggaggctagacgcamgatggagttggttaggtcagatttcttttactrtctcagttacaattttgcaatggtggtttcaaaagctgcttaccacccctttgaaagtaccttgtacactcatggttaaatcataaccttaattgaggcttcttgatttcacctgttaggttacttttggtaaagttcaaaaaccagaaatgttaattatttgatgtggctaaaattaggtaacatgagatttaaaaggattttcttaaagagtgcttagcttaattaaaactggatatccaatctacaagtatatgtacaaggcctttatgtttttctcttcttggatcttgtttttctggaacaggtttttttctcagtcaactgaattctttttctccactttgttttgccactcttaatgcatgcatgagaggccctaagataatttctgatggcctgggactccttgggaaaaaaatgaaaaggcaccacaggttccattttgggagaaacctccattttcctcatgaaaccgcaggaattagaggcaggtagatccctctcaaaatctgtttttgtcctccagcatacctgtttattagaccctagaaactgcatgctttcctagccctgctcttaaacagcaccacccagaggccaataattcaattaggagattgatgaacaaaaatatctgataaatactggatctgcttctgtttgcttgtgtagttatatatgtattgtgtgtgatgcctataaaaagagctctaattgattggcttaaagaaaaataagtgcttaaatcaaattttttaaaggaaatataaaagctgtaatgccttttagttcacataactttaatctttaagaaataaaaatagttttaaaaataattggtaaaatgcagatgtcaaaatgtaaataggtggcctaaatcatgtaagtcagatactaggtttgctaaatgtttcaaggttgtaaactgcctgctttacaagttggtaaggcctgggtacatacaagattaaccccacccctaactatgctggaaaaagtcagaccttatctgggcctagtacataattaaaacaatgtaccagttttacattaaagttaaaaattgccaagagttaccattataacatgtaaatgagactacgaaaaatagatttacatgaaaggtgtgtaagaacagtaaaatgtgtttgtggtaaaagattgtaaaaagatatagaaatgtaaatcttgcctagggataaaggattgttttaaaaccaatgtaagagtaaaatttggctttctctcccttgcacaagattttcatgtaatagtgaaggataatgaaaattttttatttgccttgcagataaactgccagggagaagaatgagaagacaggagacaaactgtttggaaagctaaatcttccctcttaatgaataaaggtttttgccttgtcttaaagtttctgagtcctaattttggcaaaataaataacttatggtaatctggaattgtattttgtaatattaagtgttttgaacctctaacatttacttcccaaaatcaaacttcagtttcaaaattgtctctcttgacccctagcttttggatgctacagaaggcccctgaagcatccagaagagaggtaaacaggattatttaacatgtttaggtacatgggattggccaaatggtgtttaatgatcttcaggttatattttagtgaataatattaatatattttccaaaattgtatgggatttctaaaattctaatgtctgagtatatgctagaaatcataattaaggttattatgttaagttattgtaaaacacagaaataataaaatttgtcagtcatgttcttgactaactaccttggacatttcaccattcaaaatcgtcttgttttaatcctctttaaaggatggtttataatcagctataggactttgacacatgctctcaaatgcaagtttctgataactttggagattatgacattggaataaaggaaaaatgtacaggactcatgaagagctaaaatattcatgaatatcaagcaaaacaagagttaacaaaatggactttttaacctttttgcttaaaatgttgctgatccttattttgtttttcagagtcaaggaaacttattttaagctatttatagcctctaataattatgtaaggtatacttctgtaaataaaattcagagcatatttatttgtttctctctggttcctctagaacttggaaagtatttgtgagtattcttaactcatggcaatataattatttgcatcagcacaatgagaatcattttcttttacaagaggacacaattggagaaactggttgttttctcaaggttttgactaaaggctgtgcttccctttaaggaatcgagcttgacttgcagagccaatgaaagccccttgggaaaactgcctcatactttgtctacacagcccccgaacagggttcctaacctgtggtgagtaaagaatatcactttctacaggcccaggaacaccatgttcttaggacctcaaggagagaggaattcacccaactcataggtatttgagggtacaaacccatggctgggctcagctttaaaaagttctgagattcctgtggaacagtttcatcaaagataatataaaaacctatgtaaaaataattattcttgctgtgctttgtacaaataatcaggccaagtataaaactaaagttgattttgcaaacaactcagtcctatcatgatttgtttttttaacaaaaatgagtagagacagaaaaattatgtttcaaaacatatcatatgcttgtcattaattctaatctcattgattgtttttaagtttttgcctacattttaaactaatcctgcttattcctataagccaaccagcaatctctggctgcagctcagaaagtgcaaaaagggatgggtgatgtacaaatctgaatattctagttcttggcaattatcctacaaatcctgtcaggtgatgggagtaaatagggtacccataacccagaggtttctttgggaaaataaaaccaaggaagttaaccaaagccaagccccttgcactcaaatcttagtgggcataactgtggccaccagttatctgtacatgtcagcagccttgggatttttaagctgtgcttatcccctgcttgtttcctctaataacccaaattgtttcttcttgcctaaagactatcaaactccaaatggtaatgcaaatgaaacaatacatggatatgcctttcttccaggaatccttagaccagccccaggagaaaccctagctgctgttccccatgcagtgcccctttccagtaggaagtagctagaagaatcatcaccccattccccctaagaccagttagggtctccacccttgaggagggaaataagacaggagaaaggaagaaagaggtcagggaggcagttaaagtgggtcattggttgaattctttcaaacaaaagaacagcctgaaggcacatataagggaacttgcacagggcggcttgcctaagacatggccacagccacacagataagaaaggcttcacaggtgacttgtccagacatgctcagcaaagttctgcccccctcacacatactttggggaacaaagcaatttggagtacctcaagctaagggcccacatgtacactaggaggacagggtggagctagcagaaattcatgctttatgcagatgaaatgcccagctatcctcttttataaaagcttttgcattcaactgtaaaaatggcaactctcttccaggccccttctcagtggtggagagctttcttctttgcttattaaactttattaaacttttgctccaacctcaccctttgtgtccatgcttcttaattttcttagtcctgagacaaagagctctgggtgatacctcaaaatgagagattgctacattgtggtgcactggcaagactgtaacatcccttaaaggcaaaaagaaaaaaaaataaagaaaagaatgcaatttttcaagagaagcagtaagaaagaaggatatggaagagatgaaaatgagtggatggaatgccagcagcacttttcttaaatgccactgaagggaaaatgcacagagaacccccacctagcaacttttaagtatccccattaaaccactttatgaaaaaacacctcaaaaaacatacttcagaatattaacaatgatgattactgagtggtaaaaccatgtgtgatttctttctttctacattttcatattctccatgttttcaataataagacattttataagttaaagctatcaacagattgggtaatttttttctttttttttattttgagacagagtctcactctgccgcccaggctggagtgcagtggtgcaatctcggatcactgcaagctccacctccttggttcacgccattatcctgcctcagactcccgagtagctgggactgcaggtgcctgccaccatgcccagctaattttttgtatttttcagtagagagagggtttcactgtgttagccaggatggtcttgatctcctgacctcgtgatctacccatctcgtctttttttaaattatacattaagttctggggtacatgtgcaggacgtgcaggtttgttacatagatatacacatgccatggtggtttgctgtacccatcaacccatcatctacattaggtatttctcctaatgctatccctgccctagccccccatcccccaacaggccccagtgtgtgatgttcccctccctgtatccatgtgttctcattgttcaacaaccacttatgagtgagaacatgaggtgtttggttttctgttcctgtgttagtttgctgagaatgatggtttccaacttcatccatgtccctgcaaaggacatgaactcatctgtttttatggctgcatagtattccatggtatatatgtgccacattttctttatccggtctatcattgatgggcatttgggttggttccaagtctttgctgttataaacagtgctgcaataaacatacatgtgcatatgtctttagagtagaatgatttataatcctttgcgtataaacccagtaatgggattgctgggtcaaatggtatttctggttctacatccttgaggaattgccacactgtcttccacaatggattaactaatttacactcccaccaacagtgtaaatgcattcctatttctctatatcctctccagcatctgttgtttcctgactttttaatgattgccattctaactggagtgagatgatatctcattgtggttttgatttacatttctctaatgaccagtgatgatgagcttctttttatatgtttgttggctgcataaaagtcttattttgagaagcgtctgttcatatccttcacccattttttgatggtttttttttcttgtaaatttgtttaagttctttgtagattctggatattagccctttgtcagataaatagattgcaaacattttcttccattctgtaggttgcctattcactctggtgatagcttcttttgctgtgcagaagctctttagtttaattagatctcttttgtaaattttagcttttgttgccattgcttttagtgttttagtcatgaagtctttgtccctgcctatgtcctgaatggtattgcctaggttttctcctagggttttttatggttttaggtcttatatttaattctttaatccatcttgagttaatttgtatgtaaggtgtaaggaaaaggtccagtttcaattttctgaatatgactagccagttttcccagcacaatttattaaatagggaatcctttccccattgcttgtttttgtcaagtttgtcaaagatcagatggttgaagatgtgtggtgttatttctgaggcctctgttctgttctattgatatatatatttgttttggtaccagtaccatgctgtgttggttactgtagccttgtagtatagtttgcagtcaggtagcatgatgcctccagctttgttctttttgcttaggattgtcttggctctgtgggccctttttcagttccatatgaaatttaaagtagttttttgtaattctgtgaagaaagtcaaggtagcttgatggggatatagcactgaatctataaattgctttgggcagtatggccattttcacaatattgattcttcctatccatgagcatggaatgtttttctatttgtttgtgtcctcttttatttccttgaacactggtttgtagttctgcttgaataggtccttcacatcccttgaaagttgtattcctagctattttattttctttgtagcaattgtgaatgggagttcactcatgatttggctctctgttggtctattatttgtgtataggaatgcttgtgatttttgcactttgattttgtatcctgagactttgctgaagttgtttatcagcttaaggagatttttgactgagacgatggggttttgtaaatatacaatcatgtcatctgcaaacagagaaaatttgacttcctcttttcctatttgaataccctttatttctttctcttgcctgattgccctggccagaactttcaatactatattgaatatcagttgtgagagagggcatccttatcttgtggcggttttcaaagggaatgcttccagcttttgcccattcagtatgatgttggctgtgggtttgtcataaatagctcttctattttgagatacgttccctcaatacctagtttattgagagtttttagtgtgaaggggtgttgaattttattgaaggccttttctgcatctattgagataatcatgtggtttttgtcattggttctgtttatgtgatggattacgtttattgatttgtgtatgttgaaccagcctttcatcccagggatgaagccgacttgatcatggtggataagatattgatgtgctgctggatttagtgtgccagtattttattgaggattttcgcatcaatatttatcagggacattggcttgaagttttctttttttgttgtgtctctgccaggttttggtatcaggatgatgctggcctcataaaatgcattagggaggagtccctttttttctattgtttgaaatagtttcagaaggaacagtaccggctcctctttgtacctctggtagaattcagctgtgaatacatctggtcctgctagctgcaggagtttttttcataccccagtggcacctagaacaccagcaagacagaaccattcactcccctggaaagggggctgaagccagggagtcaagtggtctagctaagcagatcccacccccatggagcccagcaagctaagacccactggcttgaaattctcaccgcgagcacagcagtctggggtcgacctgggacgttggagctttgtggcaggagaagcgtccaccattactgaagcttgagtaggcggttttctcctcacagtgtaaacaaagccgccaggaaatgtgaactgggtggagcccatcacagcttggcaaagccgctgtggccagactgcctctctagattc

SEQ ID NO: 96449 - DNA, 26045 bp, Homo sapiens
catagtgacttctggctgcatctttggtttggctaccagtgtgttttcagacattggaattgaatgtatttaggtatgacatcctatgatccagtttgccacaatcctccccgctcctactgcctatgctagtgccatctctgattcatataaactgcctgatccctgaaggcatttgaatttgagtcccgatttatataataaaaccctacaatatacaattcactgtgttccgccgagatcctaaaaatgtccactatttatttatttatttatttattggagacagggtctcactctgtcacccaggctggagtgcagtggcactatcacagctcagctcactgcagtcttgatctcccaggcttgggtgatcctcccacctcagcctcccaaatagctgagactacaggcacgtgccaccatgcctggctaattttttttttgtattttttgtagagatggggtcttgctatgctgccctggctggtcttgaactcttggactcaagcaatccatcccctttggcctcccacagtgctgagattacaagcatgaggcactgcgcccagccccgcattttaattccttgataagtggacttagaactattatttaatcagttcaaagccgaaaattaacattgaatttctagataaaatcaaaattgttcttggccttcttctgcagttgggttgcttgggaagtcaaaaagggttgtatcaaaaaaaaaaaaaaaaaaaaaagccaggagtggtggttgacggctgtaatcccagtgctttgggactgcttgagcccaggaattggagaccagcctgggtaacatagggagacctccatctctacaaatagttaaaaacaaaaacaaaaacaaaaacaaaaaaactagctgggtgtgggtgcatgtgcctgtggtctcagctactgcagagcctgagatgggaggattgcttgagctcaggaatgtgaggctgcagtgagccgtgttcatgccactgcactccagcttgggtgacagagccagaccctgtctcaaaggaaacaaacaaaaatagaaaacaaaaggggctgcatccattggtttaagaggaaacctctgtagatattatcagcagaggccaggcgcagtagctcacacctgtaatcccagcattctggggaggctgaggtgggcagatcacctgaggtcaagagttcgagaccagcctggccaacatggcaaaaccctgtctctactaaaaaatacaaaaacaaaattagctgggcatggtggcatgcacctgtaatcccagctacttgggaggctgaggcaggtgaatcacttgaacccgggaggcggaggttgcagtgagctgagatcgcaccattgcactccagcctgggagtcagagcgagactccatctcaagttaaaaaaaaaaaaaagcctgggcgcagtggctcttacctataatcccagcactttggaaggccaaggtgggtggatcacgacgtcaggagatcaagaccacaagaccatcctggctaacacggtgaaaccccgtctctactaaaaatacaaaaaattagctgggcatggtggcgggcgcctgtagtcccagctactcgggaggctgaggcaggagaatggtgtgaacccaggaggcagagcttgcagtgagcagagatcgcgccactgcactccagcctgggcgacagagcaagactcttgtctcaaaaaaaaaaaaaaaaaaaagatattatcagttgaaagagacatccgggaaacaggcgtatcaatgtgttgttaaggatagaggaagaggctctaggctgtctccctccagtgacggcactggagtcacattacagaactgacctgccagggaaagcaggatgtctgccagtctggaagatggggaagtaggggatcaccagtagaactcttcagttcaataatacagttaacccttgaacaacgcaggtttgaaatgcatgggtccgcttatatatggatttttttcacctggctgggcaccgtggctcacatctgtaatcctggcactttgggaggcggaggcaggcggatcagttgaggccaggagttcgagaccagtctggccaacatggtgaaaccctgtctctactaaaaattcaaaaattagccgggcatagtggccggcgcctgtaatcccagccacttgggaggctgaggcaggagagtctcttgagcctgggagacagaggttgcagtgagccgaggttgagccactgtactccagccagggcgaaagagcgagactccatctcaataaaaataaataaataaataaaagttacaccaagtacgccgcctctcatgcctctctctttccacctccaccacttcttccacttctgccaccccccaagacagcaagaccaacccttcctcctcccctcctcttcagcctactcaacataaagatgacaaggatgaagagctttaccatgagtcacttccactacatgaagagtaaatatattttctcatccttattattttcttaataacaatttcttttctctggtttattgtaaggatacagcatgtaatatatataacatacaaaatatgctaatcaactgtcattggccaggcacagtggctgatgcctgtaatcccagcactttggaaggccagagtgggtggatcacttgaggccaggagttcgagaccaccctggccaacatgttgaaaccccatctgtactaaaactacaaaaattagcctggcatggtggcgggtgcctgtggtcccagctacttgggaggttgaggcaggagaatcacttgaacccaggaggcagaggttacagtgaaccgagatcacatcactgcactacagcctgggcaacagagcgagattccatctcaaaacaaaaacgaaaaacaaacaaacaaaatgctaatcaactgtcattggtaaggcttctggtcaacagtatgctgtcaatagttaagtttttgggctgggcgcagtggctcacgcctgtaatcccagcactttgggaggccaaagcgggtagatcacctgaggtcaggagtcgagactagcctggccaacatggcgaaacccagtctctactaaaaatataaaaattagccaggcgtggtggtgggcacttgtaatcccagctactcaggaagctgaggcagaactgcttgaactgggaagtggaggttgcagtgagccgagatcgtgccattgcattccagcctgggcgacaagagcaaaactccatctcaaaaaaaaaaaaaaaaaaaaaagttgtttttggggagtcaaaaatgaggccaggcgcagtggctcatgcctgtaatcacagcactttgggaggccgaggcgggtggatcacctgaggtcaggagttcgtgaccagcttggccaacctggtgaaaccccgtctctactaaaaatacaaaaattagccgggcatggtggcgggcgcccgtaatctcagctacttgggcggctgaggcaggagaattgcttcaacccgggaggcagaggttgcaatgagctgagatcgcgccactgcactccagccttggcgacagagggagactccatgtcaaattaaaaaaaagaccccaggattttggactgtgcaggggtcggtgccccaaacccccacgttgttcaaggtcaactgtacactgtcatagtcgggaaaacttcatcactgcagctgctcctgtttcttgaaacctgaagcgggaaactggatcctgggacactactgccccctatcgcctgttggtcttcaaagaaataatcccttcaattttgcaaggcctgtggtgtcattcccttttaacagataaggaaaccgaggccaggacgtggtggaaaataatcaaggtcacacatctatgtgcaaaagtggagtaacaacccaggctcctcattcccaggtcagtccagtgacctcaattgacatgaaatgtgtgaggtccttctgtggccctgtggcagggcctgaagaggacagcgtatgtaaatcaagtcttgtgccttcatgagtgaggcagagtagaaaataacagtaattcactaggaccgaatctgcattgtaaacagagaggaaggggctagtatttggcagaaggatgtcaaggaacattttagagataagaggtgacatttgggttctgagggatgagtaggagtgtgccagggtgcaaaggatgaaaagacagctctagcagctggtaagggctaaggggcatggagaaacagcaagactttggggaactggtagaattctaattctggaaaatttgaacaaggtaattttttgtgtgtggttaaggtattacatacatacagtaaaataaaatgcaatagttgctgggtgtggaggctcacgcctgttaatcccagtactttggaaggcagaggcgggtggatcatctgaaggtcaggagttcgagaccagcctgaccaacatggtgaaaacccgtctctactaaaaatacaaaaattacctgggtgtggtggcaggcgcccgtaatcccagctacttgggaggctaagggagaagaatagcttgaaacccggaggtggaggttgcagtgagctgagattgcactattgcgctccagcctgggtgacaagagtgaaaagctgtctcaaaataaaataaaaatgtaatagtctaattgatttttttaaaaaatgtagacatccacgtatctaccacctaggtaaagatactagagattccagcaacctgggaggatccctcgtgcccctttcaggtctatatgagcctccaccgttccccagtcccctggaaggagagggggtgggagaggcaacatgaaacctaaaaaccagtgggcttcgcgcctgtaatcccagctattgggttggctgaggcaggaggatcacttgcccaggagttggaggctgcagtgagctatgatcgcgccaccgcactccagcctgggcgacagatcaagaccccatctctaagcaaacaaacaaataaacacccctcaaaacccatggcttcaggcctggcgcggtagcttacttctgtaatctcagcactttgggaggccgaggagggcggatcacttgaggtcaggagttccagaccagactggccaacatggcgaaaccccgtctctactaaaaaataaaaaaaaaaaaaaattggccgggcgcggtggctcacacctgtaattccagcagcactttgggacgccgaggagggcggatcacgcggtcaagaattcaagaccagcctgaccaacatagtgaaaccccgtctctactaaaaatacaaaaaattatccgggcgtggtggcgggcgcctgtaatcccagctactcaggaggctgaggcaggagaatcgcttgagcccaggaggcggaggttgcagtgagccgagatcgcgccactgcactcctgggcgacagaaagagactccgtctcaaaaaacaaacaaacaaaaaacacaaaaattaaccaagcgtggtggctcacgcctgtaatcccagctactcgcgaggctgaggcacgagaatctctggaacccgggagacggaggttgcagtgagccgagatcgcgccactggactccagcctgggcgacagagcaagactccgtctcaaaaacgaaacaaaacaaaagaaaaaaaccttagtttcagcccgcacattccctcaactcctatcgctgcctgcaaatgtttcgccatcttcttggacaatcctaagagggcattgcagaggcttccggacactgtcgttttcctgggaagtccacaggaactttagcttggacgagaaaggactagggaaaaatttttggtccttcggagccgccgtccaggctcgggccgcgcagagtcgcttgtccctcggcggctgccgtgcctccctttacgtggcagctgcgggagcccgccaatccactgcgcccgcatcagcccccactggtggcgcaggcggaaggggcggagcttaggcggcggtggctgagaaggcagcggggcggcggcggcggcggcggcggctgtggaggccgcagtccgggtcctggcttcggcctcagccccaccatggtgacgcttgctgaactgctggtgctyctggccgctctcctggccacggtctcgggctatttcgttagcatcgacgcccatgctgaagagtgcttctttgagcgggtcacctcgggcaccaagatgggcctcatcttcgaggtggcggagggcggcttcctggacatcgacgtggaggtgcgggctagctgcccgcagctgaggcttggtcgcgtggccactcggggattggtggcacctgggaccggcgcggggcctgtgtggggagtgggcttggaagtcgctgtccgagtcctggagaagcccaggccgccaccccccgccccgccccggccacggcgacctcctaacggccccttttcccgcgacttgcctgggttccgggatcccttgggggctccttcggcatgcttggttgctttgggttwtctccttgaacgacgggttcctgttggaacctctcgctgagctttgtgaatcrggcgccgcgtgtcagtccgggccccaaaggcgcttctcagtcacagttagctggtggcgggtctctatccagttagcacctgccttctttcgtgttacggattaatgctggaacgtggcacggaaacttttccaaaaaattgattaaaatcgattgaggattaaaaacctattgagtgctaggcatactttcgcgttgtgtttatttttcatagaagcaaccttaaggttctactctttacgcctccagctacctcgtttagtctcttctgccaaggagagatggggagttgggtcatgcgttttargagtaagcagtgcagtgaagtatcaggagaagacaggartttaagaaaccagcagtccctaaatctccactcatgttttgtaaaccaaaagaatgatgtgttgctagtttttattttaattcacctgctagcatgattaattgggtctaaggagtttccatttgacagtgtactcagtagggctgggcacaagttacacaatacaagtgaaatccaaaaataaggggataacggaagggrgagactcttacacttagctaagaatttagcgatcaactattacagtctcgaagttatgcaagtgacatgcactttgaaagagcgactgacttgatcacagcctaacagctgatttgtagcagactgggatgagagtttgggtcttctcatttccaggctagtcctttcccctaagccttcaggcatctcagataaagcagaattccttcactgtttggcagtaatctggaaaaccttgaaatgtgataaaaattcatcttgtttatattttaaaaaaccacaaacgtttattacctcatggtttctgtggccaggaattatggagaggcttagctgggtggttctggcttggagtatctcatgaggttgcaatcaagatgtcaaccagggatgcagamattctttattttaaagagatttcttttttcttgagttttgctatcagtcacagttccatgtttgttggtgatattaggccagttagagaccacatttaaggtgagctttctgtttctgaggggtttaataaggataaataagacataaatgtcaggacctaaaggtgttttagaaagccatgaagtcaactcttattttataaagtgggagaattgcagcccaaaatggttattatcacttaccgaagtgaagctaagtgaaagttacatattcttggtgaatttcttttttttttttttttttggaccaagtctcgctctgtcgcccaggctggagtgcagtggcacgatctcgactcactgcaacctctgcctcccrggttcaagcgattttcctgcctcagcctcctgagtagctgggaatacaggcgtgcgccaccatgcccggctaatttcgtgtttttagtagagacggagttttaccatgttggccaggctggtcttgaactcctgacctcaagtgatctgcctgccttggcctcccaaagtgctgtgattacaggcgtgagccaccatgcccagccatattcttggtgaatttcttactgccattagacattacttataaagtctatgacttaatcttttgtgacattttatgcatttctctcttgcctccagattacaggaccagataacaaaggaatttacaaaggagacagagaatccagtgggaaatacacatttgctgctcacatggatggaacatacaaattttgttttagtaaccggatgtccaccatgactccaaaaatagtgatgttcaccattgatattggggaggctccaaaaggacaagatatggaaacagaaggtgagatgaacattcagaagatttacatcacattccaagagctaattttagttctatacatttttacctgtctgagtggagtacttattttttttaaatttcttaaccaaaacctttttgtgaaatacgctttttattttttgcaagtctcctaattaataaaaaagtttcttgaggctagtgtttgtttttttgttgttcttttttcttttatttatttattttaagattgtgtctcgctytttcgcccaggctggagttcagtagcgtgatcttggmttactgcaatctccgcctcctgggttcaagcgattctcccaagtagcgtcaggcgtatgccaccatgcccggctaatttttgtatttttggtagagacggggtttcaccatgttggccagggtggtctcaaactcctgacttcaggtgatccacctgcctcggccttctgaagtgctgggatttttttgttctttacatttgtcccttctaacagattttcttagtcattttgtgctcttgtgagcatgtaggttccatgtgtcttcagttattttttctgtttatttgctaatcctggcatatactttatttgctcatttgtatacatgactagtttagctaaactttttgttggttctttttgtgttaagatatcttaacttttctttaggtggtggagatacctgggatggtatgtggattgctttttgacagcatcctttttgcatctttttgtttgctaatgtctaatttctgctttcttttttctaacctcagtttkttggcatgagagtgtttttttctcttaaaaaacccctacaactaattggattgatattttttttggtggttttttatttcgttgacaggaggtataggttaggttattttaaactaatagcactgaaaacacagttgacattttagtagtaacatctttgttctttaagatgaatgctaaagagtggaaattcaatgataaggggacagaagtcccaattaaacatagctcatagcaaatggtgcctttgactttgtagaaagtcattttgtagacttcttaacctgaagcttagttggatatgaaatgcagttctaggagccatatgttgatatgaagacaagagttcttttagccatatgttgcagttagagtgttcattgctcaggttaccagtaataaaccctgattggttcttggtggttctggataaattgcttaccgggagccagcacatttggtggtgtttttttttgttttttttttccccacagtgcatgccagagtttttgaagctagtcattgtttcacacatttcatagtatactattagcgtggtaacatttctcccagatattcagtatcagtagagtgttaacatcataaagaagctgagttgtttggttggattttgaaatctatagaatttagagagtcctactacttagtaattcctgcactcatttttcagggccacttatagggtaggacttgactaattttcagggagaatgaggagttctgaaaggcttttttggtttattttctggagtttgatcctacttaaatagtttgaaaatgttggttgatgaatgtgaatattgaacttcttagataattttttaacatatatccaaaattcttgcttttgcttgttaatgtcagtgaatggcagctgtcaaatcaagccttcctctaaagcagtggttctcaagtgaggatgcccaggggatatttggcaatatctggaggtattttttattcggaagactgggggtaggtgctacaggcatctaggactggaggccatggaggctgctaaataccctatagtgcatcagatagcgccccacagcatagaaaagcatttggtccaaaatggagacaatgccactgctgagaaaccctgctctatcagttccatgtggtgcatggggcttccaaagggaaatttcgagtgagggacggtttgacattccaattcaactgccttcaatggtagaggcccttggtttctcctaagaaacttggggttgtctgcgagaatctggaatcccagaagagacccagtcttgggcagggatgaagagatccccctttcccaggaaggtttcctggtgctgtttctctcctgcctgtctgttcattctcataacgtggcactacctagaagcacatgcttactcttcagaacagtgccttgtgtgtatttttggttcaagagggatgcctsgttgaaaacttgtgccgctaagggcttgtctctctacttacattgcctgctgttccccactatagtgaaactattactttgtcaaagaagaatgtttgagttggtgtggattttcctaagagcgttttaatgtttttctctgctcagctttatagagattaagagtctgttttggtgctgctcctgcttcttaattaatattagagttacatgactcttagactttatttgtaggattacattttaaaaatacaggtatttattttgtgctcttagtcccctctcctcagtgttttactacttttgctgtagttaatagtcagtatagtgaacttcacataacaacattccattagaagaaatttcctggggttgttttcctttccttagtaagcattatatagtatgtttcctaccctgaaagaggtttctctactgggaagggacttttaaaaatgctttgagaattaaattgacatgattcatatcagtagtccaaattgatgtttgaaccatttcaaaagtagcttcttttgcaggccttctctgaggattttgaaaagttattttatattattttatattttatatttattttataagtgtttttcaaaaagagattgccccagcctaggcaacatagcgagaccccgtctctaaaaaataaaaataaaatggtagtcaggcatagtgacgcacccctcaggaggctgaggcaggggattgcttgagcccaggaattttaggttacagtgagctataattgcaccactgtacttgagcctgggtgatagagtgagatcctgtcttgaaaaaaaaaaaagatggctgggtgcagtggctcacgcatgtaattccagcattttgggaggctcaagcaggtggatcacctgaggtcaggagttcaagaccagcctgaccaacatggtgaaaccccgtctctactaaaaatacaaaaattagctgggtgtggcagcgtgtgcctgtaatcccagctactctggaggctgaggcaggagaatcgcttcagcctgggaggcagaggttgcagtgagctgagattgagcaccactgcactccagcctgggcaacagagcgagactctgtctcaaaaaaaaaaaaaaaaagacattgacaaatgtgttttgttttcaaatccttctatagctcaccagaacaagctagaagaaatgatcaatgagctagcagtggcgatgacagctgtaaagcacgaacaggaatacatggaagtccgggagagaatacacagagccagtaagtgaatgccgtcactttgcagcagtgtctgatggtgaaggttgttttactcaacagcttgctcgtattttcctcatttggaaactttgcaaattttatgtgaaagcattgactttaaaagtgtacctacacgagatattttttgagcatacacatgtgtggagctttgtagtttattattgggacattcattgtaaactagaaaatgctattaagatttagtacaagtttttaagagtttagttttctggccgggcatggtggctcacgcctgtaatcccagcactttgggaggctgaggcaggcggatcacctgaggttgggagttcgagaccagcctggccaacatggtgaaacctcgtctctacaaaaaataaaaaaattagctgggtgtggtggcgtgcacctatagtcccagctactcgggaggctgaggcatgagaatcacttgaaccgggaggcagaggttgcagtgagctgagattgggccactgcactccagcctgggcaayggagctagactctgtctcagggaaaaaaaaaaaaaaaagtttgggtttttaaaaatgtatggtgagctaaggaataagctaattgttttcttaaatcagaagggaaaaatgttgtaaaatgcgtattgcattggtttttaatcacatacctgaaacttatgtaccagtgggattaatattagatgctgagatttaacctttttactaaaatggaaagcttaatatagttagactagaaaacaccaaaacatgagtacagggaagtcaccaggtgaagatcagtttgggtcctcaagtttgtaagttgggaatttggaatgtattttgctgtggaaacagtgatgattgaaatcttgtgttaggttgcaaaagtctgtttagaactggatagagcattaaaaatgaagcttttgcatttaaaattaagaggtactatattgacagacagaccaattccattgattaggttcagggccacaccattgttcagtgttttcatcctccaggtagttcttggggagatgaaaagagcaaggtggctgggggcagtggctcacgcctgtaatcctagcactttgggaggctgaggtgggcggatcacaaggtcaagagactgagaccatcctggccaacatggtgaaatcccacctctactaaaactacaaaaattagccgggcatggtggcacgcgcctgtagtcccagctactcaggaggctgaggcaggagaatcacttgaaccccggaggcggaggttgcagtgagctgatatcatgccattgcactccggcctggcgacagagcgagactctgtctgaaaaaaaaaaaggaaaaagagcaaggtatagtgacgcatctctgtagtcccagctactcaggaggctgaggcgggggattgcttgggagcaagctcttgtcttaagggcagtgattttatgtcaggaatctttgttctgagactggagtaggaagtgaagagtgactcaaagagataagcacagcttgaatttcttccagatgtgctttctgtttttcctacccttaaatctgttcttgctacttatggaaacaaatcttcaggatctagagcacagacatcagcttgtgttggmaggaaggtgtgtaaatgtaatagcctggagaactcccctcatccccacttgttttaggagtggagtggggcatattatggaccaaggcttgtctacaattactccagcctcttgcctcacaattttgtctccttgcctccactcttaatctcaccagctgggatcttcactttttctctcttaycttgttgggactcatatgttgtttaccttgttcccagatggggaaacagcccattctggagttggaagggcactgaactaactcagagggcaagttcctctactttgcaattttaactggttcagaccagatggctttcaagttatagaagttcttgggaacacagtggccagaggaagcacatgtcttccagtctttagggtgtccaaccttgttctctcacccatgatttgagtggagatactcctgtatttgtttcacaaatagtgagctatgtgttcatatttaaaagtgttagcaatttctagaattgagtttataggcattcagtttaaatttacaaagcaaatggttcccataatgttttgtttttgtgagtcttcctataggacccactcctcagcagtgaacataatgagatcctttcactacagtgttgtaataataatgtgttgcttctagatcaggctgatatatgagtggcatgaggacagtgtcccaggtcactacattctgatgttactgtgcttcaatgtgttctatttaaacttaaaggtgcatttttctttgggaggccgaggcaggtggatcacctgaggtcaggagtttgagaccagcctggccaacatggtgaaaccccgtctctactaaaaatgcaaaaattaggccgagcacagtggctcatgcctgtaatctcagcactttgggaggctgaggcaggcgaataacgaggtcagtagttcgagaccagcctggccaagagaacagcctggccaatatggtgaaaccccatctctactaaaaatacaaaaattagccaggcacatgtaatcccagctgcttgggaggctgagatcacttgaacccaggagttgcctaggctggtcttgaactcgtgggcttgagtgatccacctgcctctgcctttcaaagtgctgggattacaggcctgagccactgtgtctggcctattttctttttacagactctctggtttttgttgttttttttttagacggagtcttgctctgttgcccaggctggagtgcagtggtgctatctcagcccactgcaatctccacctcctgggttcaagcgattctcctgcctcagcctcctgagtagctgggactacaggcgcacgccaccaccaaattttgacgttgtaaataattgcattttggataactgtgattttgaaataattccttaattttttgtagaagtcagttttctgattcagcaaaatggatagtaatataggacgtttcaatggtgagggagaaagatggttggattgggtgttaaccctagaattatgaccttgggcaagtcaccttttcttctctgctccccgtatacaagcggaatggacttggctgtacccagtgaatctttaagcccagctaatttttgtatttttagtagacggggtttcaccacgttggccaggatggtttctatctcttcaccttgtgatccacccgccttggcctcccaaagtgctgggattacaggcgtgagccaccacgccaagccctattttctttttagagacacagggtcttactctgttgcccagcctgtagtgctgtgctgacaatacagctcactgcagcctcaacctcctgggctcaagtgatcctcccgcctcaacctcccaagtagctggaactacaggcatgtgccactacacctggctaattttttttttttttttttggtattgtagagactgggtttctccatattgcccagggttggcctctgactcctgagcaaaagcagtcctcctgtctcagcctcccaaagtcctgggattatagtgtaattgtttttaatgttggctatttgcagaaaaataaaacactacatagaattttttttttttttttgagatggagtctcgctctgttgcccaggcaggagtgcagtggtgcaaactcggctcactgcaagctccgcctcccaggttcacgccattctcctgcctcagcctctcgagtagttgggactacaggtgcctgccaccacgcctgggtaattttttttatttttagtagagacggggtttcactgtgttagccaggatggtctcgatctcctgacctcgtgatccacccgcctcgacctcacaaagtgctgggattacaggcatgagccactgtgcccagcctacatagtaattaaaagctaaggctatagaatttgactggagagttggacacaatggcttgtgcctgtagtcttagctgcttctgagcctgaggcaggaggattgtttgaggtcaggagcttgagaccaacctgggcaacacgagaccgtttttaaaaaaataaaataaattggccaggcgtgatggctcatgcctataatcccagcactttgggaggccgaggtgggtggatcacctgaggtcgggagttcgagaccagcctgactaacatggagaaaccgcatctctactaaaaatacaaaattagtcaggtatggtggtacatgtctgtaagctcagctacttgggaggctgaggcaggagaatcgcttgaacccaggaggtggaggttgcagtgagctgagatcgcgtcattgcactccagcctgggcaacaagagtgaaactctgtctcaaaacataaaaaataaaataataataataataaaatacatttaaaaataaaaagaatttggccaggcgtggtggctcatgcctataatcccagcactttgggaggccgaggcaggcagatcacctgaggttaagagttcaagaccagcctgaccaacatggtgaagccctatctctactaaaaatacaaaaattagccaggcatgggggtgtgcacgtgtaatcccagctactcaggagtctgagacaggagaatcacttgaacccaggaggcagaggttgcagtgagctgagattgcgccactgccctccagcctgggtgacagtgagactctgactcaaaaaaaagtaagtaaataaaaagaatttgatcagaaacttgaatgtaacaaatagagtatagtaaatatagagtaggtgtggattttactttaaggatcaaatccttagtttgagagcaggacagatgagcatagtttgtcttgtrtttgatggtctggtagtaactgtcagtatggatccatataactgagtaacctcttccattgagaacaattgacaagtacacaggtgctcaacaaatatttgtaacatatttggggaaaaagacactcagactgccatattttgatgttgtaaataattgcattttggataactgtgattttgaaataattccttaatttttttagaagtcagttttctgattcagcaaattggatactaatacaggacgtttcaatggtgagggagaaagatggttgtattgggttttaaccctagaattatgaccttgggcaagtcacattttcttctctgctccccatatacaagcagaatggacttggctgtacccagtgaatctttaaggtttcttttaaaaatctttgcttctactttgggaggctgaggcaggaggatcagttgaggccaggagttcaagaccaacttgggcaacatagcaagaccctttctctacaaaaacagaaaaaattagtcaaatgggctggtgcatacctgtactcccagctactcaggaggctgaggtggcaggattgcttgagtacagttcaaggttgcagtgaactatgattgtgtcatggcattccagcctgggcaacagagcaaacaaaaaagtctttgctttggagtatgttgagttgcttggagacaaaagtatttagartataggtgacccataggttacaatgacttcacttagaaattttcagctttatgatggtgcaaragtgatgtgcattcagaagaaactgagcatcaagtacccatgcaaccattctgttttttactttcagtgcagtgttcactaacttgataaataaaatagaaaataataataaaatgcagtttaacgtgtatgagatacacaacactttattataaaataatctttgtgttgttagatgcttttgctcaactgtaggctaatgtaagtgttctgatcgtgttttacgtaggctaggctaagctatgatgtttgctaggttaggtgtattaaatatatttttgacttatgtattttcaacataagctgggtttattgggatgtaaccccatcgtaagttgaggaacatctattctatgagtggtgtacacaatattactttcacacagagtgaagactaaaatatttatgatgyctatgtctttttgggggagaattgttaaattttgtttgtttgttttgtcctcaacagtcaacgacaacacaaacagcagagtggtcctttggtccttctttgaagctcttgttctagttgccatgacattgggacagatctactacctgaagagattttttgaagtccggagagttgtttaaaaagcctcttcctgatgatcccaactcagaattcactgtttaccaaacaccttggtcataataatgtcattagtttctccatttttattttctgaactgtacattcacaacttatgtttctttgagattaatagatattgggggaaaaacgcctttttaggaaaattatagtgaaaatttgacagttgattggcataatttcttgtttgaatgctgcctccattatataggtccttccaggaactcaaacactgtaagtgaaatatgggagtatagtttttattatttcttcttttccttttgttttcataatataatgcagtttgttcaggaaatcagcacaaagcctgatagtactttactaaaatgactgcattctttggattccttcagtctatggttcaagtcactaaagattcatttttgttgagtccttatgagaaacagcagtatgaatcttgacggtttctgcccgtcctaatggcagagctctctgacttgggtgtatgctgccaggctgggtactttcatactttgttttcttgttttgctttaaaactacgactcagcatacattttcccacatacatttttacattgtaccttaggactcagtcatctccacttaaattgatgacacaagcagctaataaccatttctgggtttctgcctaaccccctaattgtctgttaaagccaattctctgggtgtcccagtgagtggtggctttttttytttccacattggcacattcacttctcccactcttggcatgtaagaaataagcatttacataattggaaaaatctggatttctgatgccaaagggttaaagcttcttggatttcatttcattgatatacagccactattttatttttgatcagtggcctttgggccactgttcagggtactgaccatcagtgtcagcattagggttttggtttttgtttcttttgggthtttcttttttggcacatgtgaatcttgttttgtgtaaaatgaaattactttctcttgttctctgatgatgggtttaaaattaaaagagcatccggttttggtatggggatgatccaggattatgttgtgactgatacatattagttacttgtgctttttttttttttttttggatctttgcaagggcaaaactacaagtaacgagttttatataattaatttaaatttgttacaggttttcatgttcaggataaaccatacttccaccttgggtgagaacacttgcaacagtttattaatgaggtgactttcaccttaggacaactgttgcatgccaagttttttgtgtgtgtgaaacacttcaaaactgatttaaaaratgtaaatttaaaattggttgtatytaatatgccccaggttcggtaaataaacaattctttttaaaaacagtattctgtgttttatatattgacagctaatccacattttttacacaccaactttctgttcttatttgacatgagacatgttcatgttttctgagtatttatacctattacgtctgttactttttaattctataaacttgaggatagtgaatggtaccaagttttagtttctgcrtaggttttccagtgtggcttctctgatggatcagtgctaaaatcttaagtatttttctmtttgggaaaaaagggttgaattattttcacttgcccacgtagtttatgaatgtgggaaatagcttcaaagacagattaaatgatttgcccaaggccacagaaaagagtgaaaggtggaaccggagactagatcaccacctgtagaaactgttcttcctctgtgaaactaacggcctgctggtaataaaagtagctaccatttcttgagtactgtgtaatgtctcgatctagtactaagcactttacttggtctgtcttattcatgcttcaaaactgccattaccttgggtaaaaccattttggaagtgaggaggaaaacaggcttggaaagggtcttaaggtcagaaaactagtaggtagtagagcccagaagacacacacagatatgtaatttccctgtgcctttgctttcagaactgtctgtgaagtctcccaccttttctttttttggagacaggatctcactctgttcccaggttggcttgatctctgctcactgaagcctcaacctcccgggctcaagtgatcctaccacctcagctctccaagtagctgggactacattttttgttttttaaagacagggtcttgctttgttacctggactggagtgcagtggcacaaacatggctcactggaaccttaacctctcaagtgatcctctcatctcagcctcccgagtagctgggaccacaggcatgcaccaccacgcctagctaattaaaaaattatttttgtagaggcagagtctcctgtatgttgcccaggctggcctcattctcctgggctcaagtgatcctcctgcctcagcctcccaaagtgttgggattgcagacatgagccaccgtgcctagccgaagtcccattttataaaagttgtcaaaggtgttttgagaatgtgatgatcatttcactgaaaatgtggcttcaggctgttgtcttttacttaatttgagatgactgcagtctgcatgaattgtattcccatttatcaatcccacaaatatttgagtgattgctgtgtgctacagtgatagtccttgggataaagaagatagagaaaagaccctattagtgtgggttttacattttggtggcagagatgaacctaataagttttgtgtgtgtgtgtgtgtgtttgtgtgtgtgtggcgagaaagagataatggtaaatgctaagaagggaacataaatcaaggtaggagtttcagtgatacagaaaggaaggtaacagaagttgatttcaaaagtccaagtggaatgtaagggagtgtaagggaaaacttcccctttgctctcaggtttctctaaaaattcaactgaaaataggcagattaataggaggaaagtgatacaaatttattcggtcatgcttttacatgacaaaggaaccttcagaattaagacccaaagttacagggaaaactatttttatgcttaggctcaacaaaatatgcacagctgagtagaaataggactggacaagaagggcatgatctaatgctcatagactgagtggggaagcccagcgaggcctgtctggattctttccttctggataggggaaagaacccttcctggaatggggtcttacaacctaccagcaaaacaaaggaggtcagatacattttttttttttttggagacagtctctctctgtcacccagggtggagtgcggtggcgcgatcttggctcactgcagcctccgcctcccgggttcaagcaattctcctgcctcagcctcccaagtagctgggaatacaggcgcacgctgccacatctggctaattttttttgtatttttagtagagacgggatttcaccgtctggtctcgaactcctgagctcaggcaatctgcccgccttggcctccaaaagtgctaggattacaggtgtgagccaccacgtctggcctttttttgtttgtttgtttgtttgtttgtttgttttttgagactgagtctcactctgtcgcccaggctggaatgcagtggtgcgatctaggattactgcagcctccacttctcaggttcaagcgatgcttgtagctcagcctccggagtagctgcaggcacctgccaccacacctggctaattttttgtatttttagtagacagggtttcactacgttggccaggctggtctcaaactccttaccttaggtgatccgcctgcctcagcctcccaaagtgctgggattacaggcatgagccaccgcacctagcccagataatttctttttctttttttttttgagactgagtctcgctttgtcacccacgctggagtgcagtggcgcaacctccacctccctggttcaagcgattcttctgcctcaggctcctgagtagctgggactacaggcatgcgccaccacgcctggctaatttctgtatttttagtagagacggggtttcaccatattggccaggctggtctcgaactcctgaccttgagatctgcccgctttggcctcccaaagtggtgagattacaggcgtgagccaccgtgccaggccaataatttctttatggccagttttttcacagaaaggtggagagagagtaatatttttaagttttatggctgactgtggagaaaagggattcctgtttctatgctccgtcatgggcaagagggattcttgagtttctatggctagcctcagagaatcagagatcagagagggagcagaaggtcagagagaaacttgcttctgaggctgcctctggggccttcattttggggtttcgttttcagagcctcaacaggagcaagccatgcacataggtggaggagataggccctcatagagggcacataatgagtggtcaataaaagtttgctgagtgaaggccgggcgcggtggctcacgcctgtaatcccagcactttgggaggccgaggcgggcggatcacgaggtcaggaaatcgagaccatcctggctaacacggtgaaaccccgtctctactaaaaatacaaaaaattagccgggcgtggtggagggcgcctgcagtcccaggtactcgggaggctgaggcaggagaagggcgtgaacccgggaggcggagcttgcagtgaaccgttatagcgcccagcctccagcctgggcaacagagcgagactccgtctcaaacaacaacaacaacaacaacaacaaaaaaaacagctttctgagtgaagttgtatgtggacatgaatggcccaggcaaacagtgaacagaggaatgggacagtgttcttagttaggactctgaccctaacttccgggaaagtaaaccaacattcaggacgtaccggccatcggaccgcaacattcaggacgtaccggccatcagcgggtgcctgttttgcagggctgctaacccgggtccccgacacgtttctctgcccacggtagccagccccgctgtccttcggcctggacgcggtcctgtgctgccacctgcctccgaggggcagagaaagtgggagggccgggccagaatccctcccgccaaaactcctgcccggtgcggagaggcgcccggagcccagggcgctgtgcggagcgggtgtaactccccaggcctgccccgccgcctgcctccaccgtcccgcggacgcctttcctccctcccgcggcgtgggagccttcgccgcgctccggaactctgctgctccagcgaagttcccggccggccgctggagctgccggaagcggaagtgctcgttgggggtgcacaaggcgcgttcgagcagcggcgaccgacgcggcgaaggagcgcgccatggagcatgtgacagagggctcctgggagtcgctgcctgtgccgctgcacccgcaggtgctgggcgcgctgcgggagctgggcttcccgtacatgacgccggtgcaggtatcggttccctggcgtgggggagtgaggctgggagaggggcaggcacccgctgcatcggacccacaggaggtgatcggacagatctgagccctggggcgctcatccctccagctggggctcttgccttgtctccagctgcccagactggcggaatgcggagctgcccggccagcgagccggcagaggggccgggacccaccccgccctcgggtgctgtggtctcaagcctggttctcatcctggccctgctcgctgtagctgtgagacctcgggcaaatggcttaacctctccgtgcttcattttccttctctgtgaaatgacgaaaaaataacaccctccttatggggttgctgtggggactaaataaaccagtcggcacactatgggagctcagtaagggttaccgttgttatgcatctcttcaagaatatttcttgaggacctgctatgtgtcaggaactcttctaggctctggggagtttgcagtattggcatctgctcatagccttactttctagtgcaagagctagagaaaggataatttcagctgctggtaagtgttatgaaagaactaagacggttgtgaaagtgtcgcgcgaggactgcagaggaggtgagatagggtgttaaggaaggcctctctgaggaggtgcattgagctgagacctcagtgattgagaaggagctggctctgaggtgactagggggagattattccactggagagaaataccagtgcacataaatgccctgcggcaggctgcaaatagtttgagcagcagaaaggaggcctttgtggctgaacatcaagagtagtgtaagagatggattgtgcagggtcttgtaggcgcttggatttcattctaaatgtagtgggaagccatcttatctgggaggatgtttaggaagggaagggctgtgatttctctgtagagagtggcctttccaggcataagagatgaagcaggcaggtcgcttaggaggccattgtcaggtaagagatgatggtgacttggagtagggtggaaccagtggatactgagaagtcacatttgggatagctttaaggttgctaagggactggaagtggaggttaggaaagaaaagactacagggacctgaggtttttattctttttttttttttttttgagatggagtctcgctctgttgcccaggctgcagtgcagtggcgcgatctcggctcactgcaacctccgcctcctgggttcaagcaattctctgcctgaacctcccaagtagctgagatcacaggtgcctgccaccatgcccggctaattttttgtatttttagtagatacggggtttcaccatctcggccaggttggtcttgaactcctgacctcctgatccacccgccttggcctcccaaagtgctgggattacaggctgagctaccgcacccggctgatttttattagtagctgagtgaatggtgttaccatttcccaagaatgactggcgtgcgtatcaggtttcagagggaaagtcaagagttcttttttttgttttttgtttgtttgtttgtttttaacttttctgagacggaatctttctctgttgcccaggttggagtgcaatgacacgatctcggctcactgcaacttctgcctcccgggttcaagctattctcccatctcagccttccaagtagctggggttacaggcatacaccaccacgcctggctaatttttgtgtttttaggagagacgggatttcgccatgttggccagactggtcttgaactcctgacctcaggtacgcccgccttggcctcccaaagtgctgggattacaggagtgagccactgcgcctgaccacaagagtcctgtttttaaacactgagctgggtacagtggcacccgcctgtagtaccatttgtttggaaggctgaggtgggaggatcccttgagcccaggagttcaagaccagcctgagcaacatagtgagacccgcatcttcgaaattaaaataaataatggccgggcacggtggctcacgcctgtaatcctagcacttttggagaccaaggtgggaggatcacttgagatcaggagttcaagaccagcctgggcaacatagggaggccctgtcatcacaaaaattttttttaaataaatgaagtcttgagtttgagatgcccataagattcccgggaatgtggagaatgtatttccagcaggcagggctggagatgaaaactgggagtgctatgtgccctgcctagggaatgtagtgcgagcaagacccaatctctggcctcagagctcattgtctagacctgtcatccactacacagtcat

SEQ ID NO: 96450 - DNA, 17194 bp, Homo sapiens
  misc_feature (1)...(17194): n = A,T,C or G
taaatctttgtgaccttgtgtaaaccaaaaacaaaattctaaggcccccaaccactgaatggactctcttcttggccagggggattccaaagaaacccaaaaaagtagttcatgccatgatggtaagtagagggtcagacaggcctcattataccctctcccttttggagtttagacataactgaccagcattaacattaatattgaaatcctaagactgacagaacagactctttgtagcaataagataccaactccaacctgactctggtataacatcacatgacaacaggccctagaggaaatcaatgtattgtaccccaaaatatatttcttggacataatttttggattggccctgcaaagctgtctcttgtgaggaacatttacattctgtggagaattctcttccctttctaggccttttcctgatctaggagagatttaactaagagtctgataccttttaaggcaagcttgtccaacctgcagcctatgggccacatgttgcccaggatgcctttaaatgtggcccaacacaaattcgtgaacttttgagatgtcctgcctttccaggccaagccaatgtaaaccttacacgtattgattaatgtctttgcctgtaacttttctccctaaaatgtataaaatcaagctgtaacccagccaccttggatacatgttctcaggacctcctgaggctgtatcgtgggtcatggtcctcacatttggctcagaattaatctcttcaaatagtttatggagtttggctttttcatcaacacttgggtttaggcaatggtttctttgatagaacaaccaaaaacacaagcaacaacaaaaaatacagttaaactgcacttcatcaaaattaaaaccttttgtgcatcaaaggataccatcaagaaagtgaaaagatagcccgtggaatgggagaaaatattttcaaatcatatatccgataatggacttatatttagaatacagaaagaactcttatatctagtaacaaaagacaaataatccaattaaaaagtgggcaaaggatctggatagacacttcttcaaagatgatatacaaacggccaataagtacatgaaaagatgctcagcagcattagccatcagggaaatgcaaaccaaagccacatgaggtactattacatccactagcatggctatagtcgagaagtcaagcaataataaaaccacctttgcaaaaattataactgagaaaattattacagtgaaagagatctgacctaactgactccatcttgcttctaacctccaagtagtccttgttcattcctgggagtaggctgaactaactttgggagtttatagtttaattttgaaacaaagacaatcacagccctttcccagaacaaannnnnnnnnnnnnnnnnnnnnnnnnnnnnnnnnnnnnnnnnnnnnnnnnnnnnnnnnnnnnnnnnnnnnnnnnnnnnnnnnnnnnnnnntattctgaaccttcccaaattgctcctggggataacatcactattgtaaaatctaggatcactacttgagatattttgcagatcctgcacttgatggatcagctggcaccacccagatcgatgaactagctcatctggtcgtttggctcccaccctggaactgactcagtgcaagacgacaaactcatctccctgtgatttcacctctgacctgaccaattggcactccccactttctgacccccctactcatcaaattatccttaaaatccccagtctccaagttttcggggagactgatttgagtaataaaactatggtctcctgtacagccgcctctgtgtgaattaaactctttctctattctaattctcctgttttgataaattggctctgtctgggtagtgggcaaggagaacctgttgggcggtttcaataacaagagttagcaaggatgtggaaaaattggaaccttcatacactcctgggggaatgcaaaaatgatgcagtctctttgaaaaacagtctggcagttcctcaaaaggttaaacatagagttttcatgtgacccattcctaagtctatccctaagataatgaaaacatacttctacacaaaaacttgcacatgaatgttcctagctgactttttttttttttttttgagacagggtctcactctgtcaccaagggtggaatgcagtgatgtgatcatggctcactgaagccttgactttccaggcttaagtgatcctcccacctcagcctcctgagtagctagggctacaggtgcatgccaccatgcccggataattgtttctatttttttgtagacaagcagtctcactgggttgtgtaagctggtctcgaaatcctgggctcgagcaatatgcccgtctcagcctcccaaaacgctgggattccaggtgtaagccaccacacctgaccaacagctgaattatttataacagccaaaaagtagaaacaacccaaatgttgatcaataaatggtaagaagtgatatatccaaataatgaaatatttagcaataagaagaaattgaatactgatatatgctaccacatagaactttgaaaacaatatgctatgtgaaagaagccagtcacaaaaagacaacatagtatatgcttccatgtacaggaaatattcagaataggctagtttatagagacagaaagtagattaactgttgtctaaggctggaaggggcttgggagtgaatagtttctttttggggtgatgaaaatgttctaaaatagactgcagtgatggtttcacaactctgactatactaaaaaccattgaattgtccattttaaatagtatatattgtatgatttgtgacatatcttattaaagtttattaaagctgttataaaaaagagcatttacagccacacacaaaaatattatgaagaaaacaggtaattttttttttagaatctaggatttttcaaagttattttctaagaatgataaaaatctaaaaagttacaatatcattagacnnnnnnnnnnnnnnnnnnnntcattagactaaaaatttaaaccatttatgtgaccaaaataagggtaaaaatataaatgtctttagttgtctgtattctccagcagatagcatgctccaaaagcactgaccttgttgtacgtgaaaacctaatgttaggtatacatatttgttgactaaatattagatagtccttgacacatggtactataaaagattaatgcttttcagagtaattttctgtgaaaaggcaataaaaatctgtgtttggtcattttttttaaagtggcaaagaaatgaacttacttacgcatactaaaaactatagcactggggccaggcatggtggctcatgcctataatcccagcactttgggaggctgaggtaggaggatcacttgaggccaggagtttgagaccagcctggccaacatggcaaaaccccgtctctactaaaaatacaaaattaggcatggtggtgggcacctgtgatcccaggtactacggaagctcaggcacgagaatcacttgaacccgggaggcagaggttgcagtgagctgagattacatcactgccctccagcctggtcaacagagcaagactgtgtcaaaaaaaccccaaaaaacaaaaaaactatattggcaacactttttaagccttagataactattcacctatcctcaattttggaaaaaaaaaagtatattaaatacataaagatattctagaactcagttcaagagttcaaatacactataacgaatatttaaaatatttagttttcaatgcattgtagtttagtgcatagaagttatttacttctgaaaactgatgactgacatatgacaaactatttctactgcttgtatagctactgattttcttgagaatatttggaactgtgtagtctgaatttctccaaaggattggaaaaaaaagtcacaacctttaccccttttctgaaaacacatctgatatctcactttagagattggaatattcagtctccgtggttgagaagagaagtcacaaagtccactgaactcatagcatcaccatatcaaagtcacactgatggcacattggtgtctacctctttcatgccagcaggctacgaaaatggcaatgaattgccatccaaagaaaacagaaatggtagtggaatttggttagcactgggcccaaggctgattgcatctaaattaggctctaaggcagatagcatctgactactttaacgttccaaacaccatcttatccatacattaagtgcagcaaaaaatgcatgggtgacatgaaatttaaacaaagttctaatttcttaatatatggaagccaaatttaacaaaattctactttcatgaaatttcataagaatatccttgaatttggaatatttagacttaatgattctatcaccaaaacttaagtaaactaaagatttaaaaaaattaagccagttatgacagaatatgagatcctttagggaacttttctgtttgaattaacgacaacaacaaaaatttaagtaaaactttaaaaagaccatccaacttcatctgtcacgatggttcacagaatacccataacacgataaagcccttagagttaatttaatttaatttttttttgagacggagtctggctctttcacctaggctggagtgcagtggtgcgatctcagctcactgcaacctccacctccgggttcaagtgattctcctacctaagcctcctgagtagctgggattacaggagtgggccacaacgcccagctaatttttgtatttttnnnnnnnnnnnnnnnnnnnnnnnnnnnnnnnnnctgggattacaggcttgagccccacgcccagcccttaattttagacaacgcagaaaaactggctccagatacacttgggtgacttggtcaacatatgaatgttaaccatgatgtgacagatcagacttcaatttctttagactgaactagaatggctccgaagacgaaagtcaggtcaggaccagggagaaaaactgggcaaatacgatttttttttttccatttccaacagaggtttgaagattagaaccaggatttgggaagcctcagttcaggagtccaccgaggtgtgtgtgtgttgacaggtggtggtgatgccgagggcgtgttgacaagttttccccgcccttgacctttagcctagatattaattctaccaactggggcaaccccagagggaggaagccagggtcccccaacaggctgacagcgcgtgacctttgccctagatagcctgagaaagctgatgagagaaggggcgagaggtgcctacagcccccaggaccggccttgtcccttttgccctaactcctccacttatccccaccgcccgtttcctctcacccaggcaggacagcttggctagcggcaccagcatgttcaaagtcaccaggactctcggtcggacacaacaggaggactgtccgctgctcgcggcgggcgctggacctctaggccgcggggggcgccatcacctgccggaaagcaagaactctgctgcagttcgcctccccgctctgccgaccgctcttgcttcacggcgttcccacctccttctcgctctgcgccggcgccatggatgacgcaacggccagccgaggcttccgggtcatgtaccaaaccagggaaagataagggactccaagtcccagccggggagcggtgaaacagccacagcgcggccagaggggtccgcgaatcccacagcacgacgcacgcgcagtgaaaggcagtagaaggcggggcgacgcacacggcttcctgggaggtgtagttttctctacgagtgcccttcgagatcgattggaggctcgcgcaggagccgtgagttgcctaaggtgaattgactcatatgattggctgtcccgaaaaatgaaacgtctttgtggtccggggctgagacccacgaggagactgggcgggatttctggcgttaggaggcggggcctttcggctttgggcgcgagtggttaaaagacagttggtgtcggttcggcttctcgggtcggattccgcggtcccaacccttccccatggcmgaccctgaggagttgcaggtttcttcgccgcccccgccgcctccctcttctccctcctcttcagacgcctctgcagcatcttccccgggcggcccagtgagtttgggctggccagttccgagcaggagcagcggcccaacggtggaccagctggaggaagtggagctgcagatcggagacgtgagtgtggtgtcgggaccgcgtcccccctcggcgcctctgggaagaccggcggcggcggggctcgcgaggctagggaatcggtcccccaacccccatgacccgggacgaccggcccttctgcgccccagagcgtgcgggcgggaagcgggggggatgccagcagctaaagtgccacccctctctgagggttccccctttagatttagtggtgaggagtcttaaggggttttccttccacccgccccacccctcactggtttctttttgtctcgccttctggtttcaatcatccgcagtaacccgaagccacgcagctctgcgctgcctgttgctggctctctgcctcctcctttcccatcggagaatagttttcattgcatgggtttcggagaatagttttcactgcatgagtttgctggctttctgtgggtacttgagatcaggctgtgatttctttccatgggacttagagcctgctgttctagttggccacctgcccagggacagctgataatgccattgtctgccccaggcctgcttagcgctggacccagcttgaagggtttaggtcacgtggattggcttctttgacggtttagttcaggactcctccctttgtatgattgctagaatgcatacttaggatagtttctgttaaatctcgaatccccagaaactagcaccccacctcccaaccgtaactcacacaccactggaggggagaagacagggaaggggagttttatgttctcttgagtgggtcaagtggaatgaggtatgtagagtgtaacctgggagagttctgtggcctgacctttcctgcagattggaaactaggggatgaactagattatctcattgctccgcaagtatttttttttaaggatgactagagtgcttaaccagcttttatttttgcagaacaaactgattgcaagtaaatatgtagaatgaagtgctaatgtgttattgaggaacactgttttattttatatcattggtgaagaaaacgtttggctgaaaagtgaattttccaccaggagctgagtgttttctgcatttgtgtgtgattttttaatgttatttgtcagagctcagagtttctgttctttgatctatacattttcattgtttaaagtgttcacaggtcaatgcccatgttacccaaatagcagtaagaattatttatgatgaaatctctcagatatatctggcgcttagtgtcaaggggtccaagtcatcttgttgagctgagactctagtgtattttcatagaaaacagcaatcctgggccaagcacggtggctcacgcctgtaatcccagcactttgggaggctgaggcaggcggatcacctgaggtcaggagttcgagaccagcgtgaccaacatggagaaaccctgtttctactaaaaatacaaaattagctgtgcgtggtggcgcatgactgtaatcccagctactaaggaggctgaggcaggagaatcacttgaacccgggaggcggaggttgcagtgaaccaagatcgcgccattgcactccagcctgggaaacgagcgaaactccgtctcaaaaaaaaaaaaaagaaaaaaaaaaaaaaaaagaaaacaactatactgatttgtcatatctcagacataatggatatttttctagcagacctgtttcttcaaagtctactcaatattaaagaatttcttaggttccgtgaaagagccagtgctgtagtttgaaaactgattactttgaaagaaaataacatgggcattggattcaaagccttaagctattttcagcctgcttataaaatgagatgagaattttaaaaataaaattatgtttgactttttttttttaggcagccttttcattaaccaaacttcttgaagccacatctgcagtatcagctcaagtggaagaacttgccttcaaatgtacagaaaatgcacgtttccttaaaacgtggcgggacctcttgaaagaaggctatgattctttgaaacctgatgactgatttggcatacttcgttgtttaataatgactgcaataattcatacttcttatgtcatattttgtacatgtaccacacatataggatgacctctgtccagcagttctgtatatactcagaatgaaatttttcttggttttcttggtttttgtgaaagcagaataccgatgctatttttgttgcggaccagtacttgtttgtccttaaatactttatgcctctgaactttcatagaatcctttatgaaagttaacttcatcaatagacggttaatattaatagagccacagtgctaccagtagcaaactaggtagaccattatttgttttgcaacaagatgctaagcatggcagactttgaagttgcgtttcatcttaaggaccaagggaggtaactttaaggttgccagtggtggatccagctccgttaggctaagttgtctacagctaatgattgtgtctttattctatatccccagcacctaaaacagggtcacacaacattcactaaatgtttgttgaataaaagagttaacaaacataattgaaagctttttttcttcctatatttagcatgaagactgtcattgtttctctaggaaatgtatgaatctgaacttttttgacttgaagaaaaacattctttttttacagagatttggactttgatgataggttttaaaaatatatgataaatattttttgtacttgtttgattttttttttaaagactttacttcagaaagggaaagactgtttagaaagaatgcatattttttccctatttatttctgtggttactgcttttgcagtttaacagtgtttgtatttgatatttgtatatgtttgattgctatctttaaagtgccttatcagatttatggctctgtgctattactttttgagctttgcaagttgtgtacataataattctaaagaagttactttgtttgcaatgcatcaaatttaaatgatgtgattttttttgtattatttgatcttagtgacagtgttctattttgcatcctgtatcttatgttgcttttggtgttttgtgttgtgtgtcaacgattaagccaactaattctctaccatatataacttctggacatttttgatacaacatcttaattctttgtagatatggagataggtacagaactatattctaatgccccacaatggggctatgagaggggacagatggatgggcaaagaatagttttgtttaacatattaggtcatagttcttgattagtttttttagttaaagataaacacatagggtgtgatttctataccaaagatatgcttatttcagtattagaaaaatattcttcttacatctcctgaaaattgcaatttttaaaatgtgtaaaaataaattattattaaaagcacattttatttccatttgtttggattcattaccttaaaactttattgacatatttcaaagatataggaaaggtaaatgatttcaagaaaatccgtgtatttctaccatgcagatgtaataaatgttagcatttggctatattttcttcagacacacatatgcatgtaattgcaaatgttagatacatttgaagtttgctttgttacctgtttgatcctgtcccgttcctccctccccagagtccccagaggtaaccactagagggggcataatatagcatgtgtttttatatttttaatacaaatatattttttaaaagcgctacaaaatattgttttatatatgtggtagccagcttccagatggccccagtgatccctggcctcctggtgktcatgccccagtatagccttctcctgcattttacagtgctgacttttgtaactaccaggatattgagcaaatgcagtgtgtgatttctgaggccatatcttttactcttttttttttttttaagagacaagatctcactctattgctcaggctggagtgtggtggcaggatcatagctcactgtaaccttagacttggactcaaacaatcctcccatctcgcctcctcctataaagcactgggaktacaggcatttttgctcatttttctatgttgttttttttacttgtcagtttttagatattacatattttgaatactaatgatctgttatgtatgttccaattatcttttttagtctggtttgtcttcatattttggttatgaaatcttgaatttttaaaaacgtaattttaccaatctttcataatgatttgctttttctggtttttgtataggaaatgtcataaaaatagtcctattcagccttccaaaagttacaaaatttttgtttttaacatttagatgtttagtccaactgaaatttgttttcttttatggcatgattttggaatcttgttttaattatttttacatatttatagctgttcctccaagtatcaatttttcaagtgcaacatctgtcatgcagttactatgtaagggccagattctgacctttctgttctttttatctgaaggaaatttgaacatgccacccccaaatatgccgatttggcatactgattatttcgagctaaaggtgcttgactaacagtagttgcagaaatggctattttaactgtcctttcctacctgtagcaagccatacaaacttctttgataaagatgctttcctgataccaagatgagaagatggctctaatcagctgagacagcaccagaggaatctacaaacaagaaactattagtttcttaacatatatttaccttccacagtttctgcctctggaagcctaaaactgctttccttcgtcttgtcacacttctctgaaatgtattctttgtggaagatgctatatagtccagagttgtaagccactacttgtgtttaccttttcattgagttttctcctgtgtgatgtacgttgcatatattaataaaattacttgtttttctcttgttaatctgtcttttgttatagggatctgtcccaactgtgaacttatgaggcttgaggagaaattgtatttcctccactacagatttatttgcttaactccatgctaaaactcaatttgtctttccctgtaagaaaagaaaaaacatgttactgatttctaattctattgagttatgtcagcttaggacaactgctggtgtcaggtagtgagctttctatgggcactttaagagtttacaaagtgacctttttacatttctgtttgctttatgggagaggttggggaagagctgaaagcgtaaatatttcctcaaagacttaataattttttttaaacgtagtaaacggtccattaccagccctacaaaaaccccaaaggaatgatgtaaatttttttttgagacaaattcttactctgatgcccaggctggagtgcagtggtgtgatcttggctcactgcaacctctactgcccggttcaagcgattctcctgcctcagcctccctcgctgggattacaggtgcacgccaccacatccggctgatttttgtatttttagtagagatggggtttcaccatgttggccaggctggtcttgaacccctgacctcaggtgattcttctgccttggcctctcaaagtgctaggattacaggcatgagccactgtgccgagcttatgtaaattttttagactcgagactaaagtcagtaagatgaaattgttaacataaaaaaaaatgtgttatgtttcaaaaattctgagtttgaaagatgtgccaggtactatattaagagctttatgatggggcacggtggctcaagcttgtaatccctgtatgtccggaattggtggttcttggtctcgctgacttcaagaatgaagctgcggaccctcgcagtgagcgttacagttcttaaagatggtgtgtccggagtttgttcattcagatgttcagatgtgtccggagtttcttccttctggtgggtttgtggtctcgctgacttcaggagtgaagctgcagaccttcacggtgagtgttacagctcttaaaggcggcacgtctggaattgtccgttccttctggtgggctcgtggtctcactggcttcaggagtgaagctgcagaccttcgcggtgagtgttaacagctcataaagggggcgcagacccaaagagtgaccagcagcaagatttactgtgaagagcgaaacaacaaagcttccacagcatggaaggggaccctagcagattgccactgctggctcaggtggcctgcttttattcctttatctggccccacccacatcctactgattagtccattttacagagagctgatcggtccattttacagagagctgattggtccattttacagagagctgattggtctgttttgacagagcgctgattggtgagtttacaaacctttagctagacacagagtgctgactggtgcctttacaatcctttaactagacagaaaagttctccaagtccccacctgacccagaagcctagccggcttcacctcttgatggcacttgccgtgggacttcgtggcacctagcccaggcactccagcagcccagagggagctcgttcctcgatcaagcccacctggaacccacgccggcccgcaagcaccgtgcacagccccagctcccacccatgcctctccctccacacctccccgtgaacagagggagccggctccggcctcggccagccccagagaggggcccccacagtgcagcggcaggctgaagggctcctccagtgcatccagagtggacaccgaggctgcggaggcgccaagagcgagccagggctgctagcacattgtcatctctcaatccccccctctaaataggataccttaactgctgttgggaatttggctgatgactgctctagctacttcctgctggataggggcgaagaagtggccctgcagttgtgtcctccagaggggaactctttaggccagtggaagggccagcaggtcggtccaggggtcctcggtagaagttgttagttgagctcatttggggttccatttgtaagaccatctgtagcttgatggcctcgattctagaggaaacaaatttgacaagaaggttaaaaatacagggtccaaaggcgagtaacagcaacatggctgccacgggacctagaaagaggagaagccatgttgcccaactctagaagttggtataagagtttgaaaggcgttgtctgatttcagaagccttttcctgaaacaccaggcagcatctcgtactatccctgactggttagtgtaaaaacaacactcttcccctaagaaggtgcagagtcctcctttctcagcagtgaggaggtctaggccttggcagttttggagagtcactgctgctaaagagtctatttgggattgtagagtaaggatagatttcatcacttcctgcaaactgagaaatcctttgagagtgtgtggcagtatgataacgcatgttacactactaacgtttagcaaactttactttagttgaaagccttgtaagtttgggatttcaattattctttgctattaataagaccttgttcagtccatattaacttaaaattggtatagatggctccttcctgattctgcaagtactttaaggtttggctgagtgcaaacagctcgaacgtttaagcagaccaattattgggcaattttcctaactctgcttctgtaagagtttccttatcacttactgaatacccattgtgtcttttttcctaattgcctgggaggaaccatctatcatcctgtcctgaagggagttcctcctatgtgtggtcagaccttcagatttagatctcctattaggaaacctgctgggttaaggatttttgataggaaggctatgggttgtcagtggcctcagtgctttcaggctatgcccttgtttacactgacaacaaggtggtattggagtgttatagggttacagagaagaccttaaattaccaattgtaggttttaaatttgccctggcttttaaaggaatagggtacaccattttttctttactacttccatctctctttctctttgacttctttgtctctctcttcctctctgtctctctctttgactccttctttgtctgtctcttcctctctctctccttctttctttgactttttgtctctctctctttcctttctgtctctttctctctttccttctttgactttgtatctctctctctgctggtctttctctgcctctgccggctgcttatgctgctgttctcccctcaccttcccctttttgatggcttcggcagtgtaagactgccacctctttgggtttttgcactgcgtgcaataactccatggtttccttgtggtatttaatgggggttcccccagaggttaggaactccctttctttccatattgcagcatgggcatgtaggattagataagcatacttgctatctgtatacacatttattctttttccctttcccagttctaaggctcgggtaagtgccactatttctgctaactgggcactggtccgtgggggaaaagcttactttcaagtacggttacatcactaactatggcataacctgcccttcatatcccattatccacaaataagcttccatcggtatacaggttaaggtcaggattagctaaggggacttctaagagatcatctcgggcagcataagtctggactataatttgttggcagtcatgctcaattggttccccatcctctgggagaaaagtggcagggttgagggccacgcacgtatgtatctgaagcacaggtacctcaaggagtagtgcctggtatctaagtaggcggttgtctgatagccataaacttcctttggcacctagtatgccatttacatcatgagtagtccagacagtgagatcctttccttgtattatcttgatagcctctgacacaaagacggccaccgccgcaactacccataaacagtgagaccagccttttgctactatatcaactccttacttaggtaggccactggttgtggggttgtcccacgagtctgagtaaggactccaagagctatccctgctctctctgtgatgtataaagaaaagttttgtcctgtgggaaggcttaaagctggagcttgtactatagcctgctttaaggttttgaaggctgtttctgcccctggttcccattctactagatgagtatttgccctctgggtctccttgattatagtatagaggggcccagctatctcgctgtatccggggatccatagtcgccaaaagccggtgattccaaggaacccctgcaactgttttaatgtcttagggtgaggataagccagtataggctgtatttgttccttgctgagggccctggtccctctggctaagattaggcccagatatttgacctgctgtaggcaaagctgggccttcgacctagacaccttgtacccttgattagctagaaagttcaagagatctagagtagcctgctggcatgaggcttccaaactgacagccaaaagtaaatcatccacatactgaaggaccagagtgcctggacttgagaagtgacctacatcttgggccagtgcctgaccaaatagatgagagctatccctaaaccctttgggcaagactgtccacgtaagttgggatgtgtggtctgtgggatcctggaaggcaaagagaaactgggagtcagagtgcaggggaatacagaagaaggcatccttgaggtccagaacagtgaaccattctgcttcctctgttatttgagagagcaaggtataggggttgggtacaactggatatagaggaattactgcctcattgatgagtctaagatcttgcactagtctccactgaccgtttggtttttgtactcctagaattggggtgttgcagggactgccacatttccttagtaagccttgagcttttaaatgtttaataatatcctgtaaacctttatgagcttcaggccttaagggatattgcctttgagaaggaaaagtggtggggtcttttagcctgatttggactgcatgggcatattttgcccttccaaagtgtccttccaatgcccagacttcagggttgattccctcttcaagtaggggacaaaaaatgggtaacttgttctccatattcatgtagataatagctccagcctttgctaatatatccctccctaataagggtgtgggactttcaggcataacaagaaaggcatgtgaaaagagcaaagtctccaattacagctgaggaggtgggagaaatacctggttacaggctgtcccaggattcctcggatggtaacagaccttgaggacagtcgtccaggacaggagattaacactgagaaggccatgccaatgtccaggaggaagtcaatttcctggccctcaatggctaaacatacctggggctcagggagggtgatgacatgagctggcgcttgccccaggaactcttaatcctgttgttggatcatctggttgggggcttctgacccaaagaatctttgtcctctggagcagtgcaccttccagtgattgcctcggcatagtggatatggaggaggggttggcttgtttctcattggataatcttttttaaagtgtccttgtaaaccacactgataacaagccctaccaggtgattggcctgctccattttctgtcctctctgaaccaccaaggtttgtttgtctgagggccatgactaaggctgtggcctttctctgatctcacttttccttttgggactgttcctcttggtccctattatagaacaccgaggttgctaggtttaataatgccttcaaattttgttcagggcccagggcttgcttttggagctttcttctgatatctgctgctgattgggtaataaacttatcttttagaatcaattgaatcttgagtgattcaggt

SEQ ID NO: 96451 - DNA, 12516 bp, Homo sapiens
ctttttctcttttataattgaaccatggttgctggggataacttagaaacacaggaaagggctaattttctgcagtgattggatggctcaaggcaatatgtgtaggacaggttactccagtcagacctacgttcaaatccaaatgccaccagaggtgagacaagatagtcttaatactcaaatgtacaaaataaatagccagagacctcacctaacagggttctttttaatgagtaaatgaaataacatgtgtaatacagtcatcacagtataaacatcacagtcaacgatgcctgctagctttacacctgtgcttgtgtgtgtacatgttggggtatgatattggaaagaaaaacaaatctcatagcgatatacggtgaaaaaggtccctgaacttggatgagggttcctctttaaaaaggtttctccctccagccaacccccacacacagagtcactcccctcaaagggagaggaggccctcttctcacctctgaggctgctcatggcaggagctcagtcactgccagttctctgagccattgtggcttctgtcctcacaatgaataaacctggaaacacactgtttgagtctcttcctgcctatgggttctaagtgctgctgtctgagctgtgcctgcagcaggcttcctgcttctggtgctcactgcggggaggggagccatcggttgataccaggagagagcctgctgctctgctgccttcattagaaacaggcagtctccttgtctaaaaatagcaaaagtgggagagtggggaagagcagcagccatgctcagggctgaaagtgagaaaggcagaaacaagcagatctctgaaagcctcctgtatggtggcaggcggctaagcattctgggtgcagtgactgtggtcaaagcttttctacttccctgggtccgtgttggggggttttgtagatgtgtccacacactcagccaagggctgagcatgaaggagccgctctgtcctggcaggagcatgagatgtgccacacgctgatactgtccaggctgcagcaggagcgctagtgctagtgcttgagaatttccacaccctgtagtatcctcacccactccctgccccaaccaaaggtgagctttttcccagtggggcacaaggtgttggtttgaccatcacttcagaagcgcctgggtcacgctggaatgggcttgcccttaagcagagtgtggctctggtactaaacaagtctttgcagccattaagtgagaccaggctgtatttgtgggtgttctctgcaggtagagctttcctgtctacatttgttatcagttaatgttctggtagctaaactaagagcagaaaaggaattctttccaaggtcttacgataaatctgtctatgcaagcagacctcatcaaagccccatgaaaacaggcagagtctcagaggtaagagtcctgttgatactcctgtttgcttatcccaaagagctttaccctctcttggcctttctttctcttgtactatccaaactgatcctcttgctggccttgtgagatgggctgggcatctttcccacccacagatgaggaaccaggagctcagtgtcataacttgcccagcattgtaaccagtaatcagagacgcagagcttgtatcaaggcctctgcccttcgcctggatattctctgaggtttcttccccacatgacagtttctgaagggcaaaaacctcctaacatgaagcagcctaaaatgtggcatgaatttaagcaaacttagggggcaaaaaaaagactccatttaactttgatttgggaaacatttttctttgcatgacccagcaattatgactctgaacccagagagggaaatataaccctaactcactgttggccaggcagtatacaatatttatatagtcacaatactataaactctatgtgtcaattttctaattttagagccaatctgtggacaaagagggagcaattttgttatagctgcaagataggatataaatatgaacagccctgacaaagtagagataaaagttgttcggtgttttttaagtgtgtctaatataaagtgagaggggaaagcagggacaaagatgaaataatgtggggagttaaaggatacggtgtgtggttgatggaataaaaaagctcactaggtatgttatttacagttacaaaataaaatataaatagcaaatgttggaagaagacacagggtagaagagggtaaatgtccctcatagtgaatcaatggatgctaccttaggttaagaatcttttaacccctgattcatcaaaagacatgaagggaatcgccagaaaatattaaaagagaaatcccaaaaagggctgctgcccctagggaatggcggagggtgggggtggggagggcaggaggttgttgcttttcatcagaagtcatctgtgttgtgtgctttattatgatgtttattacttcgattaaaacaaattgaggcagtgagagaatgacttttaaaagacaaaaactgtggatagtaccatatgttccctcaacaaatgctctcatgagaattagctataaaacactcattaggtctgcaaacagaaatcagagtgttccaggctataaaattatcaatgactgttttcagcagtccagccaggctaatgctctccaatgaagccaaactaatgttgctgataaccaaaagaatctttttttttttttctgtaaatgacagaggcctgtgtggcatcagggtgccattaacgttttctcctagagagacagccaggaagaaaaatcgctcctcctgtactgctctcacctgtgagaagtttatgacttgttcggagagcagagcacagagcccgggaagagtactggcagtttctgtgtttttacaagggaagaacatagctgagtagattaacagtttcctgtgtggcttgttgcaaattacatgcaattagccctcagacagcctgaatcgagagaattgtggcaaaacttgatggtgcagaacctaggcaggcagccagactcctaaacccagtcacgtaaatttgctgctgtaactggatcttcccaagccacaagtctgagaaatggtgggcactctgacctgaccactagattttcaggatattcctcctaagagaggtatccttgcttctaagtgacccctaaaacagaacctaggaaactctcagccagataaattagaaattgattctaaataggcttgtgcccaggaaatcaacaatgcagtaaaaatatcaggacaaaagcaagaatacttcccaaagtcagaaatgaggagcaatgaatattaaattgatcaatggcatagacatttaaatgaaaatcctttttttaaatgtatattactggccaggcacggtggctcacgcctgtaatcccagcactctgggaggctgaggtgggtggatcgcccaaggccaggagttcaagaccagcctggccaacatggtgaaaccccatctctactaaaaatacaaaaaaaaaagtagttgggcatggtggtgcgcacctgtagtcccagctacttgagaggctgaagcaggagaatcgcttaagcccgggaggtggaggttgcagtgagccaagattgcaccactgcactcaagcctgggtgacagcgagactccatctcaaaaaaaaaaaattatattacctttactgcttggggcatcttcaagagaagactttgctgtagactatggatgcatttatttgaattagatgacttattcttgcgttatctccttactcttttgataattacatttcattattttttaagccacaatggacatgcacatacatactcctgcatacagtttataggttcttgagcctaggtaagactttatgtcctatgtgaaacatttcttgattaggaaagttacacctttctcttcagtagtgcatataacctttactaatctctctttgctaaaaataatgtgacagtgttaaactgaaatatttttagtatctgttttggctgaggcccaaaacaaaagtaaatgtgagactatagcacttgcaaaggtcaaaactggtttttgaatggcagaaaatcagctctacagccctcagctgactacccacctccagcctttaaaagaggttattgaggccaagaaaagagtggcagttagaatgtgatctttagagagaactgttgatcagaggtgtctgtccccacccagggacacttgggagggcttgataagtgtcctgtggaggatgtggctcatgcctgagatcctatgatggcagagcaaggagagtttgctgtttggagttggcttctgctactcacttcctatcttttttctgtgtgtgtgttttttttttctccttagcacttttgaccaacataatacatattttaaatacttatctcattgtctgtcttctttaatactatgtaagttccatcaggcacagacttttaaaatttgatctctgtattctaggtgctagaatccattctaggtgcagtgtgcatacatggatactcaataactatttgcagctgggagcagtagtagctcatgcctgtaatggcagtgcattacaggcctgtgtggcttgttgcaaattgtgtgcaattagccctcagacagtctgaatcgagagaactgtggcaaaacttaatggtgcagcacatcggcaggcagccagactcttaaactcttggcctttgggatgataacttgagcccaggagtttgacaccagccttggcaatatagggagacctcatctctaccaaaaaaattttaaaaagaaacaccaggcatggtggcacatgcctttagtcccagctacttgggggctgaggcaggaggatcatttgagctcaggagtccaaggctgcagcaagccaagattgcaacactgcactccagcctggatgacagagcaataccctgtctctaaaaaatacaaattaaataactaaatatttgcatcctacattcattaccacaaatcactccaacaaccctactcgttctgtattattattctcattttacatatgggaaactggagctcttactcagaagggttaagaaacttacccagtatcacatacaactaagtccaagagccagaattgaaagtcagattcatctgattccaaagcttatgctctgcctgttaatgctttctcagctcaggtgcctgtttcctgaaaatgtattctcatccttttttgggtgctaggtagtatctaatctaagatttttaggcaagtaacatgccattctgtgctgtggtctcacttggtagatcctgcataatgaggataacaaatagaaagattaattaattggttatgtagcttacactcaataccaagacaataataatttcagattattcagaatacatttaatggtactttactgtataaatgcctgattattcatttagggctgtatattctcccaaattcttttatatgtataatttggtttaaatattaaattgttggaagcttaagtagcattattttcattgttcaatcttaatatccattgttttaaatatgttgttttagaaagcatattttgcttacttttcctcaaaactttctgttcattgttactcttcccaaaagaacaaagatctccacagctaacaccaaacatcatataccatatttgtttttgtgggtattctgtaattattttcaagctcctaggcacatttgcgtacactacttttgtttctgcaatgacaaatttctaaaatgttagcagcaatgactgtaaaaaagggtagttaattggaaaagagttcagatcctaactctgtttagggaccatgtaacccaggcaagccgctgcacctccctgggcctcatcctggaagtagagatgttgggcagacacatggggagggattgcgtgtatgagtgtaacaggctgggtgggatgctcgagtgaggtggggaccctgcagcaatgcagaggacatgctcggtctaaggaaggcagctgcaatctcactgctactcagaaatgtaggcttacagttggccactcttctcatgtctcaaaagaaactgggtttttgtgggaatttccttttcctcaatttggcaataattcaaactaaaatctcttcttctttttttttttttttgagacagagtctcactctgtcgcccaggctggagtgcaatggtgcgatctcggctcactgccacctccgtcttccggattcaagcaattctcctgcctcagcctcccaagtaactgggattacaggctcccaccaccacgcctggctaatttttgtatttttagtagagacaggattttgccatgttggccaggatggtcttgaactcctgacctcaggcgatccacctgcctcggcctcccaaagtgctgggattacaggcatgagccaccacacctggccaacakatctcttcttcaaaacagttcttccagccagactgggtttgtgggacagcagtgtgtaacctctgggcaggacatccccaggatggaggtgctctggcccatgcctgcactataccagcatgtgccctgggacattgcagatggctccccaggcctccacgggcctgcactcacagtctcttcaccagagagctcgaaatctcagaacccaactctctcatgtcatcaagccagagacatgagtctgcttttctgtctccttagatttgtctgttcttagacattttgcataaatgaaattatgtaatatgtggtcctctatgactggcgtctttcacttggcataatgttttcaaggtttcctcatgttgttgcatatatcagagctttattctttttattactgcataatattccattttatgaattatttgtccattcatcagttggtggacgtttgagttgtttccactttctggctactatgaataatgctactgcaaacattcatatacaagtttgtgtgtggacaagttttcatttttcttggatatgtatgtgggagtggaattggtgtatcatattgctttgaggacagaccaaacagttttctgaagtagctgtaccgttttatcaaatacattcccatcagcagtgtatgagggcttcagttgctctacctcctctccaacaagtttaatttttctgattttctatgataactatcccagtagttgtgaaagtggtatctcactatagttttgatttgcattttccttatgactaaggacattaagcatctttttatatgcttattgaccattcatgtcttctttggagaactctccagattctttgctcatttttaaatttggttatttgcctttttattgctaagttataagagttctttatataatctggatacatgtctcgatgagcctcatttttgtcacccaaatttaatgatattcaaaatattctacttactaagataggaaactattctgtttgaaaaacagtataaataacaacgttttaaaaaaaagaaagatgcccatttgattttatcaaattttgaccttatgatactactaagtaaatctgatatttcttttttctgtaatcatactatattttagctgaaataattgataaatatacctgtcaagtctcaaataatattctaattaatttttgtatgttaattttgtcttaaccatgccagtggcttactcatagcttccaaaaataaaaggtaactcttagattgaaaaatactttcaaagtgggtgggtttgcctctagggaggagaatgctggatcacaagagggcaggagaaagagaattactttctgctgtattttacacttatatgcatgtagcgtcatttaaaaaaaaataaattttggaggctgggcactgtggctcatgcctgtaattgcagcactttgggaggctgaggcgggtggatcacctgaggtcaggagttcaagaccagcctggccaatatggcaaaaccccgtctctactaaaatatgaaaattagctgggtggggtggcatacgcctgtaatctcatttactcaggaggctaagagaggagaatcacttgaacccaggaggcggaggttgcagtgaactgagatctcaccattgcactccagcctgggtgacaagagtgaaactctgtctcaaaataattaattaattaattaatgttggggccaggcgtggcggcttatgcctataatcccagcactttgggaggccgaggtgagcagatcatttgaggccagcagttcaagaccagcctggccaacagtgaaactctgtctctactaaaaatacaaaaattagcagggcgtggtggcaagtgcctataatccctgctactcgggagcctgaggcaggagaatcacttgaacctgggaggcggaggttgcagtgagccaagatcatgccattgcactctagcctgggcaacagagcgagactccatctcaaaataaataaataataaaacataaattttcagcaaaatttaaatgtggactattgtattagtccattttcacactgctgataaagacatacccgagactgggaagaaaaataggttttatggactcatagttccatgtggctggggaggcctcacaatcatggtggaaggctaaaggcacttcttacatggcagtggcgagggagaatgagagaggagcaaaagcagaaaccccttataaaacatcataactcatgagacttattcactaccatgagaacagcacgggggaaaccacctccatgatttaattatctcccaccaggtccttctcccaacacatgggaattatgagattacaattcaagatgagatttggatggggggacacagacccaaaccatatcaactatagattagatcatggtattatatcattttacatttcctgatttcgataattgtactgtattatataaaaggatgtccttgtttttaggaaattcacactgatgggcttatgggtaaaggaatgacttgtatgcaatttagtcttcccaaacagttcagggaaaaaatgcttatgggtatttataaataaataattacaaagcaaatatggtcaaatgataggaagggtatcctggacttttcagcattccttccctttttctgtgagtttaaagttatttcaaaattaaagtttaaaaaaaaatttaaaagaaagacacttccggaatattcttttatatataagagcttccagaatattcttttatatatttgatatatattaatatatttgatacacttaatattaggaaagaaataaaaatcataaataaaaactcaagaatggaaaaacttagttgtttttttggggtttttttttttttttttttttttgagatgaagtctcactctgtcacccagtctggagtcagtggtccaatcttgactcactgcaacctctgcctcccggttcaaatgattctcctgcctcagcctcctgagtagctgggattacaggcatgtcacccattcccggctaatattttgtatttttagtagtgacaaggtttttttttattggccaggctgctgtcgaacttctgacctcagatgatctgcccgccttgcgctcccaaagtgctgggattataggcgccacccgcgcccagcctctttatgacttttgtaatcaggaaaaatacaagtgaaccttacttcttaagatctacacaatttgttgcgcatggtggctcatgcctgtagtcccagcattttgggaggccgaggtgggtgaatcacgaggtcaggagtttgagaccagcctggccaacatggtgaaaccccacctctactaaaaatacaaaaattagcgggacgtggtggcgggcgcctgtaatcccagctgctcgagaggctgaggcaggagaatcgcttgagcccaggaggcagagattgcagtgagcgaagaccgtgccattgcactccagcctggctgacagagcaagactccgtctcaaaaaaaaaaaaaaaaaaaaaaaaaatccacacaattcttttaacaagttttttttttaatattaaaaaggtcagggcttttaatatttcacatatcttcaattaataggtaaatatgtacaaagacaggattatgtgcagttcccaggttcccagacgcgggaaagacagagattataatgtcctcagtggcctcctgttcagcttggaggcttagacaggaacctcagaggatgcctttagatggggagttttcagaagaggtgagctctgatttaaacctggaaggggtcgcagaggaagaggagagatgaagcccaccttccccagccctgccctcagctctaccacccagggaagaccataggctgctgttggttccctccacatggccaatggccagccttctgccaactctcccaacaccaatatcacactcttctccattttctttttttttttcaaatattttgttccagcaaaaccttcccatggcaaatttccacaggttaaaaacataactttgattttaatggggaaaaattttgtatatccatgagcccctaaattaatacccaattttaacactataaaaatggagcaagctgggcacagtggctcacatctgtatttctggcactttgggaggccgtggtgggtagatcacctgaggtcaggagttcaagaccagcctggccaacatggtgaaaccccgtctctacgaaaaatacaaaaattagccaggcatggtggtgcacacctgtgatcccagctactcgggaggctgaggcaagagaatcactggaacccaggaggtggagattgcagtgagctgagatcacgccactgcactccacagcctgggcaagagagcaagactccgtctcaaaaaaaaaaacaagaggaccagttacttcaacagtttcaacagttaacactggttatatcacaacaaaacaatggtggcttctcttcagatgactctccaatatactgtctacctgcattcctttggcttttggtattgtcgtagttactaagggtgtgctccagctatcctcacagaggacataacacagtgctctgtgtttatgtggttcactgctactccaagtgtggtccttgaaccagcagcgttagcatcacctgggaacttgtcagaaatgcaaatccatgggctctatgccagactctggctcagaagctttgtgggagggatccaagaaatttcattctaaccagcccaccaggggattctgaggcacatgtaagtttgagaaccactgatgtaattgaaaaagaagaaaaaaagagtaaaaaggggaaaaaaagaaaaatcatcagtgctaatgatgcacaaggttatcttttgtaaactagggtagtgtaaatactgtaaattgaagcagcaagaactaatcattcaaagtcaaagataactaatgagcccctagattcacatcctcccaccactcacaaggcatgggacccacagatcccctctcccaaatgcaatgaggtatctcgtgtgctggtagagagagaaaatgcacttctagtaaaactgaatactatatattttttttttgagacagagtctcactttgttgccgggctagagtgcagtggtgcgatctcagctcactgcaacctccacctcctgagttccagtgattcttctgcctcagcctcctgagtagctgggactacaggtgtgcaccaccacacccagctaatttttgtatttttagtagagacggggtttcaccatgttggccaggatggtcttgatctcttgacctcgtgatccgccggcctcagcctcccaaagtcctgggattacaggcatgagccaccgcgcctgggctaaacccaaactctttaaactcaagtgaccatgtctccaggcataaccatatttccttcaaattctcaaaattgtttatccccaaaagctgcccacctcaccctctttaggactttggaggtgtctttagattttgttctgggggcctcatgcccatcattcatctttatttttccagcaaagggttaccttccagttcaacatttaccttggaagaggggaccatctacttgaccgctgagcccaacactctggaagtgcaggatgacaatgcttctgtgcttgacgtctatttagtaagtaattttttagtttcctctcctccacttctggtttgtaaatggatccaggccatggcttacacaagaacaagttcaataaaaccaggcatgcttgggttttaaaagaaatgatggcgccctttcacttctgcaaatagtgcttcttttcacaagcaatgttttcctacaatttattacacaaaagaacatctaggtcaatacgaaatcaccacgtataacaagagaacgaatcctctaatgttgaggcaaagtagggctccttagtgttattcccagcgaggaaatgtttccctttgactcagccgtgctccctgatgtttgaatcttctgtgtgttggcgttgctcccttggtaagtta

SEQ ID NO: 96452 - DNA, 25950 bp, Homo sapiens
  misc_feature (1)...(25950): n = A,T,C or G
gctcagcttcccccaagccaaggtaagcccgacagcatttccaccccagtgttggctgggagccttttcctagtttgtcctcatcagacctaagctggggtgcagtttgctagtgatcacattttagcaggacaccgtcaatcgtaagtgtacccagaggagatttataaggacaaagcctgaagccaggtcacatggggaagagttagctacaaaactggccacttaatctctggaggggggcgttggtggggtgtgtctgtgtgtgtctcagggggctggagatgcctgcgtgggaggagtgcacctctgaccaggtggcagagtggaaggactgagggctctcagctgagctgtgcacatggcgggcacaggaccggctggctgtgagtgggtgtggcctgtggcctgtgaagggtgggaggagggctgtggagctggggattctgggaagggaatgtcggcccagctgggaggttgtaccagatgacctcagcggcctcttcagtcctgaaaaaaacctcagcatctcctctgtcgttttgggccgtgacaggacgcagccatctccctgtgcacgctgagatcctgcaatgggccctcaaatcaggggctggcatcacccagcctggtcagccagggccactctttcatccttctcagttcttctcagccagcctcgccctgggctgacgaggctccgtcagctccccttgcccgtccttagggaatgcagctggaagatctcaaacagcagctccagcaggccgaggaggccctggtggccaaacaggaggtgatcgataagctgaaggaggaggccgagcagcacaagattgtgatggagaccgttccggtgctgaaggcccaggtgagggccctcctctctgacccaccctggcactgggacctggagagtctctttggcgtctttttttttttttttgcttttgctttttgagattgagttttgctcttgttgcccaggctggagtgccactagtggcacgatcttggctcactgcaacctctgcctcccgggttcaaacaattctcttgcctcagcctcctgagtagctgggattacaggcgcctgccgccatgcccgtctaatttttgtatttttagtagagacagggtttcaccatgttggcccagctggtctcgaacttctggcctcaggtgatctgcccaccgcagtctctcaaagttctgggattacaggcgtgagccaccgcacccggcctctttggcatcattttgtagtggcctttcgtaagcttctgagccacttgtgctgctccttagacctctcggtgagcttggcattactcgccgacgtatctgtttcctctgcgccgctgggggctctgggaggacagcagtgggttctgctttgttcctgtggtgcctggcgcagtgcctggtgggtggctggcttgtggcgggcacatccctttctgttggatttgccaggcggatatctacaaggcggacttccaggctgagaggcaggcccgggagaagctggccgagaagaaggagctcctgcaggagcagctggagcagctgcagagggagtacagcaaactgaaggccagctgtcaggagtcggccaggtgggcctctgagagcgtgcccgtgtgagcagtgggtgcgacactggggggtcgccagtggtgaccccgcagtgggtgcgacactggggggttgccagtggtgaccacaggagacggatggctcctggtgttctgggttagggctcactgtggtccctctcctctcacctgagcttccaagagctgctttgacactagtccagccaaggagctttacagaaatgcgtggcttgactggacggtttctgttttcaaaggatcgaggacatgaggaagcggcatgtcgaggtctcccaggcccccttgccccccgcccctggtgagtgagcgagaactgggcctgcgggaggaggtgggtggggagggcaggtgctgcgccgcgggaggtcacagttcgaccttcctgttgctctctggagacttgacggcgggagctcgtgtaggccaccccatcggtagcccacccccttccccgaggctaagggaggcatgccgtggtagcggcggctcctggtcttacatgagtggcctgtgagaccaggcctgccattgacagtcctgccaagtctccgtccccctccatcctccccttccctctgactcttctcttttcccagcctacctctcctctcccctggccctgcccagccagaggaggagcccccccgaggagccacctgacttctgctgtcccaagtgccagtatcaggcccctgatatggacaccctgcagatacatgtcatggagtgcattgagtagggccggccagtgcaaggccactgcctgccgaggacgtgcccgggaccgtgcagtctgcgctttcctctcccgcctgcctagcccaggatgaagggctgggtggccacaactgggatgccacctggagccccacccaggagctggccgcggcaccttacgcttcagctgttgatccgctggtcccctcttttggggtagatgcggccccgatcaggcctgactcgctgctctttttgttcccttctgtctgctcgaaccacttgcctcgggctaatccctccctcttcctccacccggcactggggaagtcaagaatggggcctggggctctcagggagaactgcttcccctggcagagctgggtggcagctcttcctcccaccggacaccgacccgcccgctgctgtgccctgggagtgctgccctcttaccatgcacacgggtgctctccttttgggctgcatgctattccattttgcagccagaccgatgtgtatttaaccagtcactattgatggacatttgggttgtttcccatctttttgttaccataaataatggcatagtaaaaatccttgtgcattagtcgtgcgtatctttggcatagattctgagaagtgacaccactgagcatgggcgatggcgtagatggtacctgagcccccttcctccttggagcttggtttcccatctctccccaccccctatttccctagccttgccaaggaggaggtgggaaagcccgtttgggtttttgtcattcgctaggccatgcagttctctgttaagagtgagcttaaacatctttcctgaggctttaaggaccttttttagttctgcttctgaatgggctgctcatatcatatatatatatgtatatgtatagttgtgtatatgtatgtgtgtgtgtgtgtgtgtgtgtgtatttttttttttttttttgagacagagttttgctcttctcgcccagactggagtgcagtggcgtgatctcagctcactgcaacctctgcctcctgcgttcaacctattctcctgcctcagcctccctagtagctgggactacaggcgcctgccaccacgctcggctaatttttgtatttttagtagagatggggtttcaccatgttggccaggctggtctcgaactcctgacctcacgtgatccacctgccttggcctcccaaagtgctgggattacaggtgtgagccactgtacctggccaatttttgtatttttagtagagatgggggtttcagcactttggccaggctggtctcaaactcctgacctcaggtgatctgcctgcctcggcctcccaaagtgctaggattacaggtgtgagccactgcgccccgctgggctgctcatatcttttatccgtttttctactgggttatcttttgttgctcagcttttagaaactctttgtccatgagcaggattgggtttgtggctgtgatagaaattgcagatatcttttcctgctttgacctcgctactagtgtttctttgttttttgttttgagataaggtctctgtcacccgggtgggagtgtagtggcacaatcagagctcactgcagccttcacctcctgagctccagcagtcctcctgcctcggccttgcgagtagctgggatcacaggcgtgcgccaccacaccctgctaaactactggtgcttctcagcctcgaagtttttttttctttatgtagtcacatttatccattttttcccccttttactgctttgactttggagtcgtcgtgaccaccttgtggtctgtgggagggatgcttcacacatgagcacttttctttttctaacaccgaagcgtgctcttgtcttcaccaagagtgttgttgcccagtgtgactggtgatggctgtttcatcatattccagaagtttgtgatgccatttcccacactggccccaattaggaagaacagacgactctacttgttttgcaagattctggaaatttcccggggtgtcagagccctgggcattaaccctgcaattgtagcaaaggaaacaaagttggaagttgactccccagcacccaggccttccttcctgccctcctccaagctgccctggttgggaacgggatattgtgaatccaccctgaggcttcctcacagggcttcctgctatttgacagtgtgaggctggctagaattgggatatgaggccttctaaaaattaacctggcctgagggctttctcagcatctgggggcggggtgtgggggcggggagtgacctttcccctccttcaagccaggtgcccatcagattctacttgggaaaatgtgaaaggcacagacagcttgtctgctcacgggtgctgcacttaaatcctaatcttgcaatttttctacaagagcactttacattttttttttggagggagggtgtatgagtagacggtggctgctgtaacaaaggactgcacacttggggcttaaaacaacagaaactccttcacagtgttggaagccacagtctgcaatcaagttgtcagcaaggctggtttcttttttctttctctttctttctttctttctctttctttctttctttctttctctttctttctttctctttctttctttttctttctctttctctttctttctttctttcttttttctttcttttctttctccctctctctctccctctctctctcctctctctctttctctctttctttcttgttggatacagtcttgctctgacacccaggctggagtgcagtggtgccatctcagttcactgcaacttacgcctccagggttcaagcaattcttgtgcctcagcctcccgagtatctgggattacaagtgcccgccactatgtccggcaaggctggtttcctctgcaggtgccaagagaatcgtttacaggtctctgtcttagcctctgctggttgcttatagagccatcaccctagtctctgcctctgtcatcacacagtctcttcctcttcgtctgtgtcttcccttttgtctcataaaggacaccagtcattggatgtagggcccacctggataatccagaatgatctcctcatctcggcattcattacatctgcaaagacccttttcccaaagaaggtcacacccataagatatgcacgtatctcttcagggccatcacacaacccagtatggggacatgttccagtgcacacagatgagggcaaatgcagcagcagtgcctgggagctggaaaaacacccctgcttgggccccctggaccaaccgagtcagaatcttggtctagacccaccaggcattggtctagacccaccgccctgcccggaggtggggctgcctcctccctcctccggtagcacagtgtagggttgaccgtacaccagacaccaaggatttaaaaccataccatttgcgcagaagtacggcattccagggttttccttttcggctttacttaggttgagcttccagaacaactggttggattactcttgggagggaaccagcctgcctgccctattggctgcggccccttgatccacaaacgaagcccatccctgccggagcttgtggcgttctctggtgttcatgcgcgctccccctcctgccgaccaatgcacaagaacagtgcgggcgaccagtaagcacagtgagaaagcatttcaccctcatcagtaactaaaacaacagcaagtctgacrgcaagcaaaaagtgatctgaaaatggcaaccgatgaagccctaggtgagcgctctgctggcaaggtgcaggacagcggcccttgcaatgctgccctttccgagggggccatttgctgggatggagcaagcccgtaggcagcgtcctcagccctggtgcgtaaccctaagagagagtcgggcactcagcgatgactctggcattgggaaggtgcttcacttcgtcatttgtagctgccaaaggtcggggtgagataagaggctgcgtatgtaacgatgtggtccggcacagctggcattttgaacatctcctcacacgcaacatgccttgtagcatgttggtgtgaacaggccaggtgacaaacttatggataaagcgtgaccccaatagagaagtaaaagctctgagtgcataccctgctaacatttggacggacgtgagtagctgggtggccagtaatgagaagttttccttacatgttagtacctttcctaaatgcctatcatttgcacgcattcctttgatacacagagaatacgtcttcccacacagtcgctcgggtggtaacgcagcttggttttcttctgtgccagtggcagggaagagcccgctgttgacacagcctctcagcaaggcacggggcaggggctgactgtgtctcctggggctgccgtgaccaagcaccacagactgcggggccgaagccacagaaacgcgtggcctcccgcttctggaggcctggaggctgagctagcggtggtgtcggcagggtgggctccccgccagggccgcgagggagctgccttccaggcctctccacggcgccgggggccgccggctgcacctctccagcctccatctccgtcatcctgtggccttgtccccgcgggcctctgtgcctgtcctcctcttttgacaagaacaccggagatacacaaaggtacacaaaagcgggcctttgttcaagctggcaaaagagatcttcttcagaaacccctgcttgcgggggagagagctgagctccgttcccgccccagcagaggcggcctggccttgcgaagggagaaggagggagtcgggagggggcgagtgcaggctcaggtgaaagatgacggggcagccagcgtccttgccgcgaggccagccgtgtgtgggagctgccggtgcttaccaaggttgggatgcttccgtcccgtggagactgggagactgggccccgcgcctcctgaggtttccgtttccaaggagtggctgcggggccctcgggaaagcccctgggttgtgggtgctacacagatgtctcaaagggacagggtaagccctttgtagtaaatgctgtcagaaagggaggtcaggtgttggccggaacagacagtacatgctctgggcagccctgagcgtttccagacgggaactcactcaaaagggggctggggcgtcccaggggcgcggccttaggctcccagaggccccgcgaggtggtggccgggtgtcttcgggcaggggtttgagtgcagtgtgcctgccgagaggttctgcagttccgagcaccatcattttctcctcctcagaccccttggttctccttccacgtcctggcagctgcttcgcaggctccttgctggttcctgtgtctccgagctgactcccgaattctcttcctctccttgctcagacactgcccctttgtgacctcgtccatcttcaaggccttgatgctgatgacagatttctgtcttccagtccygatctgttccttcacgaaaatgagcccagtagcccgtccaagccagaaatggacttttagcccccaccccctgccaactctgccctttscctcatccccagttgcttaaaccaaaacggattcctcttcctctcatgatccaaactcctgagtcccttcaccttttgcctacactatcacagtgacctccttgctgctttcacactggagagcgtgggctccctgtgatctactctccacatggcagccagtgtcatctggtaaacctttgctgaaaccctgccatgcccttcagttgccctggaaacctgaactcatcctcagcctggctcgcagagccctcatgccgctgggacgtcacgttatgtccctctcctgctggcccgctgcacccagccgcaccacatgccggccgcacctcacacacgctggcctcttggcccttcctcgaacacacggcgcttgtccttgttgtcccctcatctttgcatggccgatttctttttctcattcagctctaagtttaaactttcaacagttctaagcgtatcaccttcttcatcttaaagtcctcatcctaaatcacactgcactgttttaactcccagcttggcagtccaaacggcctcatttattctgctttgttttctctctccttccaccagagggagagcagaggcctcctccagctcagtcaggcaccatcccccggaacagcggtctccaacctttttggcaccagggaccggttttgtggaagacgagttttccacagacggggatggggcgtgggatgacggttcggggatgaaactcttccacttcagatcatcaggcattagtcagatgctcctaaggagcacacaacctagatgatccctcgcacacacagttcacaatagggtttgcgctcctgtgagagtctgaggccgctggctgatctgacaggaggcagagctcaggcggtcatgcgagcaatggggagcagctgtacacacagatgaagcttcgctcgcgtgcccaccactcgccgcctgctctgtggctcagttcttaacaggccacagaccagtatcggtccgtggccggggggttggggacccctgccctagaacgatgctcggcacagctacactcggtgcacatttcttggtggcctgagcttgtcttgagctccatcaggatttctctgtcaatatttttgtagaccataccctgtcaccataaatggtgcttggtagaaatgactgtatgcatgtgatagggataacacagaaaacccatggtagagagcatggcgactaacttggagggacttctttttgtbtttttttttttttttttttttttcgtttttgcagagatgcaggtattgtcatgttgcctgggctggtctcaaactcctgggttcaagcaatcctcccacctgtgcctccctaagtgttgggattacaggcatgagccgctgcctccccgcagcatggggggacttcttataagcatttttatttatttatttggaattcggatggatagatcatgttggcctgataatgtatgtgcaagagcacagactctggggtctcatggacaagccccactctgccccttgcttaatgtctctgagcctcagtttcctcatctgtaacaagggcagaaatgccatccgtgtgcagcaragtaccgacgaaaggatggatgcaatgctcttatggcagtgccccacccaaggcacaaggaaaaaccacgaaagcaattccagtttacaccacgtcccaaactggattttccattcgactataattcctcccaataagggctcaaaacgttgtctaaggaaagtcgattggttgttgcccagggctggaggagttgggggaaaacggggagtgactgctgatggagacagagtttccttttgagatgatgagaatgtcctgaagctggtcatgctgatggttgcacgtatctatgaatatactaaaaaccatcgaattgtacactttagacatgtgaattgtgtagcatgtgaattaaacctcaagtcgttattttaaaaatgttgtctaagacacctgggcgcctcctgtaagctcccatgaaaatgcaaatgaagacacagaagaagatcaacattgaacatttacatcctctcctaaagctatgtttgacaggtgacctttttttcatccttccttccttccttcctcttccttattccttccttccttacttcactccctcttccttattccttccttccttctttccctcttccttattccttccttccttctttccctcttccttattccttccttccttctttccctcttccttattccttccttccttctttccctcttccttattcctttcttcgttccttcctcccttccttccttccctccttccttttttccttattccttcctttcctcccttcctccctccctccctccctcccttccttccttccttccttccttccttacgttttttaacagtagagacaggttctcactgtgttgcccaggctggactcgaactcctggaaatcaagtgatcctcccacctgggcctccccaaatgctgggattacaggcttgagaactggcagggagaatgggcgactgactttgtgttgtgaagcagagtgaccctactctgtcctttcctcagagacccagggttggtaccaaccaggagactagcagctgctcttctacccggcccaggttgctttctctatagtcattgagagggaaaccctcaaacagaaagtgtgtcagcagggggcaggcagctgatggatgtcattgtacccttggaggaacagaactcagcggtcacaggaagcggggagatccagggattccatcggtcgcgttggttccgagtgtcgcaggcctgaggggaaggggtgagatttgctttctcagtctaggagagccaaagtcgacaaatgtgtgctatagctggaaataagtcttctcccgcacctagcgggcggtggtcagggtggtctgtctgtccatccccgaaagcactgcaagacctgccatctgtttctggtgatgctgggtggtattattgagacagatatttctgctgaaaataactgcaaatgatagatgaaacagtttgagactgttcaaaacagctgagaaccaacaagagagcaaaacctgagaggaagtgggaatccaagaagaagtacgccactgaagctgcttatttcccgaggacgctggccgacctgggcaaacttgggttttggttctggaggccgtccaggcaagggagacagcaggcaaggcccaaagcctttgtgaagtgtggggagttgtatagcagcccccgctacgttaaggaaaccccaccccagctctgcagattgcggggaagcaggagatgaaaggaaagggaaaacacccctgtgcaaagttgtggccaagggccaggttctgtgcagacttgcagtctaggttttcctggtggggccgttcagtggccctcgagtcctaaatttggtctgaggtggtcctgggccgacagtacccatattagttttctagggctgccgtaagaaatggccacaaactgggtggccgaaaacaacagaaacggattctcccgtggttctggaagctacaagtctggaatccagctgtcagcagggttggttcctactggaggctctgtgggagaatctgttccatgcctctctcgtagctccaggtggtttctggcaatccctggcactctctgtctcatagagacaccgctccaatctctgcctccttcttcgtggggtcatcttcccagtgtgtctgcctctctctcttatgaggacactagtcacatttgattagcgcccaccccaatctagtatgaccttaacttgattacatcggcaaagaccctatttccaaatcaggtcacattcccaggcacccaggtgttaggacttgaacatacctttttgggggacacaattcaacccacaacggttaccccaacggatgtgtggattcgtgggagcctggggttgagatgcagtctccacaaaagttcctgagtgagagcatgtcctttgcaggagcgtggatggagctggaggccattatccttagcaaactgacgcaggaacagacaaccaaataccacatgttctcacttataagtgggagctaaatgatgagaacacacggatacatagaggggaatgaaacacactggggccttttgcagggcggaggttgggaggagggagagtatgaggaaaaatagctcatgggtgctaggcttaatacctaggtgataaaataatctgtacagcaaacccccatgacacaagtttactcatataacaaacctgcacatgtacacctgagctcttaaaataaaaagagcgatgtattaatataacaactttaggagcactgggggaaaaaaagttcttaatgacactgagcagtgcacataaaaactaagcacacccagggcaggaaagagaccatgagactaagagttcagatgctggaggctgggtgcagtgactcacacctgtaatcccagcactttgggaggccgaggtgggcagatcacaaggtcaggagttctagaccagcctggccaatatggtgaaaccccgtctctactaaaaatacaaaaattagccgggcgtggtagtgggcgcctgtactcccagctactcgggaggctgaggcaggagaatcacttgaacctgggaggtggaggttgcagtgagccgagatggcaccattgcactccagcctgggtgacagagagagactcaaaacagatgctggagcaccacacagatgacagaacaactgaactttaaaaacttaaaaaaaaaaaaaaaggcttgtgaatatccacagggaatagggaatatatatatccaaaaagtaaaagctgtctaactttttatttctttgtttgtttgtttatttatttgagacagggtctcactctgtcacccaggctggagtgtagtggcacgatcacagctcattgcagcctcaacctcccgggctcaagcgatcctcccgcctcagcctcccgagtagccgggactacaggcgcgtgccatcacgcccggctaattttttattttttcgtggagatggggtttcgctatgttgtccaggctgctctcgaactcctgggctcaagccatcctcccaccttggcctgccaaagtgctgggattacaggcgtgatgaactcaatttatttttctctttctaaaaaatacccatttgctttctctgtcccctgaaaagccttcaaagcaatgctaatgccattgcagctggcaccaagactatggactgaagtgctccctctggaggtaaatctgagacatgaccacagcgtttgtcaggaggacactgctgccaaccaatttgagttgccattggctacgaatggagcatcagaaggaataatggcycttcctgccggctgctctgctggtcttccttcctgcctctcttcctcggtcctgtccttctccccctcttcttccaaaagcccctgggattgggggcccactcaaggaaagcgtggagggcagctggggaccagtgtgaagcacgatcctccsctgagcgcagcagtgtcctgcacaaggaagttttgtggagtaaggaagggagtcggcgagggtgactgtgtcctggggaggggtcaggggtccaagagaggaacgtgtgccaagttgggtggtgacctgatgggctcagatggttgactggctttgcagtaaatatatgaatgatgtagggacctggctttctcaccgtttggaaaaggagttgcagatatgaaaagagagaaggcttgaatgtggattcgatttggagttgttggtgtgaattcattgatctagtttggatgtttgtccccacccacatctgatgttaacttgtaatccccagggctggaggtggggcctggtagggggtgtttgggtcatgggggtggatccctcatgaatggcttggtgctgtcttcgtgatagtgagttctcgagagatcttgtcattttaaagtgggtggcattccccccgccccgacacacacactctctctctctctctctctctctctctctcgcttgctcctgctttcgccatgagatacacaagctcttgctttgcctcccaccacaagtagaagcttcccgaggcctctctagaagctgggcagatgccagcactaggcgtcctgcagagcctgcagaaccaagagcccattaaacctcttttctgtataaattacccagtctcaggtatttctttatagcggtgcaagagtggcctgatacactgatggctttcaatatacagataggtatagaaataagcatagctgtaaaatagggctgtgtgtatgggtatttctcagctccatcacttagaaggcctgggaccatctcaatagcagtgagttgacttagtgcctgggtctcgatttctaaacaaccgtcttgattaaaaagaacagagctcactagagaaatgactgattccagggctagggcagagaaagtccaagattaactggatcatcttgttgtcccagaaaaataaggaagtgcttaaagagcaacggagacacatttagctggactaagacagagagagcgaggactaaaatcagaaatgaaagtagccacattactactgaccttacagaaataaaaatatgcatgagagcacggaaacgtatgacttcctttacttcattctcctcctttacttctgagttggtcaagaattagaagcaagagtttgggaacactttgctaaaggggtttctattcactgttgcagatatagctaagctatagatatagatatagatgatagatagatatagatatagatatagatagacagatatatagagagagaccaggtctcactttgtcacccaagctggagtgcagtggcatgaacatggcttattgcagccttgacttcctgggctcaatgccatcttcccacgtcagcctccagagtagctgggaccacaggcgtgcgccaccgcgcctggcaaattttacaattttttgtagagagtgggtacagccatgttgcccaggctgctctcaaactcttgggctcaagcaatctgcccagctcggtctcccagagtgttgggattacaggcataagccaccatgcccggccaattgcagcaataatattcttttgcaaaaaatttgttcatcgttggtaccgaagagctgttgaacatcctattattgcacaggaggcatttatcgtggtacaggccagggttttctgccccaatcagggtctgatgttaygaggtacgtggagagatgggtaaccttaacagtgtcacctttttcttacttttccccaacaactcatctcatttattcatgtttgtgttttgcagacaattggaaataacacgtcacagttacaagcaccattacatatgatggtggtatttctgatcctagacaaagaccacttgagttcattacaacccctatcagccatggtactttgggccagtcactcagcctctcttagttttagcttccacgtctatgaataggatgacaataatattctgcatgcttgctctgaggatggaaaagataatttccctttttttagagtcaaggtctcgctctgtcgcccaggctggcaggagtgcagtagtgcaatcacagctcactggagcctcgacctcctgggctcaagtgatcctcccacctcagcctcccgagtagctgggaccacaggcatgagccaccatgcctggtgggaaagacagtttttataatgacttttatcccttttattttttgacaaaaccatgtttttgttcactacttcaaggtgaatgatgtcctcccagttccaaatctagtgtctgatttgagggctagctagccactggatcaacattggaggaaaaacagctgttctctgatttgatcttatgcttaagcagatttgctggaagcttgcacacctgttatctttgaaaaaataaattggttattggttaattttttccccaaaccgtgatacaatgagttatgattatagcatgacatacgtgtacacctcaaaatcattgtgtagtacaaatcgcaaaacttataggaaaaatggggttagggacacaatactcaaaacctttgtcagtgacacataaaaaaacgaagataggaacctaatgaaaatggtagcacaattctatgcatgttaaatggttaaaaaatacctaagtgctgcagcaagtacggcacttcaccttgaaaaagacctgaagtttgcttgtggaaatggcggtggaagggttgcaggtcatgaattggtgaaaggagggtgttctgaaattggacagaaagttgtaacaccagatgcggactagtgtggcttataatacgtgtgctgagccgagggagtggartaaggtgggaatcccctgggaatttaagtgaacactgatcaaaatgtttgtttcaaaccaattctcttgtattcattacgttggcatttaggaatgaagtgatgtttccatgacctatgttgattgaaagaccaaagattttgtacctgttgagtctatgtctttacagtgcagtaaatttgtacttctgagtttaaagattaggtcaacaattgggtatttagcaaggcactctgggaaacagaaaaactrtaagacagtctctgcctccgggcgaccaactactttttaaaaattcaactggagtctatataaaagaggaaatgaaggcggcctggtgcagtgtggctcacgcctgtaatccctacactttgggaagctgaggcgggaggactgcttgtgtccaggagtttgagaccagcccgggcaacatagtcagacgccatctctacaaacaattttaaaaaatgagtcgggcgtggaggtgtgcacctgtagtcccagctacttaggaggctgaggtgggaagatggattgagcatgggaagtcgaggctgcagtgagctgtgattgcaccgctgcactctgacctgggtgacagagtgagaccttgtctccaaaaaaaacaacaacaaaaagaagaaatgaaaatctagaaaaatacgtgaaatcttttcctgtcaaatgtttccccctaagctttaatgatcctatttcattaaaggaaatatgggagaatattgatgactggcagcacgtagtggttaagagcaccggactgggagctggaagagtctgtgattcttgaactcctgggctcaagcgatcctcccacctggatctcccaaagtactgggactacaggcatgagccaacatgcatggccgagtctgtgattctttactggaatggagtgacgtgtgttttcttcttaaatgacatcgtgaatttccaaggtccttgaaatctctttgcatctctttccaatttgccattgctatgcctgaagttcagttggaatgcttatatttcagcttatcacattacctatattctgatcaaatatgttatggcatcgaagctaattttgagacatggtccctaggccgtgggacctaatgaccagagatggaagtctatgtgctgcttctgtcccaagggagatgagtatctgttaggggctcactcgggactgtgtggtgctacctgagtgcgacacagatgctggagacttgagaagatatcactgtagactccaaccctgttatagctgatgaggaaaaaactgagagtatttattattgcccccacaaaatgcacatattttattatattgataagatgtgaacaatatgttattcctcaatattctgcaggttgccttttcattttgttgattgttactgaattcttctacccccaaaaaggattacatgagaagattgtgaacaattgtttgccaacaaattagataacctagatgaagtggacaaattcctagaaatgtacaaaccatgaaaactgactcaggaagaaatagatttcatttccttcagatctatacccagaagtgggagagctggatcatatggtagttctatttttaattttttgagggtcattcacaggcctggaggctgaagagggaagaatggttttttggacccagcccagagccctgctggcctgagcaccctcgggacactgctatctgcgccccagctgctccagctccagccatggctacaagggccccagatacgcctccggctgctgctctggagggtgcaagctgtaagccttggtggcttccatgtggtgttaagcctgcgggtatgcagagggcaaaagttgaggcttgggaacctctgcctagattcagaggatgtatggaaacgcctgaatgtccaggcagaagtctgctgcaggggcggagccctcctggggaacctctactagcgtagtgcagaagggaaatctggggttggagtccccactggggcactgcctagtggagctgtgagaagggggccaccatcctcaagacccccgaatcatagatccactgacaactcgcattatactcctggaaaagctgcagacattcaataccagcccaggaaagcagccgagggggctgtaccctgcagagccacaggagcggagctgcccaaggcctcaggagcccaccccttgcctcagtgtggcctggatgtaagacatggagccaaaggagattattttggagctttaagaattaatgacgattttctgctccgcccgcccacagatgtagtttcctccgcacgtgcgcaccttccctcctccccgcctgcagggtccatggcctccatggcgttttaggggcagcagtgcctgtggcagccttggcctttgcagcggtggcagcagcaccaggctctgcagtggcatccaccggcggcttaagccrtagcacttctcacagcattcagcagcagcattgctgtaaccgacaaagacaccttcgaattaagcacattcgttgattccagcaaagcactgcaccatgaccgagatgagcttcctgagcagcgaggtgttggtgggggcttgatgtccccccttgaccagtcagrtttggggactgaagaaagcctaggtctcttagatgactacctggaggtggccaagcacttcaaacctcatgggttctccagcgacaaggctaaggcagactcctccgagtggctggctgtggatgggttggtcagtgcctccaacgatggcaaggaggatgctttctttgggacagattggatgttggagaaaactgatctgaaggagttcgactttgatgccctgttgggtatagatgacctggaaaccatgccagacgagcttctggccacgttggatgactcgtgtgatctctttgcccccctagtccaggagactattaaggagcccccccagtccaggagactattaaggagccccccccagatggtgaacccgatttgccatctcccagaaagtttaacccgaccaggttgcccccttcaccttcttgcaacctcttcccctttccccaggggtccagtcctccactccagattattcctttagtctagagctgggcagtgaagtggatatctttgaaggagctaggaagccagactccactgcttacatttccaagatccctcactgcacaaaggaggaagacgccccctcagataatgatagtggcatctgtatgagcccagagtcctatctgggctctccctctacctccaggggctctccgagtaggagcccgccatctccaggtgtcctctgtggctctgcctgccccaaaccttatgaccctcctggagagaagatggtagcagcacaagtaaagggtgagaaactggataagaagctgaaaaaaaaatggagcaaaaccaaacagcaggaactaggtatcgccagaagaagagggtggagcaggaggtcctcactggtgagtgcaaagcggtggaaaagaagaacgaggctctgcaagagagggcggattccctggccgaggagatccagtacatgaaagattcgatagaagaggtctgcaaggcaagggggaagaaaagggtcctctagttgagggtagtcaggagcgtcaatgtgcttgtacataggagtctcgcgctgtagctgtgtgttcgaataaattattttgtagtggaaaaaaaaaaaaaaaagaattaatgactgtcctgttgggttttggacttgcatggggcctgtagcccctttgttttggccgatgtcccccttttggaaagggagtatttacccaatgcctgtacctcaattttatcttggaagtagctaacttgttttagattttacaggctcataggcagaagggacttgccttgtctcagttgagactttggactgtggatttttgagttaatgctgaaatgggttaagacttgggggactgttgagaggagattattgtattttgcaatgtgagaagtacatgagatttgggagggggcaggggtggaatgatatgatttggatttgtgtccccacccaaatctcatgttgaattgtaatccctagtgttggaggaggggactggtgggaggcgattggatcatgggggtcgatttcccccttgctattctcgtgatgttgagctctcacaagatgtggttgtttaaaagtgtatagcacctcccccttcactttctctttctccttctctggccatataagatgtgcctccttcctctttgccttccgctatgattgtaactttcctgaggcctccccagccatgcttcctgtagagcctgcagaactgtgagtcaattaaacctcttttctttataaattactcagtcttaggtagtcctttatagcaatgcgagaacggattagtaccgtcaatattgatgagaatgttgagctatgtgtatgtacgctgacacattatggtggaagcgaaaattggctcaaaccacttgggaaaacatggcattatctagtaaatttcgagatatgtattggctgtgatacagcaattccaaaaaaaaacttggacatgtgcttcaagagacctgtacaagcatgttcatagccaagggctggaaactatccaaatgcctgcccatcatcagcagaatggataaattagaggactataaaactctgccgtaatgtaataggtagtttccaagaaatccaatcacatacaatgtgaaaatgtgttactgtggggttaatgaaatgaatgaggcaagcccgctggaccatccaaatctgtcctgctcccggctggagtttgatgccatctagtggcagacgttgctctggctgaaatattgatggagatttccggtccagtggctggctgagacttccaggacagtggcagtatctccaggaatctctcaatcagttaggacttcctttcttgacttgatctgaggataataggccgggaaaataatggggacccggagaccctccctctgtcttcctgcttcctaagacagggtcacatgcactttactctcccttccctgacctgttgaaggtaagaactttagcctgcctctgtctgagaatggggagactgagcagaggacgacaggaaggatggcaatcactaaccgggttatgtctgattttcagctattccaggtgttaacaagttgtgttctctggtttttaaaattcatcatttaatgaaatatatgtaatgaaatacagcagtgaaaataataaactggaggtacacgcaagagcttgggtgaatttttcttttctgtaagtaaaaacatttttaactgatgtatgataactctgcatatttatgggatacatgtgatattctgatacatgcacacgcacacacgatgtaatgatcaagtcggggtatttaggatctccaccacctcaagcatttatcatttctttttttggggaacatttcctatcttttagctattttgaaatatacaataaataattacctatagtccctctacggtgctatcaaacactagaacttaatccttctatgcaactatatgtttgtccccattaacctccccaccctccccacctttcccagcgtctggtaaccatcattctgctctacctccaaaagatcaacgtttttagtttccacatgagtgccaatatgcttttcccaggtgcagaggctgctgattcctggatttggaaggtgggggagagtggtttggatttcagtacctcccccttcctcagggctaggccctgtctggtcacctcctgttgctacaggtgtgcctggcacagacattcagctcccggggccgtgccgccctcacccctgcatgcctctagaggtacctgtcccgtggatttgacccccttccagacacacaaatagatcaccactgagcagacacagggtcacctcccagctccctaccaggcaagagcgaccagggcagggactgatactgccgaacccaggagccaggcccgacccagcctcaggtccagcaggtcccgcctgtccacctgggccaggcctagagcccgggagcccctggctggtgggaggccacccgcaacccaccccacacgcagctccagctcccccaccaggcggggcgactaggacagggacagaacccgttgaacccaggagtgagatccggccccgggtcccgctgggccctcccgtccaccttggctggacctggcgcctgggagaccttggctggcgcgaggccacgcccaccagacatgcagttccagctaccccaccagctgggcgaccaggacagggacggaggctgctgagcccagttagaggcctgccccccggggtctgtcctgggcgctcccccaaggacggacagggcaggcagggtccgggacgatggccgcacagtcccggccccgtgttcccaggcccgtcttgctcctcgatgtgagggagacccgggggatgggacaggctgggccccgcagtgcctgactccctgcagggctcccgggacaggggtccggcggacagccggctgctcaggggtgaggggtccaagctggcattgcggccaccttccggcccgggctctcttggggaggggcggggttggtgagaaccggtcacgtgctccggggctcactcggggtctcccagggccggaagtagggcccctgtgcgcaggcgccctgaggatcccgggctgcccatctcacgccagggggcggaacttcctgcagcctctctgcctccgcatcctcgtgggccctgaccttctctctgagagccgggcagaggctccggagccatgcaggccgaaggccggggcacagggggttcgacgggcgatgctgatggcccaggaggccctggcattcctgatggcccagggggcaatgctggcggcccaggagaggcgggtgccacgggcggcagaagtccccggggcgcaggggcagcaagggcctnnnnnnnnnnnnnnnnnnnnnnnnnnnnnnnnnnnnnnnnnnnnnnnnnnnnnnnnnnnnnnnnnnnnnnnnnnnnnnnnnnnnnnnnnnnnnnnnnnnnnnnnnnnnnnnnnnnnnnnnnnnnnnnnnnnnnnnnnnnnnnnnnnnnnnnnnnnnnnnnnnnnnnnnnnnnnnnnnnnnnnnnnnnnnnnnnnnnnnnnnnnnnnnnnnnnnnnnnnnnnnnnnnnnnnnnnnnnnnnnnnnnnnnnnnnnnnnnnnnnnnnnnnnnnnnnnnnnnnnnnnnnnnnnnnnnnnnnnnnnnnnnnnnnnnnnnnnnnnnnnnnnnnnnnnnnnnnnnnnnnnnnnnnnnnnnnnnnnnnnnnnnnnnnnnnnnnnnnnnnnnnnnnnnnnnnnnnnnnnnnnnnnnnnnnnnnnnnnnnnnnnnnnnnnnnnnnnnnnnnnnnnnnnnnnnnnnnnnnnnnnnnnnnnnnnnnnnnnnnnnnnnnnnnnnnnnnnnnnnnnnnnnnnnnnnnnnnnnnnnnnnnnnnnnnnnnnnnnnnnnnnnnnnnnnnnnnnnnnnnnnnnnnnnnnnnnnnnnnnnnnnnnnnnnnnnnnnnnnnnnnnnnnnnnnnnnnnnnnnnnnnnnnnnnnnnnnnnnnnnnnnnnnnnnnnnnnnnnnnnnnnnnnnnnnnnnnnnnnnnnnnnnnnnnnnnnnnnnnnnnnnnnnnnnnnnnnnnnnnnnnnnnnnnnnnnnnnnnnnnnnnnnnnnnnnnnnnnnnnnnnnnnnnnnnnnnnnnnnnnnnnnnnnnnnnnnnnnnnnnnnnnnnnnnnnnnnnnnnnnnnnnnnnnnnnnnnnnnnnnnnnnnnnnnnnnnnnnnnnnnnnnnnnnnnnnnnnnnnnnnnnnnnnnnnnnnnnnnnnnnnnnnnnnnnnnnnnnnnnnnnnnnnnnnnnnnnnnnnnnnnnnnnnnnnnnnnnnnnnnnnnnnnnnnnnnnnnnnnnnnnnnnnnnnnnnnnnnnnnnnnnnnnnnnnnnnnnnnnnnnnnnnnnnnnnnnnnnnnnnnnnnnnnnnnnnnnnnnnnnnnnnnnnnnnnnnnnnnnnnnnnnnnnnnnnnnnnnnnnnnnnnnnnnnnnnnnnnnnnnnnnnnnnnnnnnnnnnnnnnnnnnnnnnnnnnnnnnnnnnnnnnnnnnnnnnnnnnnnnnnnnnnnnnnnnnnnnnnnnnnnnnnnnnnnnnnnnnnnnnnnnnnnnnnnnnnnnnnnnnnnnnnnnnnnnnnnnnnnnnnnnnnnnnnnnnnnnnnnnnnnnnnnnnnnnnnnnnnnnnnnnnnnnnnnnnnnnnnnnnnnnnnnnnnnnnnnnnnnnnnnnnnnnnnnnnnnnnnnnnnnnnnnnnnnnnnnnnnnnnnnnnnnnnnnnnnnnnnnnnnnnnnnnnnnnnnnnnnnnnnnnnnnnnnnnnnnnnnnnnnnnnnnnnnnnnnnnnnnnnnnnnnnnnnnnnnnnnnnnnnnnnnnnnnnnnnnnnnnnnnnnnnnnnnnnnnnnnnnnnnnnnnnnnnnnnnnnnnnnnnnnnnnnnnnnnnnnnnnnnnnnnnnnnnnnnnnnnnnnnnnnnnnnnnnnnnnnnnnnnnnnnnnnnnnnnnnnnnnnnnnnnnnnnnnnnnnnnnnnnnnnnnnnnnnnnnnnnnnnnnnnnnnnnnnnnnnnnnnnnnnnnnnnnnnnnnnnnnnnnnnnnnnnnnnnnnnnnnnnnnnnnnnnnnnnnnnnnnnnnnnnnnnnnnnnnnnnnnnnnnnnnnnnnnnnnnnnnnnnnnnnnnnnnnnnnnnnnnnnnnnnnnnnnnnnnnnnnnnnnnnnnnnnnnnnnnnnnnnnnnnnnnnnnnnnnnnnnnnnnnnnnnnnnnnnnnnnnnnnnnnnnnnnnnnnnnnnnnnnnnnnnnnnnnnnnnnnnnnnnnnnnnnnnnnnnnnnnnnnnnnnnnnnnnnnnnnnnnnnnnnnnnnnnnnnnnnnnnnnnnnnnnnnnnnnnnnnnnnnnnnnnnnnnnnnnnnnnnnnnnnnnnnnnnnnnnnnnnnnnnnnnnnnnnnnnnnnnnnnnnnnnnnnnnnnnnnnnnnnnnnnnnnnnnnnnnnnnnnnnnnnnnnnnnnnnnnnnnnnnnnnnnnnnnnnnnnnnnnnnnnnnnnnnnnnnnnnnnnnnnnnnnnnnnnnnnnnnnnnnnnnnnnnnnnnnnnnnnnnnnnnnnnnnnnnnnnnnnnnnnnnnnnnnnnnnnnnnnnnnnnnnnnnnnnnnnnnnnnnnnnnnnnnnnnnnnnnnnnnnnnnnnnnnnnnnnnnnnnnnnnnnnnnnnnnnnnnnnnnnnnnnnnnnnnnnnnnnnnnnnnnnnnnnnnnnnnnnnnnnnnnnnnnnnnnnnnnnnnnnnnnnnnnnnnnnnnnnnnnnnnnnnnnnnnnnnnnnnnnnnnnnnnnnnnnnnnnnnnnnnnnnnnnnnnnnnnnnnnnnnnnnnnnnnnnnnnnnnnnnnnnnnnnnnnnnnnnnnnnnnnnnnnnnnnnnnnnnnnnnnnnnnnnnnnnnnnnnnnnnnnnnnnnnnnnnnnnnnnnnnnnnnnnnnnnnnnnnnnnnnnnnnnnnnnnnnnnnnnnnnnnnnnnnnnnnnnnnnnnnnnnnnnnnnn

SEQ ID NO: 96453 - DNA, 30052 bp, Homo sapiens
  misc_feature (1)...(30052): n = A,T,C or G
agcatgtggtgtccctgtctggacttgcctggccccaggagtgcggccaccacagaaatcagggtatagggctgtggagccaggctgggatcctgcccagcatgccctgggaggagggctgatggctactggccttgctgatggtggcccccctggccagcacgccatctgacaggttccttgcagctaaaggtcttgctgggccacccaggtgtgactcactcaggccctgcagacagagccgctgcctgtgagttacttgcagtggagacctgagtcaagaggtgtccagccctgcttggggtcctgggagaccatgggtccaggcagtccagcccagcatgagactgtaactccccatcccagagtgaggagggggctgccaggcctggcctggtctggccggggggctgtctgcagtgtgagttggggcaggatgcaggccgagtagaaacccgtggggtgggtacccagctcctgggcaggggcctgtgaaggggctcccagggcccaggcagttctggaattacctccgaagttgtgtatatctttttttttttttttaactttgaaaacaatgggatgagactgggcacagtggctcacgcctgtaatcccagcactttgggaggccgaggtgggcagatcacctgaggtcaggagttcgagaccagcctggccaacatggcaaaaccccatctctactaaaagtacaaaaattagctgggcgtggtggtgggcgcctgtagtcccagctacttgtgaggctgaggcaggagaatcgcttgaacctgggaggtggaggttgcagtgagctgagtttgtgccactgcactccagcctgggtgacagcgagactcgtctcaaaaaaaaaaaaaagaaaaaaatcatgggataaaaatactggaaagtgcaaaacagatgagaagatataccacaacaggccctgtgtggcgtagcaagcgccagcccaaagccatgcccgcgtcccgggccgctctcctccctcctatcgagggcacgtccgtcctcctgtgtgcccccctccccctctgctttctcattcttcacgtgagccagctcctggttcccacacgctccctttgccacatgctgactttaagcctggaggtgggatgtcagccgtaggttgaggggtgctgtgtctccgtgggtgacaggagttggtttttgtttgtgcgcagcaccccgtggtgggactgtcacctggtatcagtatctgtccgcgatggctgggggtcaggtctcagccacctgaaggacagagctgctgggaacagtttttactggggtgtgcgccaactaggatggccgggtctcggggggaatgtgaggagttggcgtcttcctgagggtctctgcagcttacaccccctgcaccccccaactcgcactggggttgtttcctgctttttccaagcaaggtcgtgccctcagaagggttgggccacccacccctgcctcactgcatctagggacctgcctcaaccccctgcggctggctcccggattgtccagacccccaggcccagcaggcgggaggctgcagaggtcagccttgggctgcagccccaggaggcccatacacaatgggcggctgcaggtggttccccagggccagagggtggcccttccttcttagggtggagccggcatcccttcccttttgggagctgtccaggagccccgcctgggggtgcagagtggttctgtccagccacagctgtggcttttgccactttccggagccagctctggaggtgtgaactaggtcagtgcctgctcaccaggcccagcccaggatcaccagacaagagtagggctggcagagggtgggagcctggatcctattaagtaaagcaccttagcaccccaggggtggggcagcctcctacgtgcccagacacccgtgccaggctgcctgggacacctggctctggccggccgtgggtgcgtgtgtgcagggtgtgggggccggcctgcctggggagtgctgtcccaggtccctcaggcatgctgcctggagacagtggggtgttgatattgctgtctttttgaagtgttctgagcctcagatgcatgtgttgggacttttcagggacagccctgtggaatggtcagcagccgttccctgtttcctccctttaaataggcggcaagttgggacccacctcccggggtgggggtgatggtgcagggagcctggtgtgtttgattagggcatgggcggtgtggccacaactgtgtgtgtcaccacgggacggacccccggaccctgtcttgggaggcgagctgctctgcctggggtggccggtttcctcccctggagcccagggaggcagttgtggccctttctggtgtcttaactgggtgacttgattctgggagcttgcccggtccccactgcccagggtagcttgtgaaaaccaaatgtagctgcgaggcagacgtggagcccgatgccctgtgtgggttctgcaaggcagagctggagcccgatgccctgtgtgggttctgggtgggcccaggggaggtcagctgtggccggtgaggctgtgctctcacctgacccccctcaagagccctagagagagtcgctgcctgtgggaagggtggacaggcccagctgggggcccccgtcggggggtgttgtggcgcagggcctgggcctgcagctgccctggaggagctcccccagccctggcagaggtggtcctgggcttgtttgtcctcacttctcatccctgactctgccagggttggagacagcaaggctaggtccttccggggacacagagggtgactggcttggcattggcactgggcagagtgaggacaggactccagcccacctgcttgggctgtgctgccatttcccagcctgggcacgcctcccaacctctggggcctcagtgtgctcgtatgggaagtgggctggttatggcctgctgcctgggctcctgcagggctggtgtagttcaacttcacaggaggctctcggaggcacgggaaaggccctggtgtgccccgatgcccagctcagggagttggatgcccacagccctgagggcctgtctgaagctgtcatctgtcccaggggagttgggaagacccgaatgcctgtggtgaggtggatgcccccaccctaccctgcagccccacccccagtggccttgagtcacctgctggagaggaccttttaggagagaggctgagcatgggccaggccttggtttctgcaagggaccatttgaagtgcagggaagaggctggaggtgcttcggtcccacagccccctgcccactccctcctgggagctggtgccccctgaggttttggggacagaggagggctgccagcacagtggggagggcagaggggtctctaggaaggtgacctagggggtgacatctgtgactctggggcaaggccaggggtctagatgtgtcagtagcgaggtgggttccagcacccatgaggccagtgttgctggagggatggcagggccaggtgccctgggtaggggtgttggggaccctggctagagtgtgggcagcagatggggtgggggaagagcctccttgccagggtcctgtgggccagtcactggtgccacaggggtctccctggtgggcctctgcctttcttctttttgagacaggtgtcattccgtcacccatcctggagtgcagtggcacgatctcccggctcactgtagctgtggcctcctgggcctaagccaccctcccacctcagtcctgagtagctgggactacaggcgtgcactgtcacacctggataatttttgtatttttttgtagagatggggttttgccatgttgcccaggctggtctcaaactcctgggctcaggcgatcctcttggcttggcctcccaacatgctgggatgacgggcatgagccaccgtacccggccaggcctttgcctttctaggggtgagaggtggctgccttagtgtttgggggtgggaggaggctacagggcttcagttagcaccccctgcccagagggagctcctgtcccacacagcccggtcctgggtgagtggctgggggatggggtgctgggctcctgctctgcacacatgggtgttcccccaggatacctctgactttgacacatccctgcttgtcctggctttgctggtgggtttggagctctgatgagcaggtcaggtcttagggaacccctggctctgggatccagggcaggtggcccccagagaggagaggagaaatgtgggcacctatgggcactcactggaggggctgtggggagggtaatggtgggcccaggtcagggagtgggcatggccgtcctgaagttatttctgagtctagcttcatctccccctccttcctgggttctgcccggagctgtccctgcagtcccccttgccccatcctgtgctctgtggattgtttctccccacagctgctgggagccctgggctccccacgtgctcttcctgggcaggcaggtgaggccaggcggggcttggggtgcacaggctgtgggtggggtgggctgaggcctgcctcatggataggtcccaccttctctaggctgtgcctgggtttctgggtctccctctgggccggccctgcagtgtctgtggatcctggggttgctgcctgagcaccatcggccttagcctccctaaaggcaccctctcctgagcctgtccccactcagcatcctcgtccagcccatagctcctctgcgggggcagctctgggacacgggcttctcacgtttatgaagcaggcatcacccagtggctttgcggctgtcccccccaccaggggtgccttctgattggttggggcctcctgggactgggggctgagcaggggtcctgtgtgggacgcggctcctgaggcgctgaggggtgttcctcctgcagaccccctccagacacggctcccctttgctttgagagagcctgggctcgctcaggggtagaagtgggatggccctacaacaggtgtggactcgcttccctgtaagcacctagagcatgtggatgtgtacagggcagagggagggggctttgtgtggaaagggcttcctcctcctgttctgaggcctagagtcaggtgtgtggggcccttgctcctccagcccagcctgcctggtttgatgtggcttcctgggcctcactctccttgtctgtgaaacgggggtgatgaggactcgtccctgtggctgcggggagtgagtggtgggctacagggaggctcccagtcccaggtgagggtgtacgcatgctggccgttggggtgtgtgctgtgtctgcaccggtggcttactctgagtttcatgggggcaggaaagggcggggtactggtggcacccccggtcaggtctgtgtctgagctgagggctgagcagctgctggtcaggtcttgttggcccagcagcggagggggtggctgagacgcctctgaccgaaggcattggggcgagggatggcagcctgagctgcagccaggttgggtagggcagctggaggccgcaggcctctgcgtcaacctggcagcgccaacctgcaatctgttggcgtcttttttttttttgagatggagtctcactctctcgcccaggctggagtgcagtggcacagtctcggctcactgcagccttctcctcccgggttcaagtgattttcctgccttagcctcctaagtagctgggattacaggcacgcaccaccacgcctggctaattttagtattttaatagagacggtttcaccatgttggtcaggctggtctcgaactgctgacctcatgatccacccgccttggcctcccaaagtgttgggattacaggtgtgagccactgcacctgtttaagttttgtatttttagtagagacggggtttcaccatgttggccaggcaggtctcaaactgctgaccttgtgatccacccaccttggcctcccacagtgctgggattacaggtgtgagccactgcgaccagccctgttggcgtctttgatcctgggctgaggagctgagaagyttctatggcctgagggtcacacacacctgcccacacacctggccttcacccttcctgctagggggtatgtcctctgccaggagctgttgctcgtatggggggaccaggggcctttgccttgatcagatggagacctggctggccacaaaacagaacacacccacctacaaagcacgtggcccagagatgtcctcgtctcccggccgctggctgaccagctaagtcctggcactgcagggcctgcccaggccgaattggggctgagccagactccctgcagtggggcccggtggcactgggacctctcacagcctcttttctgtcttgcaggaaatggctaattctgtctacctggttatggaggtgagtgccttgtggtgccaggacaagtgcaggctgatggccatggccctgggagccccacagggagggacatggctggggggagggtgatgagcaccttttcttttnnnnnnnnnnnnnnnnnnnntggagtctcactgtcgcccaggctggagtgcagtgctgcgatctcagcttactgcaacctccacctccgggttcaagcaatcctcctgcctcagcctcccgagtagctgggagtaattacaggtgtgtgccaccacgcccggctaatttttatacttttagtagagatggggtttcgccacgttggccaggctggtcttgaacctcctgacttcaagcgatctgcccaccttggcctcccaaagtgctcggattacaggcgtgagctgccacgcctgctgagtatcactattgatgtcttccagcagggactgtggggacacctgccctgggctgggcaggtgcctgcgggctcagggagtagtgtccaagtgtgaggggtggggaggctgggcagggctgggaggtgggccctgggccctgctgcagcctgatgcgtgtctggtctcttgcagtactgcaacggtggggacctggccgactacctgcacggtgagtgcacagctgcgccacctgggctgccagccggtcccacagggcccgcacccagggccacactggcccagtctgggaggcagcctggctcgagtgggtccttggctcattgtgagattggctctttcttgtccccctgggcctcttgaggggatgcagggagctgagctgctcccggctgttaaggatgcagtccctccgctggcctcccccttgcttgaggagacagctgtgaccagaatagcccgaggggagccgcacaaaccaggggtgggggctgttgtcttcatagtgtggctggaaggcggctcttggcccacccaaagttgagccctgtggcggatgggaggggatgtgctgcacggggcggggcggggcagagggaaggacagcaggggggcggccgcgcccgtctgttcccaggctctctgggtgggggtccgggccacagtgccggcgggcgcgggggtgggtggggcgccggcggcctcttgggggtgtcctgagggtctggaggtggctctgggacagttccggggacttgggcctgagcacccgggagccggcaggactgctcaaacgccggctcagacccgcgtcgccctcatagcgctggggcgggagtgcggggctggtagatggacaggacccgctggccccctcgcctcrccccacgcgaggaggaccccacggaccaagcctgggagacagacgctgaggccgcgcgtagctgagactggggctgcgggtcgggtcgggctgtgcgcggctggcacctgtctggatgccgggaagaggggcaggagcgggacccgggcggaaccgcggtggcactgaggctgggcttcggcggcctcccgtctctggagcagctgcagcccggggctgagtggtggggccggcgcgccgggctctgcgcaggagcttcaggtgcgccctggtctcggcggcccgtggtggcttgtgcccctcctgacccggggtttcctcccggcctgcggccctgcctggcgctctccatccgtgtggcgggaccggcctggctgcgcgggactcacccctgggggaggaaacacggcccccaggccctgagccgcctctccccgcagccatgcgcacgctgagcgaggacaccatcaggctcttcctgcagcagatcgcgggcgccatgcggcttctgcacagcaaaggcatcatccaccgcgacctgaaaccgcagaacatcctgctgtccaaccccgccggccgccgcgccaaccccaacagcatccgcgtcaagatcggtcagcccgcgggcaggcaggcgggcccggcggggaggggctccggggccggcgccggtcctgacgcttctctcccgcagctgacttcggcttcgcgcggtacctccagagcaacatgatggcggccacactctgcggctcccccatgtacatggtgtgtttaccttggccgggctgtgccgggtgggcgcctctctgggcttgctggttggttggctggcgtgtggtgcgctctgctctggttggctgtggcctggcgggcaccttctgtggttggcgtgcgggggcctcacactgacccgacttctggtcccgcaggcccccgaggtcatcatgtcccagcactacgacgggaaggcggacctgtggagcatcggcaccatcgtctaccagtgcctgacggggaaggcgcccttccaggtaactgggcttggccctgctccccacgccgcaccgtcagtgcaagtgtccgccagctgcggtcagacgccccctgcgagccctgcccgcgccccacgagctcccctcgggtcctggctggcggggcgggcgtccaggggtccagtggggaaggggcctcggtgtcccccagggagnnnnnnnnnnnnnnnnnnnnnnnnnnnnnnnnnnnnnnnnnnnnncggcgccgccggcggtgactgggagctgcccccggcaaggcctccctcgcctgtctggtcgcctgtctagtcgcctgtctggtcgcctgcctggtcagaggtgagggcagcgccggggccgagtgggtgagggctgggaggccgcgttctggggggtggacaccccgagagaccgtcggcgccccctccccgcccccatgctcatacctccagcagcaaacagccgcgctagcacccggtttcccccgggcttcgcagcgtctggggcaggggccgactggggacgaacgcaccgagaccccgtgggctggtcccgctcggccgcagccctggcagtcaggctgtccccgtccccgcaggccagcagcccccaggacctgcgcctgttctacgagaagaacaagacgttggtccccacgtaagcaccctcccgccttcccttcccttcccccgcgggctccggcccsgcaggccctgctcacaccagcctcctcttgccccagcatcccccgggagacctcggccccgctgcggcagctgctcctggccctactgcaacgcaaccacaaggaccgcatggacttcggtgagcacccaccaggggcgcagctggagtcccccaccctccttccttgcatttgctgatgtgagcagggcccaccggcttcacacccagccccatgtgcacactgccctttccacaagccaagcgcaggcaggggctccacctccgcccgggcaggtgcccaacgcggctggagctcaggccgtggggaggcaggggcctggggtcagagctggggtcctcctgaggcctcactcctccttcctcctgcagatgagttttttcatcaccctttcctcgatgccagcccctcggtcaggaaatgtgagtttctgtgggtcctggggctccgcatgggccctgcatgcaccccttcctccccgggtttggttagggcactgagtgtggggcagagggagcaggtcttgagctgcggccagctcccagggagggcaggacacccggctccttgctctgctgcagcggggaccccaaggccaggggttcgcatggtgcagcaggcttgcgatggggatggggtgttggaggggctggtgctgccctgtgacagtcatagggtggcccaggagggagcctccctccttcctgctggtcggggtgtagccggaagtggaggggatatggttgagcttgtccagtctgtgggttggctsgagggtgaggaggagacaggaggatggcccagactgacctatgcatgtttatctcagccccacccgtgcctgtgccctcgtacccaagctcggggtccggcagcagctccagcagcagctccacctcccacctggcctccccgccggtgagttgccgccccaggggcttggcagcttctccctccactcagcagtcaggggctccagccckgggcccccgcggggacgtgctgtgacttctgttgtctgtgtgagtcacgaaagacatggatgagttcattctgtcagatgttgaagccccacaaacgggtgacagcccctcccaacacccacagccctcaggtcccagaggccgatagggcggctgtttggtctggtcctgtctttggttttgtgctgacgtggacagaagcagcgtgtggccttggcccactgacacctgcacccctggcctccctcgtgtcttccattggactcaaagcatgagtagggttgcagggtgatggccccacatgatgatggcactccttgtgtgacatgggaggggtctgcagagcacctgagtcggccatgaacccccgtccctctgtccatctgacttggagcctggctctcaggcatggtgttgtggctggtggtgatgagttcatgtctgggctctcctggcctggccccctgctctgtgaccagggaccggtcctctgaccttggttgtctgcctgtatcatggccgaaagctcagatgtggcgaggggagcgtggcagcgccctgctgtagggagctgtggcatccgcagacctgccctggggcacttggggctttagccaccaccgcacggatggtgtgccctgggccttagcatggtgctggcctcagagcagggcccaccggggtggcagcctctccactggacacgccttccatggtacctcgttctcttggctatgccgatggaaaagtgaggtgcagagggcaggtggtgaacaactccccaaaacagggcctcccagagcttctgggagctgagggcttcaacccacccaggctgcatggtgagagtggctcgtcggggggcctgtccctgcgaggtcaaagctggcctttgagtggagtgctctggaagtacagagaaragcggagcayaggaagaaagacgtgcccagcccttctcagccccagcgccccgatctttactggggctctgggccatcccaggagggggaatttgctcccctgagtgtgtaggtccctgagacctgctcaccagcccctccgttgactctcagtccctgggcgagatgcagcagctgcagaagaccctggcctccccggctgacaccgctggcttcctgcacagctcccggractctggtggcagcaaggactcttcctgtgacacagaygacttcgtcatggtccccgygcagtttccaggtcagggggcacgctgggcttggaggtgacgcctcaggtgcggcrgggacagtgcattgcatgtgttggatgcacagtgtgtaacacatttccacttatgggcagttaggatgggcccctgggagccaccggcatcggcccagcttggttggggaggccgtgtctgttaaaaccactcctggaatcaaagccgggtcctcctagtggtcagtaggaggtcggaggccataggcctggtctccttagacagtgctgctcttcggatgggtgggggccgctcacctcatgcccctcccccgccatgtacccctaccttgtttctcagcaactcttgttgcctctacaccctgcaggtgggtttattccttggcttttggggaaccccccgctccataatggccaggggctgcccacgtgtttgttgaatgaaggtgcctaaacttttggagcaggcctggggtctgtggctcctctgaaggccctgcactctgtccctggctgtcccaaagctcctggaggtctgggttggcactggtccccgtgtctgccagggacacaatgactcatgccgagccctccgcctctcscatcagcatggcttctgcgggggtggtgaggcccgagccaagccccagacagacccggggagggccttggtcctttgccagctgtcagggcaacaggaagacggacaccaggggtagggcagagcctccttgggggtgggaacctgggtattcctggagggggttgggcccagacttagggctgtagatgcctgacctcccccgcccatcctggagttagctaaaggctggggggcagggccccaggggtctctggggctgaggagacaggaggcgcagagtccaagcggggataagcgggggcaggtagcgctctggtctcccggagctggcctggggctggcagggaggatgcagcctggactgtaccacccaggctctgccccccgcaaggccgctgtacgagctgaggcccctgcaaggtggagtgtgcgtggggatccagcagagagcctcggtggggtggggtggccctgggcaggcggcaaggactccaggcccagccttgtctccccctgcaggtgacctggtggctgaggcgcccagtgccaaacccccgccagacagcctgatgtgcagtgggtgagcccccatcccttacctctgtattttaggggagagaaactgtggccttggaagtggcccgtgttatttacaatgagccgagatcgcgccactgcactccagcctgggtgacagagcgagactctgtctcaaaaaaaaaaaaagtaaatgccgttggcccgtggtggctcacgcctgtaatcccagcactttgggaggccgaggcggatggatcacaaggtcaggagattgagaccatcctggccaacatggtgaaaccccgtctctactgacaaaaaaaagaaatgcaaaaaattagccaggcgtggtggcacatgcctgtaatcccagctactcgggaggctgaggcaggagaatcgcttgaacccaggaagcagaggttgcagtgagccgagattgcgccactgcactccagcctgggtgacagagtgagactgccccaaaaaaaaaaaaaaaatgcccttggcctcccttctgccccacaggagctcactggtggcctctgcgggcttggagagccacggccggaccccatctccatccccaccctgcagcagctcccccagtccctcagggtaagcagggccccaggctgggtggatggggctgtgaacagtcccccggctggaggttgggcttcctgtgtgtcgcagccagcccaggcctgctgtgtccagaggcccctgccttcttctcccaggcctcgcaggatggggtctgctgggtcgtcctgcagaagggactatagtgggaggagcattgacaggagtaggtgaatgaggaaaccaaccagggacgccagggccagcacagtcctgtagggccaggaatggccagggccccggccagggtggccccccactggctgggtgcagactgggagtccaggtggggtgcaggtgccacatttctggtgtgtgtagaggcatggaagccggctcttttcagacctggcatgggtctcagggtggcctctgccctaactaggaagtctgggcctaggctttcttctggtgccccagctccatgacctcagcctcttgtgaccccagtgtctgtcatgatcctgacctctctccaccacagccgggctggcccgttctccagcagcaggtgcggcgcctctgtccccatcccagtccccacgcaggtgcagaactaccagcgcattgagcgaaacctgcagtcacccacccagttccaaacacctcggtgagtgtggagcccccaggtagccaggcgtggctggggcctkgtgtggcaggagcccttccacggctcccatagagggacagggtcgtcatccatgtgcagttgtgcaggctgcgcactgcgtaactcagcaccaccatttactttgttgatgtcttgggtttctagagttattttgacagttttctgatcagtaaaatctctctagtttataaaatcagtattgactttggccagttttaacagacagaagtaaatggtgggaggaaagggtacctttcttttaactcacagaaggctgtgtgggccagtgggtgtctggcaggggatggagactttagggtgagggtgccttgggttggcrccccgggcaggaaagctaaggggccaactcctcccacacacccactgtgtggccggttacctggacagagtgcattagaggatgagccatctgtcagcactgtagccacttggcgtggcatggggtcctgggctgctggggcctcccctcctaatacctgccttgtccccaggtcctctgccgtccacaggtcaggcagggctgctgaggcctcccctcctaatatctgccttgtcttcaggtcctctgccatccgcaggtcaggcagcaccagccccctgggctttgcaagggccagccyctcgccccctgcccacgctgagcatggaggcgtcctggccaggaagatgtctctgggtggaggccggccctacacgccatctcctcaaggtgcgcctgcaggctggggccygggaaggggcgtctgtaggcagtgggtgaggaggctgtctctgtcccagctggaccctgacagatctctcttttccccaagttggaaccatccctgagcggccaggctggagcgggacgccctccccacagggagctgagatgcggggtggcaggtcccctcgtccaggtgggtgcagtccggaggggggagggggtgctaggctgacctccctcgctcacgttgtcatcctggtctaaagcccttgctctttccaagtgaaaaggagtgggaaggaagctggtggaacagaagccaactgcctctccacctcctggctgtgtgggctggggcaagtttcttatcccctctgtgccagtcttctgtgctggctgagggtcaggtttaagagtggcgcctcagctactcgggaggctgaggcaggagaaccgcttgaacctgggaggcagaggttgcagtgagccgagatcataccaccgcactccagcctgaatgacagggcgagaccccrtctcaacaaaagaaaaagagtggggccttggagtgcgtctaccccaaggggctccgtgtggtagcagtggggcctagggctgggccgccggaccggaaggtcgtgacgaggcgtgtctctctctaggctcctctgcacccgagcactctccccgcacttccgggctgggctgccgcctgcacagcgcccccaacctgtctgacttgcacgtcgtccgccccaagctgcccaaaccccccacggaccccctgggagctgtgttcagcccaccacaggccagccctccccagccgtcccacggcctgcagtcctgccggaacctgcggggctcacccaagctgcccgacttcctgcagcgaaaccccctgccccccatcctgggctcccccaccaaggtaatgggcactgccatgtgtgcaggggcacagagccctggggaagatgtgtgggaatggccagtcctgaacaaagaccgaggaaggcagctctgtaccttttgacccccgcctgggctcatgctcaggctgctcccacatgcctgccagttcctgcggactcggccccttccccaggcaccgggccccagggctgcagacctgcggggcagtcttcaccccatctctgtcctcctaggctgtgccctcctttgacttcccgaagacccccagctcccagaacctgctggccctcctagcccggcagggcgtggtgatgacgccccctcgaaaccggacgctgccygacctctcggaggtgggacccttccatggtcagccgttgggccctggcctgcggccaggcgaggaccccaagggcccctttggccggtgagttgaggggacaggccttggaygggcttctgaggggcagcctctttcccctgcattgttctgctgggtacttctggggggtagaacaggaaaagcccagccttgcccttctgtgggtgcccagtgtggctgggtgccagagagcctggcccacctgtggctggccctagacccccagcaggtccccgtcctgagcctcgccatgcccgcctgtaagctggggtgacaggagcgcctgcctctcgaggtgggccaggagaccgtgcatcatgtgtgtctggcnnnnnnnnnnnnnnnnnnnnnnnnnnnnnnnnnnnnnnnnnnnnnnnnnnnnnnnnnnnnnnnnnnnnnnnnnnnnnnnnnnnnnnnnnnnnnnnnnnnnnnnnnnnnnnnnnnnnnnnnnnnnnnnnnnnnnnnnnnnnnnnnnnnnnnnnnnnnnnnnnnnnnnnnnnnnnnnnnnnnnnnnnnnnnnnnnnnnnnnnnnnnnnnnnnnnnnnnnnnnnnnnnnnnnnnnnnnnnnnnnnnnnnnnnnnnnnnnnnnnnnnnnnnnnnnnnnnnnnnnnnnnnnnnnnnnnnnnnnnnnnnnnnnnnnnnnnnnnnnnnnnnnnnnnnnnnnnnnnnnnnnnnnnnnnnnnnnnnnnnnnnnnnnnnnnnnnnnnnnnnnnnnnnnnnnnnnnnnnnnnnnnnnnnnnnnnnnnnnnnnnnnnnnnnnnnnnnnnnnnnnnnnnnnnnnnnnnnnnnnnnnnnnnnnnnnnnnnnnnnnnnnnnnnnnnnnnnnnnnnnnnnnnnnnnnnnnnnnnnnnnnnnnnnnnnnnnnnnnnnnnnnnnnnnnnnnnnnnnnnnnnnnnnnnnnnnnnnnnnnnnnnnnnnnnnnnnnnnnnnnnnnnnnnnnnnnnnnnnnnnnnnnnnnnnnnnnnnnnnnnnnnnnnnnnnnnnnnnnnnnnnnnnnnnnnnnnnnnnnnnnnnnnnnnnnnnnnnnnnnnnnnnnnnnnnnnnnnnnnnnnnnnnnnnnnnnnnnnnnnnnnnnnnnnnnnnnnnnnnnnnnnnnnnnnnnnnnnnnnnnnnnnnnnnnnnnnnnnnnnnnnnnnnnnnnnnnnnnnnnnnnnnnnnnnnnnnnnnnnnnnnnnnnnnnnnnnnnnnnnnnnnnnnnnnnnnnnnnnnnnnnnnnnnnnnnnttgccctgatgagcacagagccgtgcagacaggcgtgcccctcggttccccatccagtggtgtgtggggatgctctgggcctggggcctggctgggtccccactgcgggttctgcctggggaggggtgggcttgtgggcgtctggtcctggccaggggctgccatcgctggggtcacctgccagccccatagcgaggatgggggactgccttgccctttgaggtccttttgggccttgggcccagctgtggggcacagtagcacaccaagccacgcacctaccccattccagacagtggcagctgccctcctcccaggcagatctgggctgggggtcgggatacccagagggtcccttggtgggcaccgcagcccttggcctgaggtggggagctggggacttgggggttgtggtgagtggcaagaggttgaggagtggctctaggggcctgctgtgcttctcctgttggagcattgggatataacaggtgtaaaccgaggcagaggcacattgggccctggaggtgtgggagtctgtgggggatggatgggggccacggtgtctgctggtcctggtgtgcccctcatcgccctctccctgcagcgggccccactggctctgccagctcttctgcccgccacctggtgcctgggccctgcagcgaggccccagcccctgagctccctgctccaggacacggctgcagctttgccgaccccattgctgcgaacctggagggggctgtgaccttcgaggcccccgacctccctgaggagaccctcatggaggtgagggctggagtgagcaaaggttcccattctggctggagggtgtgtggggtgtgtggggtgtcgggtgtgtggggtatagnnnnnnnnnnnnnnnnnnnnnnnnnnnnnnnnnnnnnnnnnnnnnnnnnnnnnnnnnnnnnnnnnnnnnnnnnnnnnnnnnnnnnnnnnnnnnnnnnnnnnnnnnnnnnnnnnnnnnnnnnnnnnnnnnnnnnnnnnnnnnnnnnnnnnnnnnnnnnnnnnnnnnnnnnnnnnnnnnnnnnnnnnnnnnnnnnnnnnnnnnnnnnnnnnnnnnnnnnnnnnnnnnnnnnnnnnnnnnnnnnnnnnnnnnnnnnnnnnnnnnnnnnnnnnnnnnnnnnnnnnnnnnnnnnnnnnnnnnnnnnnnnnnnnnnnnnnnnnnnnnnnnnnnnnnnnnnnnnnnnnnnnnnnnnnnnnnnnnnnnnnnnnnnnnnnnnnnnnnnnnnnnnnnnnnnnnnnnnnnnnnnnnnnnnnnnnnnnnnnnnnnnnnnnnnnnnnnnnnnnnnnnnnnnnnnnnnnnnnnnnnnnnnnnnnnnnnnnnnnnnnnnnnnnnnnnnnnnnnnnnnnnnnnnnnnnnnnnnnnnnnnnnnnnnnnnnnnnnnnnnnnnnnnnnnnnnnnnnnnnnnnnnnnnnnnnnnnnnnnnnnnnnnnnnnnnnnnnnnnnnnnnnnnnnnnnnnnnnnnnnnnnnnnnnnnnnnnnnnnnnnnnnnnnnnnnnnnnnnnnnnnnnnnnnnnnnnnnnnnnnnnnnnnnnnnnnnnnnnnnnnnnnnnnnnnnnnnnnnnnnnnnnnnnnnnnnnnnnnnnnnnnnnnnnnnnnnnnnnnnnnnnnnnnnnnnnnnnnnnnnnnnnnnnnnnnnnnnnnnnnnnnnnnnnnnnnnnnnnnnnnnnnnnnnnnnnnnnnnnnnnnnnnnnnnnnnnnnnnnnnnnnnnnnnnnnnnnnnnnnnnnnnnnnnnnnnnnnnnnnnnnnnnnnnnnnnnnnnnnnnnnnnnnnnnnnnnnnnnnnnnnnnnnnnnnnnnnnnnnnnnnnnnnnnnnnnnnnnnnnnnnnnnnnnnnnnnnnnnnnnnnnnnnnnnnnnnnnnnnnnnnnnnnnnnnnnnnnnnnnnnnnnnnnnnnnnnnnnnnnnnnnnnnnnnnnnnnnnnnnnnnnnnnnnnnnnnnnnnnnnnnnnnnnnnnnnnnnnnnnnnnnnnnnnnnnnnnnnnnnnnnnnnnnnnnnnnnnnnnnnnnnnnnnnnnnnnnnnnnnnnnnnnnnnnnnnnnnnnnnnnnnnnnnnnnnnnnnnnnnnnnnnnnnnnnnnnnnnnnnnnnnnnnnnnnnnnnnnnnnnnnnnnnnnnnnnnnnnnnnnnnnnnnnnnnnnnnnnnnnnnnnnnnnnnnnnnnnnnnnnnnnnnnnnnnnnnnnnnnnnnnnnnnnnnnnnnnnnnnnnnnnnnnnnnnnnnnnnnnnnnnnnnnnnnnnnnnnnnnnnnnnnnnnnnnnnnnnnnnnnnnnnnnnnnnnnnnnnnnnnnnnnnnnnnnnnnnnnnnnnnnnnnnnnnnnnnnnnnnnnnnnnnnnnnnnnnnnnnnnnnnnnnnnnnnnnnnnnnnnnnnnnnnnnnnnnnnnnnnnnnnnnnnnnnnnnnnnnnnnnnnnnnnnnnnnnnnnnnnnnnnnnnnnnnnnnnnnnnnnnnnnnnnnnnnnnnnnnnnnnnnnnnnnnnnnnnnnnnnnnnnnnnnnnnnnnnnnnnnnnnnnnnnnnnnnnnnnnnnnnnnnnnnnnnnnnnnnnnnnnnnnnnnnnnnnnnnnnnnnnnnnnnnnnnnnnnnnnnnnnnnnnnnnnnnnnnnnnnnnnnnnnnnnnnnnnnnnnnnnnnnnnnnnnnnnnnnnnnnnnnnnnnnnnnnnnnnnnnnnnnnnnnnnnnnnnnnnnnnnnnnnnnnnnnnnnnnnnnnnnnnnnnnnnnnnnnnnnnnnnnnnnnnnnnnnnnnnnnnnnnnnnnnnnnnnnnnnnnnnnnnnnnnnnnnnnnnnnnnnnnnnnnnnnnnnnnnnnnnnnnnnnnnnnnnnnnnnnnnnnnnnnnnnnnnnnnnnnnnnnnnnnnnnnnnnnnnnnnnnnnnnnnnnnnnnnnnnnnnnnnnnnnnnnnnnnnnnnnnnnnnnnnnnnnnnnnnnnnnnnnnnnnnnnnnnnnnnnnnnnnnnnnnnnnnnnnnnnnnnnnnnnnnnnnnnnnnnnnnnnnnnnnnnnnnnnnnnnnnnnnnnnnnnnnnnnnnnnnnnnnnnnnnnnnnnnnnnnnnnnnnnnnnnnnnnnnnnnnnnnnnnnnnnncaaagtgccatcgaccagatccgggccggcaagctctgcctgtcgtccactgtgaagcagggtgagggctgcgaccgctcagcccacatgccgggttggggaggaagcccaccttgcaactgcctgggtgacagggtgacagggaggctgcttgagtaggcccctgtgcagaggtgcagaggcctcggggcctggcccagtgtgcagagcacagaggccattgggtcggacagcaccctggagcccagtatgcagagcacagaggccgtggggtcggatggcacccgggacaaggtgcggagcctggccacaccctcaaggccacggggagccagggctgtggcagggagggagggacgtgctcgctcagtgcaccgggcagatcatggccactccagccctgccccgtgtctgctgcaccctgagctgaccaccctcgtcctttgcagtggtgcgcaggctgaatgagctgtacaaggccagcgtggtgtcctgccagggcctgagcctgcggctrcagcgcttcttcctggacaagcagcggctcctggaccgcattcacagcatcactgccgagaggctcatcttcagccacgctgtgcagatggtacgggacagacagacaccagtggggcaggggccaggaacttccaggcccgccgtctccactgggacgggaccttgatgcccacagcgtggtgagactttggggggtgtcacttctggaggtcttgaaatgacagcattatgcacccccagcctcctgcaggcgctcgcagctcggctgggtgcatccttgattgtacgggtgccgtggcccatgtgcatcctgcctcgccccgactcagtttccccaattgtaaaatgagagacttggtcttcaggcctcgtagtcaggtgtcagcctccagaagcagcacctggtcccggacaacctgcctggaagtgtggtgcactcaggtggtaccacgggcaaagactccctgcttgggctctgaagagctccctctgcctctgaggtggtgcccccttttcgtttattttttgttgtttttttttaagagagggtcttgcactgttgcccaggctgaagtgtagtgtagccgctaactcctgggctgaagtgatcctcttgactcagcttcccaagatgctgggtattacaggcaaaaactcatgagtgcctgagtctccttttttaagaaaatttaagcatgtagtaaaaatccagtctgaacaaacatgggaaaagtcagcctccctcctgccccccttcccgcccaggcaggccaggcagcagcagtaatgacactgactgagcggcgggcactctgttgtcctggggccgggctgagagcgctggccagggtcatctggttccaggcagtgtctccccttggccctgtgaccatcccctctgcacagcaggctgcaccagcacttatgtcyccacgtcactgccctgagcgcctatctgccacccctgggccgctgccgtgggtgcagggcagcccttgctgggagggagtggggtgagctggccctgtccagcctctgtcctcgcccccaggtgcagtcggctgccctggacgagatgttccagcaccgtgagggctgcgtcccacgctaccacaaggccctgctgctcctggaggggctgcagcacatgctctcggaccaggccgacatcgagaacgtcaccaagtgtgagtgcccggctgggctgggggctggggactctgggcgtctccctcacactcccctctccctccacaggcaagctgtgcattgagcggagactctcggcgctgctgactggcatctgtgcctgacctttctggcctggctgggccccccgtcctgccgagccctgcagagtgggctctgtgtgctggctggactcctcgggacaagcccatggcgctgatcgctggtgctgagccctgccctgggccccacggacagtcagcctgccggcctccctgcagctcacggggcagaaccagcacatctggagccacacagcttggggggtgtctcccatcttttacaggtggggatcacagaatttctgcccctccagctgcctggctcagcaggcgtgggtgccaccaccctctagccccagggcagccccggaggacaggcaagggcctgagaccactgccgactcaaagccaaagcgagctcctgcttagggcaggtcagcaggcactgtgcccaggaagagcctgcggcctcggcgtcccccagtctccaggagcctctccctccgagatacccacccagctttgtcaatcacccaagcactttatgcatatagagacagaacctggacctcaccagggactgctgggcagcgattcctggcagtggcctggtgtttgtacatacacatatgcagacacatgccagggccccccaagcccgagcaccggaccacgttgctgcccaggtctggacctcagcgggagaactggctccggggggagtggggccctgcgctagaggcagaggcagttctttgttcaagcgttcctctggggaccggcagcagaggcaccgtgttctctcagccctggatacgtcttgtaatctttcacactttattcctaaaacgtgwcttatttttatgcagctcattttttctttaaaggagaaaacttgtaggtgtttaagaattggttttgggagggcgaggactgggccaggttagaggcagatggcacaggggcgtgtggcgggcgggtgaggctgctttgcacacctgtgttggtggctgtcccctgccgcccctccctgtggcagcagcaggacaggtgtgtgcccagcaccctccctacctgggcctggaagcagatgaggggaatacttcatgcaaagaaaaaagtaacatgtgcaaaagctccccgtccagctttgacagtcagtttygatgtcagctcctcggcagggtaggcctgatgacagccctgtccctccctgcctctgccttgcccaaggccackgagggcrtctgcagagaggcctgccttccggattccaggcgggcatgccctgcaaaccccgcctgggcctcccttggtctgcccagccctcgrttagccctgcctgaatcagtagatacttgaacgagtccccagtctgcgggaggcagtggtggggccatggacccatgcggggggttccagggtcacacgccacataacagacaaaaatacacacacgtgtgtttttctttgcaatacttgaaatattgccactgtgcttggacttagaagaagaaaatccccgtgacttcttcctcatcaccttgatggctttattctcaccttgtggggcatgtttgtatttattgcttcatggccgactggaatcctgagtcctgggaagctggcactgcggggatcttgcccggtgtcctggtcctcttgcttccgtcgcggccgcatgtgcgtgtgtccaagcaggtcctgggcgcctcaactgctgcccctggttgaatgttctcttgatagtgctggaccctttgtctattttaaagcgaattttgtgtgatttcctgccctttgcgttatattgtataataccaacgtaaggaaataaacctttggaattgttgggctggtgtcaccacttgtcttcgttggcttgtcactgttttcagggttctgtcattttctttctcagccgaggcgcaggagcccagggcccctccacaggtgcccacaatggtcgacacagccctgggagcagagccccagggcagaagctggatgtgttgagggacaatgcaaacccctgcgccacaggaagcctctcccgccaggctgggggtcctgcacagggtgaagagagtccagagggcagggcatctgccttggtatagctttgggcacctgctttgactcctttgggggatacacctaggaggggctttcggggccacgtggagctgtgtgttaacttccaagaagcaacacggttcgttcactgcagcctctgagcagctgggcctccaaggccttgccgtgtggttttgatttgcatttccccgaggggtcatgacgtggagcatcacaggtacttggcggccatttgtgtgtctttggaggaacatctaaatcctttgcctccccctttttatttatttatttattttttaatttgaaatgagtaactctgttgctcaggccggagtgcagtggcgcgatctcggctcactgaaacctctgcctcccaggttcaagagattctcctgcctcagcctcccaagtagctgggactacagccaccaagcccggctaatttttgtttttgttttgttttgtttttagtagagacggggtttcaccgtattagccaggatagtttcaatctgatgttgtggtctgcctgccttgaccttccaaagtgctgggattacaggcatgagccagcgcacctggctgtttttttttttttttttttttggagacagtctccctctgtcacccaggctggagtgtagtggtgcaatcttggctcactgcaatctctgcctcccgggttcaagcgattctccaggctcccgagtagctgggattataggccaagtgccaccacgcccaactagtttttgtatttttagtagagacggagtttcaccatgttgtccaggatggtctcaatatgaccccgtgatccacctgcctgcctcatcctcccaaagtgctgggattacaggcgtgagccaccacgccccaacttttttttttttttttttttttagttgaaatctcactctgtagcccagactggagtgcagtgctgcaatctgggctcaccgcaacgtccgcctcccaggttcaagcaattcttctgcctcagcctcccgaatagctgggactacgggcatgcgcccagctagttttttgtatttttagtagagacggggtttcacatgttggccaggctggtctcgaactcctgtagagttcgcatttttaaaactatatattgtttttattagataaaaataacttgctaaaaactgctaaccgcagtaagaagtgaaagttcattgagaggttggtgttctcgaggaaggggaaggcggagaccttgatttctgagtcccaagaggggctgcttccaaactgagcctcctcagacaggaacagctgcactcggcaccgggtgagaaggtgtggtggagcagctgccaggctgtgggcgccgtgatcctcctggtacttctgaaacgtaaagaaatgcccagacggtcactacaaacatggaattttgttggtgttaatatcattttttagagcagttttatatctgtaggaaaattgagtaggacgtacagagagatctgccctctcccctgtcagtaacacgtcacattcgtgcagtgcctttgtctctgcttttgaacccaatattcatattttagatttttaaaaatcatggacacttctaatactacaggttctgtcatagtacccgaagtccatagttcacatcatggggtcactcgatgtacactgggctttgcagaagtgtcacgccacacatcaccctaaggtcctctgggctccacctgttgccctctcccagcctagctctgctggccccggtcttcctgtcctcgtagtttttcttgtttcagaatgtcccgtagttggaatcatacactatgcccagggcttgggagctcatttcctttttttttttgagacggagtctcgctctgtcgcccaggctggagtgcagtggcgcgatctccgctcactgcaagctccgcctcccgggttcacgccagtctcctgcctcagcctcccgagtagctgggactacaggggcctgccaccacatcctgctaattttttttttgtatttttagtagagacggggtttcaccatgttagccaggatggtcttgatctcctggcctcgtgatccgcaggcctcggcctcccaaagtgctgggattacaggcgtgagccactacgcctggccttttttttttttttttttttttttttgagacagtctcgctatgttgtccgggctggagtgcagtggcgggaactcggctcactgcaacctccacctcccaaggttcaagcgacttttgtgccccagtctcctgagtagctgggattacaggcgtgagccactgcacacagcctggctaatttttgtatttttatttatttatttatttattattattttttattgatcagtcttgggtgtttctcacagagggggatttggcagggtcacaggacaatagtggagggaaggtcagcggataaacaagtgaacaaaggtctctggttttcctaggcagaggaccctgcggccttctgcagtgtttgtgtccctgggtacttgagattagggagtggtgatgactcttaacgagcatgctgccttcaagcatctgtttaacaaagcacatcttgcaccgcccttaatccatttaaccctgagtggacacagcacatgtttcagagagcacagggttgggggtaaggtcacagatcaacaggatcccaaggcagaagaatttttcttagtacagaacaaaatgaaaagtctcccatgtctacctctttctacacagacacggcaaccatctgatttctcaatcttttccccaccttcccccctttgtattccacaaaaccgccattgtcatcatggcccgttctcaatgagctgttgggtacacctcccagacggggtggtggccgggcagagggggctcctcacttcccagtaggggcggccgggcagaggcgcccctcacctccctgacggggtggctggcctggtgggggctgacccccacctccctccaggacggggtggctgccgggcggagacgctcctcacttcccagacggggtggctgccgggcggaggggctcctcacttctcagacggggcggttggcaggcagagggtctcctcacttctcagacggggcggttggcaggcagagggtctcctcacttctcagacggggcagccgggcagagacgctcctcgcatcccagacggggcggcagggcagaggtgctccccacatctcagacgatgggcggccgggcagagacgctcctcactttccagactgggcagccaggcagaggggctcctcacatcccagacgatgggcggccaggcagagaagctcctcacttcccagacggggtggcggccgggcagaggctgcaatctcagcactttgggggggccaaggcaggcgggtgggaggtggaggttgtagcgagccgagatcacgccactgcactccagcctgggcaccattgagcactgagtgaacgagactcccgtctgcaatcccggcgcctcgggaggcggaggctggcggatcactcgcggttaggagctggagaccagccccgccaacacagcgaaaccccatctccaccaaaaaaataggaaaaccagtcaggcgtggcggcgcgcgcctgcaatcgcaggcactcggcaggctgaggcaggagaatcaggcagggaggttgcagtgagccgagatggcagcagtaccgtccagcttccgctcggcatcagagggagaccgtggaaagagagggagagggagaccgtggggagagcgagagcgagagggggagggggagggagagggagagcgagagcgagagcgagagggagagggagagagatttttgtatttttagagacgggttttgccacgctggccaggctggtctcaaactcctggccttaagtgatccgccctcctggcctcccaaagcgttaggattacgggcatgagccactgtgcctggcctcatttctttttagagctgcatagtattccattgtctgtaggtaccacagtttttccattcacctgccgacatatcggttgtttctgcgtttgggcagtggtaaataaagctgctgtaaaggtccttgtgccagagccaggtggtgagggtgggcccaggggaagccatggcagtacaggaaggacctcatccctgcacacactggccatgtgggggcggggctccaagccagggggaccaggccttggtgcccacactgccacagaactgtggcccccctgggtgcctgtccaaacccccccacctcagtcctggagcctgggctggtggaggggtgccctcctggggggtcacttagtacagctgagccaccctcccagctggacaattgcatctccctcctgcctccccttcctgcctcggccaccagctcctcacaagccactcgcagcccactgagtgccccttgggaaggggtgtcagattggatccctggggctcccatctcactcatagccaatgccaagtcctcggtggcccacgaggccccacacaacctggccccggaccccttggtcctcttttcctatcagtccctccagtcatcacgcagccctgtggtttctctacctgcatactccaggtgggcacagtgcccaggccccactgagtcctcacctgtaggagaaggcacagcccctggagggcgggagtggggctgctgcagacggctgtctcctgcctcctggctcttgcactgccaggaacacgctctccccaacacctccatggctcattccccaaattcaagcttgtagttggttgaattgtggccccagagatgggattaaggattttgagattatgccagattatctgcgcgggcccaggatcatatgagtttgtctaagggaaagcaggagacaggagggcaagcttgggagaggaggcaaggaagtggtgggcgcggtggccacacctggaatcctagcacttcgggaggggaggcgggaggatcgcttgagctcagcagttcgagatctgcctgggcaacatagtgggccggtctcttaaaaaaaaaaaaaaaaaaaaaggccgggcgcgtggctcacgcttgtaatcccagcactttgggaggccgaggaaggcggatcacgaggtcaggatatcgagaccatcctggccaacatggtgaaaccctgtctctactaaaatacaaaaaaattaaccgggcgtggtggcgcgcgcctgtagtcccagctactccggaagctgagacgggagaatcgcttgagcccgggaggtggagattccgagccgagatcgcgccactgcactccagcctggcgaaagagcaagactctgtcccccgccccccaaacaaaacaaaacaaaacaaaaaagagtggctacttttcaggagaccgcatctctataaaaaataagaaaaaattagctgagcgtggtggggcgcgcctgcgaggaccgctggagcccggaggcggaggctgcggtgagccgtgacccctctaccgtgcgggtgaagggcagggcggagccgcccctgcgccccagcgtctgtggaacggggacggggagcggggctggggccacacgagggccgcacagggtgggtgccactgagggtctgggggccgagcccgtgggagcggacccggcaacggagaggagcggggccagcgtgggctcagcgcttcccctgctccgctgggcgggcgacagcaccccgggaggcggcggcggagcgaccagtcgcgcggccgcggt

SEQ ID NO: 96454 - DNA, 37210 bp, Homo sapiens
  misc_feature (1)...(37210): n = A,T,C or G
ggaagctggtatttgacatagtgtgttaaacagctcctgagaacctttgggacactctgccatggctggcgtgaggcccagaggaccacgcagaggcaatggtagtacagatgtcacagctgagggtacgatgaggcctgggctcagtgagccaggacgaatgtgacagacaccccttgctgccacagtcagccctttgacgaaggtgggctggtgattctggaagtattggctatagcggtgggcccagtcaactcttccttgtggacttacgacagcagattttctctaggataagcttgtgtggttctgccagtgaagcagagaaccacctgtgctgttgtggaaggcgtgccgttgagggggaaaacgaagcccagtatttgctactgtttttcctttttttactatgacaggaaaataaatgcaattttagtggaattgattgacagtgtctccttactttgaagttttcaccaaagcaaaaaggtccatatccaatagtatcctttgtgctgtggcttgattttggcctattttacattatttggtccaggaaattaggttatattaggttttttgtatactaaaaatcagttatggcacaataaagattttctgtttttaaattgtatttcatctgcttcctccccattctctcactttaagtgacattgaggaaggtattctgtcccacaggtttctgtggacagcgatacagcaggagtcagtgaaatcaactggggagctcacttgagctcttgataagaaatgtggagaaaagtaaaaaccaagctttgaagaaacagaagaaattaatcttttagttagttgaacataccaaagcagaggactggaatctgtttgttctaaccaacccgttctccctggcttggcacgtgccgtgagagcgcagcttgccggagggagggccgctgtgtgcgcctcacatctggctcccagtggaaacttttactcctcctcatccgcagatgtgatagaactgaagtatctaggaattctgcctttgtcatttgttttaatttgtgtgccctgttcattttttttgtctttcccaaatcttggtagtctccttatagttgaagataaaatgttgagtgcacttattttagaatatcctagacataactgtctaagtaaaagcgctctattaatctaaaacactacaagagaatttaacaccatctctcaaatgcttttttggagagcttaatgggattctgaatatttgcaatgtggagtttccgccccgatctcacgtcagtgagggtctcctgtctctcaagtgtgtttcctttggctgttccctaatacaaaacacggacatatttttactcgtagcactcaatttagtaacttctagatgctaccgttgacctgagttaaattcatttagtcgtgtacgtaaaaactctccttttagtgtgttattttcttggccttcccttttaaaggttaaagtttctaacctaagaattaagtacgcgttcaggaagctgttgtctaggccttccccttgtgaatctgggttcattccaatacggcaagtaagagttggaaactttgagaacacagactataaaggcagcagcccgaacactgtcagactctaattggcgaccctgggaaacagttgccctgctattctttaaagaaagacgtttattctgatgataaaaacagttagccagactgtttttaaagcacctggcgggaagcagaaggttggatccaagcccttgttcagatttggtgcctgataagacaggggtttctctttttgtgacctttattattattattttgttaactgttgtaaccagttagctgttgtgttttaagatagaaaggaacaagactaaaattgtaaatactttgtaaacatcagcatttgtacttgaatagtaggattttaaagggcattgatagcataccaaacaaaaggcaaaataaagtgacctttttatatattttttcattttgtctttcatagaaaactggtatttaagttaaatgagatgctgaatttttcatttgtgtgaagaaaaaaccaacaagtaatgttggagccagaggtgttcccctcacccactcttccgtggccatagaaggacctggaaggaacagaaatcacattcaccaagtccaccaggcagccgcttcccaaagccgcacgtggaggaaagagctggcaccgccctgccccatgtggcctgccaccctcacagcacccgtcgtcaatgtcctgggggccacactggcaccagtgtccttccacacccagtctgtgtgcccaactggcaccagtgtccttccacacccagtctgtgtgcccaactggcaccagtgtccttccacacccagtctgtgtgcccaactggcaccagtgtccttccacacccagtctgtgtgcccaagtaagggcagggacaccggctcacaggtgctcaccaccgaaaacgcctgtgagcagatggcctgcgagttgttgcttctctttttcttctgcttttagacttttcttcgtttcgttttaaatctgattacaaaaatcaacgtacacttttaattgaaaacgcacacattacgcaaagtaaagaagcatcccagaagccccttagtttctgtatcttttctcccaccacaaaaacgggggtgcacgggcacttggccctgcagctttgggcttccacctccggtcttccagattgaaagctcccagggtctggttgcacacttcgtgtctgcaggtgatagtgcagataccagggtgggcgagaaagccagctgcaaagcccggctggtgctccctggcctctgggggtctgtactgcagtgcctggtgcacctgcggctccatgcctaccagccacataaccaggggcaggtgacttcctccttcagggcctctgtgtccccatgtcccctctcctaaggtggcttgaggatccagtccaatgttgggtgctgcacttggtgtctgtcttttatactcccaacgaagaggactgcaggttttgcaaagcctactgtttctgtcatcctgaccctaccatcacgtctttgccaagtgtgcctgtggcagcaggccctatggcgggcttatctggcctggaagctgtgtttctgtttgctgtccagtagcgaccaggggccagtgggtgaagcaattgtgcctgcgcacagccgtcaagaccttaaggtagcttctgagcccggagtgtgttgtgtcacctcctactcgagatgtcagatcgtgtgacagctgcccaccaacaccccagagttgggcattgtgatccagggcaatgggaggggagattcctttgccatagggtgccctgctatgctgttgctgcagcatctattcccctaatttttctaaagttcccattttattgggtagattatgctatatacattcggtggaatgcagtgcagcctctacaaagtacagctgtgctgggggatgagtttgtgaagtatgctaccaggatggaactggttgtatgcctggatgtgcatagaatatcctggaagtatttgcccctgcatgtggtggattctacgtccatgagttcaaccgaccaaggagcaaaaatattcagaaacaaaaatgtgtctatactgaacatatacagaccttgttttgggggggttattatttcctaaacaatgctgcataacaactatttacatgacatttacattgcattcactattgtaagtaacccagagatgattttaaaaagatgtttttgagttatatgcattttgcatcaggggcttgagcctctcggagtttggcatccatgggaggtgctgagggacgattgtacgttgtgttagcactgcctctgtggagggagagactggggggcaaggatcaaggctgctgatctgcactgttatgcgcgtccttttaactgttcaggtagtttgccaagtgcatgaatttttgtgtggtgggggcggggtgggggtggggacagtcccactcactctgtcgcccaggctggagtgcagtggcgtgatctcagctcactgcaacctctgcctcctaggttcaagcgattctcctgcctcagcctcccaagtagctgggattacaggcgcgcaccaccatgcctggctaatttttgtatttttagtagagatgggctttcaccatgttggccaggctgttctcgaactcctgggctcaagtgatccgcccgcctcggcctcccagattgctgggattacaggtgtgagccaccgcacccggccatgaattaatttttaaaataaggccctatcagcttttttgtcacatggtcccctactcgggaacctttatttccgacctcctgcctgatcttgtgtagccacctacactccgaccagcccccagagcagcatcgttctgccccctgtgcagcctttcctgtctccctgactttgtgctcgtctcctttgttgtaaagtatttctcctactttgaagactactcccacttaactaagtgtgcatccattcattcattcatttattcatttctccccagtgttctcctccagtagtatcttgggctgaacaacagtatttgtcttatttctccagctgtagtgtggctctgttttatccctattcaatgaatatttaatgtagcatatttcatgccaactttaccactagtgctggagtggcggaaggacaacacttggctgtttaagaaaatcaaagctggccgggcacggtggctcacacttgtaatcccagcactttggaaggccgaagcgagcggatcacgagatctggagatcgagaccatcctggctaacaccgtgaaaccccgtctctactaaaaatacaaaaaattagccgggcgtggtgacgggcgcctgtagtcccagctactggggaggccgaggcaggagaatggcgtgaacccgggaggcggagcttgcagtgagccgagatcgcgccactgcactccagcctgggcgacagagcgagactccgtctcaaaaaaaaaaaaaaaaaaaaaaaaaaagctgatcagagagatggatgaattactggtttattcagctgtttataaagtacatactatgtggcagtttagacaactaggctatacttgccagcaaaataaaaaagggggttgcatcctagcaggtcagataaaataattcaggggataagtaccatgaagaaatggacaggtggtaagtgatacgggtttcactcttaaatagatgggcaggttatgcagtggaaggcgcctgatgcacagctccaaagctcacccgtctacagtggacacgacgaaaccagggacatgtcccaccatttcagtggtcacaggcaagagtcttgtggatcttcggatcccacgtaacatctcatctccctaggcaccccgactcccctgcccaatttaaaacagacctcagcctgccccatcccggctgctttgcctggtgctcttctaactgcatgtttatctatcctccccgcctaaactgtagggcccgcgaggggagccgctagctgtgcttgtcagtgtgaccagcgctcagcaggtgtccggcggnnnnnnnnnnnnnnnnnnnnnnnnnnnnnnnnnnnnnnnnnnnnnnnnnnnnnnnnnnnnnnnnnnnnnnnnnnnnnnnnnnnnnnnnnnnnnnnnnnnnnnnnnnnnnnnnnnnnnnnnnnnnnnnnnnnnnnnnnnnnnnnnnnnnnnnnnnnnnnnnnnnnnnnnnnnnnnnnnnnnnnnnnnnnnnnnnnnnnnnnnnnnnnnnnnnnnnnnnnnnnnnnnnnnnnnnnnnnnnnnnnnnnnnnnnnnnnnnnnnnnnnnnnnnnnnnnnnnnnnnnnnnnnnnnnnnnnnnnnnnnnnnnnnnnnnnnnnnnnnnnnnnnnnnnnnnnnnnnnnnnnnnnnnnnnnnnnnnnnnnnnnnnnnnnnnnnnnnnnnnnnnnnnnnnnnnnnnnnnnnncgctgtcagcagcgctcatccgcgccgggagcccttggctgcgtcgcccggcagccgcggtgagtgacggcccgcgtatccgctgccggggctgtggcgggcgtgaggggttggccctaccctcggcccccgaccgcccacatccgccggttaccctcgaggctccccggccgcgcgctcccctctctccgtcccatcacccggtgaccccggctgagcgaacgcccacccctccctcagggaccccctccccgtgacacgatcccccgtgaacgcccacctccctcagtgaacactcccccgtgacatgaccccccgcaaacgcccacccatccctcggtgaccctgcgcccgtgagcgcccacccctccccctgcgacccctccccccgccacctggcaactgccgttttcccgccttccctcctccgccccctctcccgcatcaccccgttttctggtgaccgctcccccccatcccgtgacacaaacccccgacctcccagcccttccccggtgacacgatccctgtgaccgtctggcccggtaaccgcccctcccctcatgacccttcacccagtcccctggtgcccacccccgtcactgccgcccgcctggttccagcctcgcgagaccgctgtctacggcgctgacgccgcctctgcctcttgaccccttggccccgctgtcctgatccctgaggtcggggcctggtctgcactccaggaaagacgagtgcgcttagtgtgcgctgcacgtgagcagtgaagttgattccacgcgctgcgctgctcggcagctgtcccagaactgaccacggacccctccgcgggtcctgctcctgacaagggccttccggcactgggagttttgtgttagtggaaaggaagaatctaataataccaccacctttacagtaaagacgctgcgaattgacrccttttataataaagacacttatcttgcccaagagctgggtgagtatttcctccttaccaaaaagttggtttacttacagttaactggctgaaagtttgagtcttaggcttatttgtgccgctccaggcaggctgattggcgctggtttccatctgtcagattggacagcagtaccactggctgttgggggctcacgaccagatagagtcttgtctgggaaccacaagtgagtgttgttaccacagctctgcagcagtgagggcacctctcaatccacgtgcagtcgccccaccttatcttcaggggatacggtccaacaccctcaatggatgcctgaaatcaaggatagtagtgaacactatatacactgttttgttatgcatccttccatatctacgataaagtttaattcataaactaggcacaggaagagattaataacagctaataataaaatagaacagtcgtaacaatatactgtaataaaagtcatgtgaaagtgatgtctctctcctaaaatatcttactgtattgtacgcacatgtttttgaactgcagttcaccgagggttactgaatccatggataaggggagattacagcagtttcttttctgactatgttattgagacttcaaaactaactaaattgttcgttgaatggaattgtccaaggtgtacaaaatgacagttgtaacacaaaggtgtttcactgacatccctgtcacgtttttgctaaactaatgcacttttaaaaattattatttatgctgggtgtggtggcttatgcctgtaatcccagcactttgggaggctgaggcgggcagatcacctgaggtcgggagttcgagaccagcctgaccaacatggagaaacccgtctctactaaaaatacaaaaaaaatcagccaggtgtggtggtgcttgcctgtaatcccagctacttgggaggttgaagcaggagaatcgcttgaacccaggaggyggaggttgtggtaagctgagatcacaccactgcactccagcctgggcaacaagatcgaaactccgtctcaaaaaatatatatattacttataaaagtctgtacttcatgttcagtcacagtagagacaagtagaaactccctccttcaacaatacctagcactcaaggagagatggccttacagagtcagcatgtggtgcagaggtctcttggccatgattttaggtcctcctgggtccacatcgtcccacctggccatggatacgttgtcatctgatctgttcactgttaaggtaacagttgtcataactactacaaaatggttaagtgttaggactttaatgatggtgatcatgtaataaagggcctggaggataatggcatgcttacgaattttctgggtggtattcacatgtttgaaaaagcattgaaatgtatgattttgggtgatgactctgagaagtatggagcatgacccattttgaataggagaacagaatgttgtaaagtgattcttggtcccctaagagtccattgacaaccaccatgtagaggaaaaatggcaaagaatgggctctctccaaagtcaggtgctgaggcccttctaaggaggaaaagccaacgccctttcactgtggtttccagctgctacaggaacaaatagtgtctatctgtgtccagcttattttttgacttctttgagtctgaagatactttgaaaaactttgatttgccagagtaattttttgtaccttggaatgagccatatttttaatttgctttttgatgttacaaaatgtaccctcataagaattcaaacaatacagaaaaataagtccttttcagtccttttgtgctgtaataacaccctccatctttttttccatttcagttagtaatatgtcttcaacatctgctcatgtcaggaaataaaaatttattctcttttttttttttttttttgtttcgagacggagtctcgctctgtcgcccaggctggagtgcagtggcgcgatctcagctcactgcaagctccgcctcccgggttcacgccattctcctgcctcagcctcccgagtagctgggactacaggcacccaccaccatgcctggctaattttttgtatttttagtagagacggggtttcackgtgttagccaggatggtctcgatctcctgaccttgtgatctgcctgcctcagcctcccaaagtgctgggattacaggcaaaaatttattctttttatgtttacataatagtccgtactgaggatacaacatatttagtcaaccattccccattgatggatttcattttgtgtctgtttttttgccacagtttgtactgagagacacattcctatgcatgggtcctgacactttctttcatttctacaggctagattcccatgaaggggagctaaatggtgttagtgggtcaaagggyatgcatatttaacatttaaatttcaatagttattgagagatctattcccaaagttatagcaaagttacattcctgaagccatgaaggggaggacgctttgctcccgtctgacatactgcctgttgaatgggtgctgccatgtcctgctggcgccgtgtgctgcacttcgtggactggcccattggcagtgcctcttctgaagttttccattgtgttcttccccatttcctggagaggtttccttttcttttcttttcttttttttttttaactattttatagtagctcttttttgagatggagtcttgctgtgtcgcccaggctggagtgcagtggtgtgatctcggctcattgcaacctccgcctcccaggttcaagtgattctcccgcctcagcctccagagtagctgggattacagacgggcaccaccacacctggctaatttttgtattttttagtagagatgggatttcaccatattggccaggctggtctcaaactcctgacctcaagtgatctgcctgccctggcctcccaaagtgctgcacttacaggtgtgagccaccgcaaccagccaaactctttggataacagggatatttaccctttgaagtaataaaatattgcatgtatttttctgctaattattttttgtcttttgatcttgtttaaaacatcttttatgtagtcatgtattttttcctttacagcatctgggtttcctgcattacttattaagaagctttcaccacctcgcagttgtagagatagtccccgaaatattattccaataaagtgttttcctcctttcctccctgcctcctcttccttccttccaggataacatttagttctttattctgactgaaatggtatgaggtaggggtgttttcctcctttcctccctgcctcctcttccttccttccaggataacatttagttctttattctgactgaaatggtatgaggtaggggtgttttcctcctttcctccctgcctcctcttccttccatgataacatttagttatttattctgattgaaatggtgtaaggtaggggataaccttttcccccctagatgctactaccatttctttttcttattttaatgtaattaaaaattttaaaggaaagttttttgaaacagagtctcactctgtcacccaggctggagtgcagtgacacaatcttggctcactgcaagcttgatctcccgggctcaagcaattctcccacctcagcctcctgagtagctgggaccacaagtgcacagctaatttttgtatttttagtagagacagggttttgccctgttgcccaggctggtcttgaactgctggcctcaagggatctgcccacctcagcctcccaaagtgctgggactacaggcgtgagccaccatgcctggccttaatttttaattgataaataattgttgtatatattatatatttatgaagaacgtgatgtcttaatgtgtttatattacagaatgatgaaattgtgctcattaacaaacccatcacctcacacaccatttttatgtggtgaaaatatttaaaatctactctttcagaaattttgaaatatacaatgcattcgtatttattataattatcatcctctgcaatagatcactaaaacttactctttctatctaactgaaattgatccctttgatcaatatcccccttccctttttcccccaccccccggccccagtaaccactgttctctctgtttctatgagttcaacctttttagattccacgtgtaagtgagatcatgtggtatttatctttctgagcctgccttattttactcagcacagtgtcctccaggctcatccatgtccttgcaaatgacagaatttccttatttttttaatggctgtatactattcctttgtgttgtatatataccacactttttaaaatcattcatctgatgatgggtacccaggctactgtgaataatgctgccatcaacatgtgagtacagataactattcaacatcctgattttgtttcctttggctgtgcacccagaagtgggattgctggatcatatcttcattctatttttatttttttgaggaagcttcggactgttttctataatggctgtactaattacattcttaccaacagtgcacaagggttcccctttctccatatcctcgccaacacttaactatcttttgtctttttggtaatagctatcctagcagttgtgaggtgataatctcattgtggttttgctttgcatctccctgatggttagtgatgatgagccttttttcatgtatttgttggctatttgtatatcttcttttgagatatgtctatttaggtcttttgcccatttttaaattaggttgttttcatgctatggagtggtttcagttccttatatattttggatattagccccttattaaatgtatggtttgcagatattttctcccaatgccactaccattaaagtatctatacatttttaatctttttcctttttctttcctctttttcttttttccataaaaacctgttggcttttgtatgtttatcttgattacagacacttcaccgaattcgaagtattcttataagtttttgtctcggattttgtaggcatggaattatatcatttgcaaataaagataatttcaggctgggcatggtggctcacacctgtaatcctagtactttgggaggccaagagcatgctacttttttttagtttaaactttaaatttttatggctacacaatagctgtatatacctacattgcttttttattacagaagctctagaataagtatgactattttcctaagtcaggaattctactattttgtttttcttttattttgtcagtattcttatgtttttcaaaaaagcactgtctctttaaaaacatatcacttcattgagctttaagctaatttttttcttatttctaaagcaaaacaaaacccaaactcattgtaatcctctttggaattgcattacatgtatatgttcagttgtgaaggcatgacattttatgatagtaaatcttattctggaacatggtatgttgcttcattttattcgtgtttttttgagacggagttttgcttttattgcccaggctggagtgtagtggcgcaatcttggatcaccacaacctccgtctcccaggttcaagcgattctcccgcctcagcctcctgagtagcaattacaggtatgtgccaccacagctggctaattttgttttttgtttgttttttttagtagagatgggggtttctccatgttggtcaggctggtctcgaactcccaacctcaggtgatcgcccgccttggcctcccaaagtgctgggattacaggtgtgagccaacgcacccggccttattcatgtattttttaatgttctttactaacattatatagtttatttctcttcttggtaaatgtacttcttggtaaatgtacttcttggtaatgtacttggtaaatgtacttggtaaatgtacactggtattttatagtttttgtggcctttgaatgggacatcttaaaatttccatttcagttgtctatcgctgacataaaaaaaaagcctgttgatttttgtatatttatcttgattgcaggcacctcaacaaaattgttattctttttttttttcgaggccgagtctcactctgtcgcccaggatggagtgcagtggcgcaatgtcggcttactgcaacctctgcctcccaggttcaagcgattctcctgcctcagcctccagagtacctgggattacaggtactcgccaccacacctgactaattttttgtatttttagtagagacggggtttcaccatgttggccaggctggtctcaaactcttgacctcaggcgatctacccacctcagcctcccaaagtgctgggattacaggtgtgagccattgtgcctggccaaattgttattcttacaagttttggtctcgtgggtattgtaggcatacaattatatcatatacaaataaatataatttcaggacagggtgcggtgactcatgcctgtaaccccagcactttgggaggttggggcaggaagatcacttgagcccaggagtttgagaccagcctgggcaacatgacaaaaccccgtctctacaaaaaattaaaaaattagccgggtgtggtggggggcgcctgtagtcccagctacttgggaggctgaggtgggaggatcacttgagcctgcgaggtcggggctgcagtgagccaagattgtgccactgtacttcagcctgggcaacagagtgagaccctatctctaaaaaatatatatgtaaataataataataaattatattcccttccctcattacttagttcatgtttctttttatttttaactgctaaaacctctgttgaagtgctacatagaaatggtgacatttgcatccttgtgttcctgatttaatggaattagtttctgcatatcaacatttaatatgattattgctgttgagttttgggagctagtttttaaaacattatgttcaatttgtttcctttgatatgtgttttactttgaattattattcagaagaactgctaaattttgtatcatttttttcatttagtggcttttagctttaaaatgatggtgaagtttgtagatttcctgatattggcccactccctgaattactggactgactcccctttgtcagtgtgtttttctttgagtgtatgctcggttctatttatgaatttttaaaaataatttttataccacgcatatgcaaaattcttataagtttattgcttttttgtactgtcaggtttgggtattaaatgctaatttcgtaaagtgaattagagagatttctattttttccataaacttgaaatatttaaatagcataggaattacttgagctttaaaggttagagctcagttaagtaaaattccattgtctcttagagtcttttaaaacaatagatatttaattttctttttgattttttctttttctttttctttttttttttttttgagacggagtctcgctctgtcgcccaggctggagtgcagtggtgcgatctcagctcactgcaagctccgcctcccgggtcaacgccattctcctgcctcagcctcccgagtagctgggactacaggcgcccgccaccacgcccggctaattttttgtatttttagtagacacggggtttcaccgtgttagccaggatggtctcgatctcctgacctcgtgatccgcctgcctcggcctcctgaagtgctgggatttcaggcgtgagccaccgcgcctggcccatttgtctgtttttattttttcttttttcattaatcagacttgcttggactttatccattttatttatttttcccagagaatcagtttttggtttaatttagcctttctactacttttgtttgtttgtttcattttgttgttttcagtttttgtatactttcttaaattgaacacttattttcagccttttattttgataataaaaatactgaaagctgtaactttttcttaaagtacagctttgtttcccataggttttaaaagagaaatactctatattttgtttgtttttttaactttctagagaagttcgtaatttcatgtttaattttttttggttcagatattatttagtggtttttaaaaacttccaactactctttgtcatttttatgatgaatttctagttttatgaatttggcatctaaaatataattaatttgttatgtataaccttcattttggggacttaatgcatattttatttatggcctataaaaatttcacaagtacaaagttgtttgtttgtttgtttgagaccgagtctcgctctgtcacccaggctagagtgcagtggcgtgatttcagctcactgcaacctccccctcccaggttcaagtgattcttctgcctcagcctcccgagtagctgggactacaggcatgtgccacgacgcccgactaatttttgtgcttttagtagagacagggtttcaccatgttggccacgctggtctggaactcctgacctcatgatctgcccacctcagcctctcaaagtgctgggattacaggcgtgagccaccgtgcctggccaagtacaaagttttataacaagcatattacttattttgttgcgttgtattccattctttatttttgtccgatttgatcaatcaggttttgaaagaggtgttttacagtcgttcattctaagtgggtttttttctttttttttttggttttggtttcaaaatcaggttgtcctaggaaattttgttttcatgcatttggttgctataatgttggtttataaagatttatgtatgtcatgtataatttgtgagtttaaactttttaaaattgtattagtgtattttagagacagggtcttgctccgtcacccaggctggagtgcagtggcatgatcatagcttacagcagtctccagctcccaggctcaagtgatcttcctgcctcagcctcccaagtatctgggaccacaggtgccatcacatgccctgccgagttgcagctttaatcgggacataaggcttctttttgtcctgttctatgtgtttgccatgaattttgttttgcttaatgttgactgtactactgtggctctcggagagagggggcagttgaaaatcttgccaggtgtccttgggactgggtgtgcctggctggacgcagagctgcttgagaggggctgactgtggccggcgctttctgggcctgagtgtgtcctctccagctcccctgtgcccacctttgtttcacgcagaaccttcctcagcgggttccacagctgaggctggccgcctccaaacggggtccccgccagttgcaggctttgagccatgcctctgctgcttgtcctgggttcccttctgccatcaccctcaggaagcctcttctagaggagtgttccagctggctctgagactctgtctcctgcctcgccgaccatcaggcagacttgagtgcattccctttacctattttgtttggtggccccggtctgcaaaagaccctccactaccgtttgaatccgggaggcgtaggttgcagtgagtgagctgagatcgcaccactgcactccagcctaggcgacagagcaagactttgtnnnnnnnnnnnnnnnnnnnnnnnnnnnnnnnnnnnnnnnnnnnnnnnnnnnnnnnnnnnnnnnnnnnnnnnnnnnnnnnnnnnnnnnnnnnnnnnnnnnnnnnnnnnnnnnnnnnnnnnnnnnnnnnnnnnnnnnnnnnnnnnnnnnnnnnnnnnnnnnnnnnnnnnnnnnnnnnnnnnnnnnnnnnnnnnnnnnnnnnnnnnnnnnnnnnnnnnnnnnnnnnnnnnnnnnnnnnnnnnnnnnnnnnnnnnnnnnnnnnnnnnnnnnnnnnnnnnnnnnnnnnnnnnnnnnnnnnnnnnnnnnnnnnnnnnnnnnnnnnnnnnnnnnnnnnnnnnnnnnnnnnnnnnnnnnnnnnnnnnnnnnnnnnnnnnnnnnnnnnnnnnnnnnnnnnnnnnnnnnnnnnnnnnnnnnnnnnnnnnnnnnnnnnnnnnnnnnnnnnnnnnnnnnnnnnnnnnnnnnnnnnnnnnnnnnnnnnnnnnnnnnnnnnnnnnnnnnnnnnnnnnnnnnnnnnnnnnnnnnnnnnnnnnnnnnnnnnnnnnnnnnnnnnnnnnnnnnnnnnnnnnnnnnnnnnnnnnnnnnnnnnnnnnnnnnnnnnnnnnnnnnnnnnnnnnnnnnnnnnnnnnnnnnnnnnnnnnnnnntctcctctcttctcttctttcttttgatggagtcttgctctgtcgcccaggctggagtgcattggcgctatctcagctcactgcaacctccgcctcccaggttcaagcgaattctcctgcctcagcctccagagtagctgggattacaggcatatgctaccacgcccagctaatttttgtacttttagtagagactgggtttcaccatgttggccaggctggtctcgaactcctgacctcaagtgatccatccatctcagcctcccaaagtgctgggattacaggtgtgagccaccgtgcccagccttgtttttttctttttctatccaacttatcttttaaaaaattttattcagcctttctcttcaggaaacatctttttcttttttcttttcttttttttttttttttgagatggagttttgttcttgttgcccaggctggagtgcagtggtgcaatcttggcttactgcaacctccacctcccaggttcaagtgattcttctgcctcagcctcctgagtagctgggattacaggcatgcgccaccacgcccggctaatgttttgtatttttagtagaaacggggtttctccgtgttggtcaggctggtcttgaacttccgacctcaggtgatccgcccacctcggcctcccagagtgctgggattacaggcatgagccacctcgcctggctttgtttttctttttctatccaacctatcttttaaaaaattttattcagcctttctcttcaggaaaaatctctttttatatttcaattggtttatattctgttagcctcatcctccctaccaatcctgttctaacagtgagacagaatcatagttttcagactctccattgcatctttgattttctgagcacacttgattcctagaaataaagagttctgttaaatagagtgaaccccaagtttctcttcaaagaatcagtatgtcagtctgttcagcttcctgttctttgattctccattttaaagtttaacttcctggttctcttcacccccttgcctctagtttcagtaaacaactttcccgccagtcctaatcactagttcacatctgttmccctggtcacctgctccatcctgactcatctcggtcacctgctttgaccggagtcacctttagttacctcttcctaaccgtccttcccaccaaactgctcaccccgccactctggctcgtactcctgctctttttaaaatagccagtcggaattagcttagactgtgtggtccaaccctagccaataagggaacgacacagcagtagggactacctgcctcagggataagacctcctgtccctcccgtgtccaggtatgctcttgccatggctccacctgcgagggtcaccctttatgcaaaaagtcaaaactgccttgctgagaacattaaatggatgctcgagtgctatttctctgtggcactggggaacaagcattttgcatttctaacagtccaggcaccagcctttaaaaaaaaaatagaaaaaagatagataaaatagtcaattaaaaatataaatgcatatttatccactatactttaaaaatagctttatttaggtataagttacctaccataaaattcactcactttaagtgtactcttcattgaatcctagtaagtattcaccacgtggttgcagagcagccttttagggtgttttcctcactctagggggcccttgcatccctttgccatctttcccgcctcaggcccagccccaggcaagcgctgatctgctgtcacgtaatttgccttttctagaattccttataatggaattaggagcagtgtcctcttttgtgtctggcttctttcacttaacttttttttaaagattcattcgtctttttgcatgtatcaccagttcattcctttttattgctgaatgatattccaaatatattccgtgtagggatagatcgtaatttttttatccattcacctgtcagtggacattcgggttgtttccagtttttgactctcacatataagcctaggaggaacacgcacttacaagactttgtgtggacacatgctggctcttttcctaggtaagtacctaggagtggaacggctggattgtatggcaggtgtttacctttttaagaaattgccaaactgtttcccaaagtgtgtggaccattttatattccccctagtagtatatgaataggttccagtttctccacatccttagcagccagcacttggtatgatcggtctttagccatcttaggaaggcctgtaggagcatctcactgtggttttaattgcattcccctaatcactaatgaagttgagcatcttttcatgtgcttattttctatccatttttctttgacagtgtttgttgacatcttttgcctggtgaaataaaaaaaaaaaaacctgagttggagaattctagatagaagttctgtatcagatatgtgatttgaaaatattttctagtctgtggttatcttaacagtgtcttttcaggagcagaagttttaattttcatgaagcctaatttaccagtttcttcttgtatgaatcatgctattgtatctgaaaagtctttgcctaacccagaattacaaagatcacacacaaagatgttttttctatatttccttctaggaagtttctggttttagatttcacatttaggtctacaatccattttgaaatttttttggtctgttgtacaaataatggatgagagttcatttttttgcatatggatgtccagctgtttcagcatcatttttgaacacattatcctttctccactttatgatcttcgcctctgttgaaaatttattaaccatgtatatgtgaatctatttctggcattctgtaagattgttccatttccacgctgtcttaattgctgtggctttataatacacgttaaagtcaggaaatctaaatctttttgtctttttcataattttggctcttctaggttctttgcatttccttatgaactttaaaatctgcttctcaatttctgttaaaagcctcttggggttttgattgacattacattcaatttttagatcaattttgggagaactgacatattaacaatactgagtcttctgattcatgagcactattaatgtctttaaaattttctctctgcagtgttttgtggttttgatgtacaggtcttgcacatctatcagatttattcttgagtattttatattttttgaaataatttttttttgagacagggtcttactctgtctcccaggctaaagtacagtggcacaattatagctcgctgcaacctctatctcctgggctcaagtgatcctcccactatagtctcccaagtagctgggactacaggtgtataccaccacccccagctaatttttttttttctgtggagatggggtcttactatgtttcccaggctggtcttgaattccttggttcaagtgatccttctgccttggcctcccaaagtgctgggattgcaggcgtgagccattgtgcctggcaggattttctcagagatgattattttgcctgagaatgaagggctttaatctttttcccttacagtctgtctgtgttttatttctttttcttgactgactgtgctgctacaatctccatgttgagtccaagtactgagagaggatgtcctgtatcagttcgttctcacaccgctataaagaaatacctgagactgggtaatttataaagaaaacagttttaattggctcacggttctgcaggctgtacagaaagcatgatgctggcatctgctcggcttctggggaggcctcaggaacttacaatcttggcagaaggcaaagggggagtgaacacgatatggccagagcaggagtaagagagagaaggggaggtgatgcacactttttttgttttagacagagtctcactccatcacccaggctggagtgcagtggtgtgatattggctcactacaacctccgcctcccaggttcaagcgattctcctgtctcaacctcctgagtagctaggattacaggcgtgcgccaccacgcctggctaattttgtatttttagtagagacggggttttgccaagttggccaggctggtctcgaactcctgacctcaagtgatccacttgcctcggcctcccaaactgctgggattacaggcgtgagccaccacgcctggctggtgatacacacttttaaaatgaccagatctcatgagaattcactgttgcgaccaagggggatggtgtaacactatgagaaactgcccccatgatccagtcacctcccatctggcccttcctccaacactggggatcacaattcgacatgaggtttggtggggacacagatccaaactgtattacatcccttccttgtttctgtcttaagagggaaagctttcaggcttttaccatcgagtatcatattagctgttgtagccactgagattctttatcaggtcgaggaagttttcttcttcccaagtttactatatagaaccagattttcaccttggatctgttttccttattcctaaagtatgtccttcatttcttgtactgcacatctgctggtggtgaattctttcagttttgtacatttggaaaaatctttgtcttttttctttcttttttttttttttttagactagagtctcactctgtcactcaggctggagtgcagtggcctgatctcagttcactacaacctccgcctcccaggggttcaagcaattctcctgcctcagcctcccaagtagctgggattacaggcgtgtgccaccacgcctggctaatttttgtatttttagtagagatggggtttcgccatgttggccaggctggtctcaaactcccgacctcaagtgatccgcctgcttcagcctcccaaagtgctgggattcactctaatacactaagttcactctaatacgacgaatacggatgaactgctggttggccttcgcctcctccagcacgcgttctgattgttgctggcctgcctgcatggcccggggagggctcctcttccttctccctgctgcagctctgttgtgcccccggagtattctgagcccgttttctagttccaggcctgcgtcagtgtagggtgacaggaagggtcctctgctgcactccacctcaggaaaagcaccgtctgtggaggagaatctgaactgaggaggaagccctgcccagcagcctgggggctcccagggatgtctgctgcatggagactgcagaaacctgtggtggggcagagagttccagtttggccgtgtgttgactgccctcatgcagactctaccagcggccaaagcggtgtctggagacgacagtgtgtgtgcctagggcacacaggcacggagacaccgccagccctttgtgttgtgatcagggctggcgggaggctctgactagggctgtgggaaggggacgtgtgcactgtcctctttctgagcgttgctgtggtgggagtcctgtcacggggagcagtcatggaagaggaccggcccctcctcccaggtacaagcacaggctcctgtgcactccgactcgctgttcccctcatctggcctccccagagcccaggcactgcctgctaaccccagaccttctgtggtccacttaggactcttgcccaccattggtcctgccggccggcccgcccaggctgggctttctcagggggactccagctgcccttctgccccatgaggagacactagctcccttggcctcattcccttactggcaactgagggtctggttcttagagtcccttatgtgtaaacatgtaaagcttgtggctgtgaggtgtgtttggtaagaacagtccacagctttcaccagattctcaggagtgtcagtggccccttcccggtcaataagttgaagagccggggtcagtctggctgccactgagggccaggctgcctccttgtgtgcttgggtggcctgactgcaaggagatgctctcactcagccctggacacacggtgcagatggtgtggcgggtcagccccacagggccacctcctcagtcttgggttctcagcctcagctggttcacatttggggccagaagattcctcctggtggggccgtgctgtgtgttgtaggatggttagagacctccaggcctctacccaccaaatgccagcagttctcccacccttatcagttgtgacaaccaaaaatgcctccagacattgcctgatgtcccctgcgggcacagtcttccgaagtacagagccactgatctatctgatcttagaaagagactgtagtcattgcatttccgtaggaaaaggtgttctgagttagaaataatgtacaaatagttttttgccttgtatcttctatgcaccttctaattattattttactagattacagtccctcatgtgcaaactttgcacacctggaagaagagtttactagtaagcaaaagcactttttttttttttttttttgagacagagtctcgctctgtcgccaggctggagtgcagtggcacgatctcggctcactgcaagctccacctcccaggttcaagtgattctcctgcctcagccacccgagtagctgggactccaggtacctgccaccatgccagctactttttgtatttttagtagagacgggccaacatcaccatgttggccagatggtcttgatctcttgacctcatgatccgcctgcctcggcctcccaaagtgctgggattacaggtgtgagccactgcgcccagccaggaaaaccactttttaaaaagatgcctttttttccgtgtggatataaaaatgccacatagtaattagagaacatctagaaagcataaaaaagtataaaaagggaaaaaatcattataatccacctaacccagagaccaccacctgtggacacattttgagtctttttattacatctttaaaattacataattttggatcttgaatttttccatttaaaatcaaacataaagagtgtgtttatcaagcactctttatagtggttttgctggcaagcgtcgcttcgtgcctgcctggctcgccacacctcgtgctggatgtgagcttgcaccgttttcacgtaagcactgtctactgtgtccctgagcatcaggcgttaggagaggcggcttctgtagtgggtggtatctttgcagctttttgaatgtttcccttgaatttctatgaaggtgatgatggaaaagacatcaggtctaagctgtccataaaatgcatttgtctgtaatacatgtccttcattaaaaaacacgtggcagttggggtctactgtcatggtaggaaggtgggagctggactctcctcccagccggggtcaggccacacctggagtgcctcaggtgcactctgtgcccgtgtttccagcctgtctctggaatgactacttctgaacagattccctttgcctttttctaccaggcagtatgcactgagtccttcaggacagattaaatgatgaaaaccgtccatcaagtgttcagtcttcatgcaggatcacatccgtggaactgatgttttagcactggggttgatagtgtccaagtcccagattcaggggcaggctcaggacctgtccacggtgttggcctatagtgaggcccatgggcctcggagcccgtgtgcctggagctggaccatggctccaccacttcgtagcttggcccgatgtgggcaaaggattacctaggtgccgaggcaacagactgaaggcacaaactgtttcagtataataaagaaaatagttagaataagaatagtcataatacgaatcagatacagagctgatcatggacaattatcaatcattagtataaacattattaatcattaacttttaatattactctgttgcattactaatataacctaggaataacctgcgggtatagggtcaggtgctgaagcgacattgtgagaagtgacctagaaggcaagaggtgagccctctgtcatgcccgcataagggccgcttgagggctccttggtcaagcggtaacgccagtgtctgggaaggcacctgttacttagcagactgtggaagggagtctcctttccttggaggagtcagggaacactctgctccaccagcttcctgtgggaggctggatattctccaggcctgcccgcagtcatccggaggcctaaacccctccctgtggtgcttcaatggtcacactccttgtccactttcatgctcctcctgcactcctggttcctctttggagttcttagtagatagcagaagaagaaatagtggaagtcttaaagtctttgatctttcttataagtgcatagaagaaaacgctgacatttgctgccttccctctctgcttcagctacctaaaagggaagggccccctgtcgtgtgatcacgtgacttgcttcaccttgtcaatcacttagaagattcaccctccttaccctgccccctcgtcctgtatgcaataaatatcagcgcacccagccgttcggggccactaccggtctccgcgtgttgatggtagtggtcccccgggcacagctgctttctctttatttttttgtcttgtgtctttatttcttacaatctctcgtctccgcacacggggagaacacccgctaagccctgtagagctggaccttacagcccagggagctcatttctcgctgcctcagtgtctctctgtgtaaatgggctatcaataggagtgaccccatggcatgactgtgaaaactaaatgagatcacgtaaggggcgtagagaacctttgtgaccctgagccaccgtctgccacccgctggggatgccctgctgtgctgtacttctctcccttctccccctcccatgctcttcatcgctagcactttcagccccttgcggtagacttggattaggcaggtatgaatacttcagttcgagaaaagtgtgaggcagggaagcttccgagcatctcttgctgagcagatattctgatctgagccttttttgccctgggtagcagtctcgtgcctggggtttgctgggcccgcattggcccctcctgagccacctttccagacacctgtgcaggctccgaaaggcgcccgggcatggagctcacctcactcaactctaacttttctgcatttgtttagggagcatttcctgaagacgtagtcatgcagcacgtcagcagctcccagagcagccagcgccatgtccagtggcctggggcctgccccggcgcgggcgaggagcagccagcgtgctcccagccgtccctgcccctcacactgccatcccccagccaccaactacagcagctgatggtgagagggggccctgcrggtgggcagaacatgaatgttgacctgcagggcgtgggccctgggctccagggaagcccacaggtcacgctggccccactgccgctccccagccccacctctccaggcttccagttcagcgctcagcctcggcggtttgagcatgggtctccatcatacattcaggtcacgtcccccttgtcccagcaggtccagacccagagtcccacgcagcccagtccggggccggggcaggccttgcagaatgtgcgtgcaggtgcccctggccctgggctgggcctctgcagcagcagccctacaggggrcttcgtggatgccagcgtgctggtgaggcagatcagcttgagcccctccagtggtggacactttgtgtttcaggatgggtcagggctcacccagatcgcccagggagcccaggttcagctccagcacccgggtacgcccatcacagtccgagagcggagaccctcccagccccacacacagtcagggggcaccatccaccacctgggaccccagagccctgcagcygcgggtgggggccggcctgcagcccctggccagcccaagccacatcaccacggctaacttgccaccgcagatcagcagcatcatccagggccagctggttcagcagcagcaggtgctgcaggggccgccgctgccccggcccctgggcttcgagaggacgcccggcgtgctgctccccggggctgggggcgcagcggggtttgggatgacgtccccacccccgcccaccagcccttccaggactgccgtgcccccaggcctttccagcctcccactcacgtctgtggggaacacgggaatgaagaaggttcccaagaagttagaggagattcccccagcctctccggagatggcacagatgaggaagcagtgcctggactatcatyaccaggagatgcaggctctgaaggaggtcttcaaggagtatttgattgaactgtttttcttgcaacactttcaagggaacatgatggatttcttagctttcaaggagagactgtatggaccattacaagcatatcttaggcagaatgatttggacattgaagaagaggaagaggagcactttgaagtcattaatgatgaggtaacagttctttgttttggtgcttgtcatgggaggcagagctcagggcttatgctgcgtgcaggtgcaacgcagagcttaccatctcagagcatgcgttctaggcacttcactttaaagacacactgtggctgtgaatagtggtttaaagtccctcagagtctccccacatttacagagggtggttccagggatcccagcacatggctgaacccccagcagcatggaaactccagtggtgttcagtcaggcacctctgtggcaggtgctcacggcggcagcgtcctggcacctttcttggaatgccaccacatttgcctgctcctaaacggttgtgccgtgcaagatgagaaccccagagtccacccttgccagctgcctgcagtcagggctggctggtctcaaagccaagattccaagttcctgaacacacatctcaatgtcaagagtttctgaacaagttacagctctaacttagaatatacagagcaaaaatttatagaatttcattttctttctttctttctttcttttttttttgtgacaaagtcttgctctgtcgcctaggctggagtgcagtggtgcgatctcagctcactcactgcaacctacgcctcccggattcaagcaattctcgtgcctcagcctcccgagtagctaggattacaggcatgtgccaccacgcccggctaatgtttttgtatttttagtagagacagggtttcaccatgttggccaggctggtcttgaactcctggcctcaagtgatcagcccgcctcagcctcccaaagtgctgggatgacaggcatgagccactatgtgtagcctatttagagaatttcaagggagcaggttttttttgttttgttttgttttgttttttgcttttgagacggagtctcgcactgttgcccaggctggagtgcagtggcatgatctcggctcactgcaacctccacctccctggttcaagcaattcttctgcttcagcctcccaagtagctgggattacaggcacccgccaccacgcccagctaattttttgtatctttagtagagacggggtttcactatgttggccaggctggtctcgaaatcctgaccttgtgatctatccaccttggcctcctagggagcagtttttaaatccacaattatatgaggagttactagcttttttcttagaagacaataaataattataagtgtagaacatgaactattcaaattaacacaaattagcctgtttaagtgtataacacacatgtatatgtatgtgtgtgtaaaaactttcaacaaagaataatttttttagagtatacatggagactatttgtaaattgacccccaaggggatcctcaataaaatttataaaattaatttcatatgaactgtcctctccctataatgaaataaaattagaaagcaattattttaaacatttactatgtgtggaaactaggaaacttgcccgtaaggtattcataggttgaggagactatcttcatggaagcgtcttgaagcacgccacagcggaggtgccgcagccttcaggtcttgtgggatcagctgaaggtctccttagaaaggtcattatggcattcagttaagaaatactgcagataagcagtgtaacagcttccatagtcacatgaagagtaagttcatcgttgtattaaagtttacttctaaatgatagaaataagtttttatagaacctgactagcgtcttcggaatctatgttttatcatcattttataggaaaataccggaagttgactaacatttgggtttttcgtgaatattttcctctgtgtaatattgctcatcttccagctgctcgttgtgttgactctgtaacatgatccctgttaccaaacttcattagagctacaaaatatttgggggctagtaactatagaattcatccaaattatttaaactaattagctacatttgcctatggcttttttacttggggaattggtgctgannnnnnnnnnnnnnnnnnnnnnnnnnnnnnnnnnnnnnnnnnnnnnnnnnnnnnnnnnnnnnnnnnnnnnnnnnnnnnnnnnnnnnnnnnnnnnnnnnnnnnnnnnnnnnnnnnnnnnnnnnnnnnnnnnnnnnnnnnnnnnnnnnnnnnnnnnnnnnnnnaggtcaggagatcgagcccgtcttggctaacatggtgaaaccccgtctctactgaaaatacaaaaaattagccgggcgtggtggcgggcacctgtagtcccggctactcgggaggctgaggcaggagaatggcaggaacccgggaggcggagtttgcagtgagccgaggtcgcgccaccgcacttcagcctgggcgacagagcgagactccgtctccaaaaaaaaaaaaaaaaaagaaaacatttaattgtggtaacatatacaaaacataagatttactgtctatstgattcattatttttaaagttaatttattccagggtactgacaaatattaaggtttggttttgattatttatgatgatatgtgcttgtttatatttagccttctggacatatttagccagaagaaccagtttctttttcttttcctttttcttttttagacctgtcagccagaagtaagaaccggtttctattttcytgtatttctctctatgatttcaagctgyaaagtgccatttgactttgagttcatttaatttccagggtattcccatttgaataccctggacttgaagcagttaatgtatctggaaagcttctttggtttgcttactctaagaagctgtcattatggagatgcagattaatttgtctttctgttttatcagagtgtgtttttaagaaatgacacattttcartgggagtgttttttgtcattcttccccatgccccaccatggcctcctcaggcatctgcagcccctgccgtgaggggttggccaccctctgacactgcccctgggctcctgcacgaagctgtgtggacatggcctgtgtagcctgaccatggctacctgccggccacagatcgaggtttcaactggacttcaaacaaagcttcagtgcctagggccagatttgttctttccagccctgtgaggcctgaaattgcatcagcgagccaagtgtccccgtgcccctctgttagtggctgaggccgccagctgcatgggatgtgcaggcggtgatcaactttgcaaagcttaaacattattttcccttcttcctcccttccctttgaatattccctctcaggtaaaggttgtggccagaaagcacgggcagcctgggactcctgttgccatagcaacccagctaccgccgaggacttctgcggcttttccagcccagcagcagccgctccaggtactttctgatggctccacagtgcagctccccagactttcctcactcggatttgaggactcgatgtgctgaggcaggacccagaggggtcccaagagcctgtcctcttttgttcaaaatacatcttgaaacgtctttgtgaaggctcttagttttaatgcatggatgctgttatttttccctactgttactgaaattaaaaagtgtttgtctctgatcattagttctgttaacttttctgctggaatgtttttcatttgcatttgcttttctgatatatttgcagttttcattgcttctgtacgattgtggcctctttggatgtttctcttttttttccccctttgtctgcttttaaacaaacagattttctaaattgttttcttgctatagggagttgattttgttctttaaacatattctaggggatgagtagcaaaaaacaatgatttcagatttcagaatacaaggaagttcctggaaactgcaactcagttatctctcctctcctctcctnnnnnnnnnnnnnnnnnnnnnnnnnnnnnnnnnnnnnnnnnnnnnnnnnnnnnnnnnnnnnnnnnnnnnnnnnnnnnnnnnnnnnnnnnnnnnnnnnnnnnnnnnnnnnnnnnnnnnnnnnnnnnnnnnnnnnnnnnnnnnnnnnnnnnnnnnnnnnnnnnnnnnnnnnnnnnnnnnnnnnnnnnnnnnnnnnnnnnnnnnnnnnnnnnnnnnnnnnnnnnnnnnnnnnnnnnnnnnnnnnnnnnnnnnnnnnnnnnnnnnnnnnnnnnnnnnnnnnnnnnnnnnnnnnnnnnnnnnnnnnnnnnnnnnnnnnnnnnnnnnnnnnnnnnnnnnnnnnnnnnnnnnnnnnnnnnnnnnnnnnnatgttttaaaaattaggttaaaatatacataagagttcccattttacccatttttaagtgtacagttccgtggcatgaagcacattcacattgctgtgtggccatcaccagcatccatctccagaacattttcatcttctcagactgaaactctgcccctatgaaatgctaactcccccattccccctcccccagccccctggcacccaccactgtactgtctgtctctgcggattggaatgcacttctccagcgacctaagtaagtggaatcatacagtatttgtccttttctgtctgttgttgtactcagcatcatgtcttcggagtgcatccacattgtagcctgtaacagaatttccttccttttgaaggctgagtcacacgccacgggatgggtggactgcatgtgttgatccatctcttggtggacacttgggttgcttccacatttcagctgctgtgaacagtgctgccctgaagacgggcgtacagatatctcttcaaggtcctgctttcagttctcttgggcatatacccagagtggaagtgctgggtcacgcactaactctgtgtttaactgtttaggaaagtccatgccattttcatagtagctgcaccattttccatcccaccagcaagaacgagggttttctttctccacatccttgtcaacgcttgtacatttttttaatagtggccaccctaataggtgtgctgtatgctttataatgtaatagaaaaatattactgactatgcatgtacatatggctaaagacattcagagttggccgggcacggtggctcacacctgtaatctcagcactttgggaggccgaggcaggcagatcacctgatgtcaggagtttgagatcagcctggccaacatggtgaaaccccatctctactaaaaatgcaaagattagccgggcttggtggcgggcacctgtaatcccagctacttgggaggctgaggcaggagactcacttgaacccaggaggcggaggttgcagtgagccgagattgcgccactgcactccagcctgggcaacaagagcgagactccatctcagaaaaaaaaaaaaaaggacatttagagttttaatctgttaatcagctggcactgttgatggttcaaaattgactagtgagggagacagcatttgaaaaaacaactttaactcagagtagcaaatggcattggtgacatatgcagaatcccacaggaagagtgtggagggatgcatgggctcctgggagcaggatgcaggctgtggggtggcccagtgtgctgtacctgtggccggcagggctggcgcctctggcctggccccagcaagcgtaaggacccagacagaacacagggctgctctaccctactcttctcatgtcatgttcttaatgttgagaacacaggttgagttcagtgtgattctccaaacaaactggctgtgggcagtgtcaattttcttttctccaatttctttatttatatattcttttgagacagagtctccctctctcacccatgctgtagcgtagtggtgtgatctcggctcactgcaatctccacctcctgggttcaagcaattctcatgtctcagcctcctgagtagctgagattataggtatgtgccaccgtgcctggctaatttttatatttttagcagagagggggttttaccatgttggccaggctagtctcgaacacctgacctcaagtgatccacccgcctcagcctcccaaagtgctgggattacaggtgtgagccaccacgcctggctcttttttccaatttcttattgtgaaaaatttgaattattgaaaatgttgaaagagcagtacagtgagtggtaaactcaccagttgttaatagtttgccgcatgtatgtgttctacctgtctgtctatctccacacattttaaagttgtcacagtcgtgattgtttttgtttacccctggatcctttgttgtgtatctcccaacaagagcatgtcccacatgaccacagccctccggtcacgctcgcgggcatccacacctctcgaggcatgttcctgcctgggtctgcttttctttctctcccgacgctgatgttttgaaggccagttgctctgcagaggccatcacagcctgggtgttccgtttctcactgctgacttaggctgaacatttctggcaagaatacaatggaggcggacctctgcatgcatttacttctcaaccaagccgtgcaggccagttagggagatgcagatgcaggtgggctgggtgccgtgcgtctcatgggagggtgccctccggggacactctggacagaggcactctctgtcatgtgctcagcttggccccagactgaggcttagcagtcctccagttgttcaccgtatgaagagcaggagaggataaacaactggacgactgctgaggagaggccagcagtagggagtggaaaccaaaaactgagcttttacacgaggccacatgtgcagcgccctgcgccaggctgaaacccctgtgtgcagcgccccatgccgggctgaaacccctgtgccgatgcccctggagagcagtcgtggggcagggcctgcccttgttcagtaagaggatgaacctggccgtctgcctgactcagcctcgtatctccatgatgagttaacatattggctcaaaaaaacaaatttcctttaacatcttaaatgaggtaaagaaagaaaagtgggctgggtgcggtggctcacacctgtaatcccagcactttgggaggccagggcaggtggattgcttgaagtcaggagttcaagaccagcctgaccaacatggtgaaacccccgtctctactaaaaatacaaaaatggtggatacctgtaatccaagctacttgggaggctgaagcagaagaatggcttgaacctgggagccggagggtgcagtgagccgagatcatgccactgcactccagcctgggcgacagagcgagactcttgtctcaaaaaaaaaaaagaaaagaaaaaagaaacgaaactggttttgttgttgttgttgttgttgttttaaacagggtcttgctctgtcacccaggttggagtgcagtagtgcgatcttggctcactgcaacctccatctcctgggctcaagcagtcctcccacctcagcctctctagtagctgtaactataagcaccacaccaccatgctcagctaatttttaaaatttttagttgagatggcatctcattatgttgcccaggctggtctagaactcctggccttaagcgattctcccacttcatcctcccaactagctggagttacaggcgtgagctaccatgcccagctaaattttcagctttttatttaaaaaaattaatgttgtccagcctggttttttgtttgtttaagcatcttttccagccttttttggtatttctgaaactcagcctgctgcagcattctgacagtctttgaagtaatagtgcacactggttttaattgtgaacctgtctgaatctctgttcctttttttttttttttttttttggagagagggtcttgctctgtctcccaggctggagtgcagtggcacgatctcagctcactgcaactttgctcttccgggctcaaaatgattcttctgcctcagcctcctgagtagctggtactatcagcatgcaccaccacacccagctaatttttgtattttttttgtagagatgggatttcaccatgttgcccatgctggtctcgaattcctgagctcaagtgatctgcccacctcggcctctcgaagtgctgggattacagacatgagccaccacgcccagccaaatcgccattctattttggtctctgaaacttaacattttgcttgaggaagggctcatatacaaggatattgaaacaaatgttgttttatatgataataatgcctgaggatcaacacatatacatttcctatcccaatatcccaaaaatagcaatcagtgtatttacagatgctgcagatccctctgaggagttgattctgaggctgtccctgaggacccatgccaggagatgtgtcccggaagtgactgtcacagatgcagtcccccagatgatgaggcaaggcctgagggtctgcgcttgttgggggaaaggtttattacaacttctcccaagcaaacagatggaaagcaatacctagagcagctccagtgcttgtgtgtgggacacctctgcaggggccttgtgtggctttgtcctcatttcagttagagttgagagtacaacccattttcatgtatggtggactttataaaacctaagtctgctttctactcagtaaacgtttagacatttttcttttcacattattctccagttactaagattttgtctgttgtcaaatccacataagccttctgttttttggtgaagacatattatagacttagagttttatttctttccacaaatactttgacattgtcatttttgccttagtttatacaactatttttctaagctctagatttagttttcacatggatacctctggtgttttaattctggcttccgcttttggttagcagttgtgacttagatttcttatctacaaactacttctgaagcctggttctgttgtgctgcctttagcaagtggtacacagaaaagtactaaacgatgaaaagattatttttgttcctttctgtcaaattcaaaggctaatatggagggttttttgagtttatttatgatcactggccaatagctctaagctgtgatatcatgttctttgtcatagaaattgaagagacagtggagaaatacttattttaaaatcagtgtgatataaattaacacacatttctacttcccataatttttgtctcctaatagcaaatacatatggggactccagtacctggagatgtgaattccataaaaatggaagcatctaagaggcagtgaacactggcgcccacaggtatgtagcagtcacccagcatgaagccagcctgcaaacaaaaaggaaaccatgcaggccttctagcagtgtattttccaacttttttcattttaagtaagtcaacaaatagctaccaaatggcttctgtgggctcacggggtcacccctgtgcctcctctcagttcttgcttggagcgaagtgactttacactcagccatcattttggccacttagtgccttgagctggaggcatgggagcgggcctggggaggccacgggcactcatgtagtggcagggcctgggcctcagctctgtgcccaggagcttc

SEQ ID NO: 96455 - DNA, 13371 bp, Homo sapiens
attctcctgcctcagcctcccgaatagatgggtctacaggcgcccgccaccatgcccagctaattttttgtatttttttttttcagtagagacggtatttcaccatgttagccaggatggtcttgatctcctgacctcgtgatccacccgcctcggcctcccaaagtgctgggattacaggcatgagccaccacgcccggccaagtggaatgaattttcaagagcattgaagttaccataaggggcctagaaatactctgtatacctatatagtgctctaggtattgactagtagtgatttccagcatatcagttcagttaccaaaataaataataatattgttcatttttgtggtgttagtagctgtcttagaagagattgtaacacttgaaattttggtaaaactaaaaatactctacatacattaacttcattactcattttctgtttttcatgttaaaatgttgtttaaagaacaaaattaaatgattttcttctgatattttattctgtgaatgtattttgggaatttttttccccattttccttctacactttatttggtatgtcatcatccttagatttgatatgtagtaggtttagagaatatctttgctttttacatttttttcataagttttatatatgaaatatcatggaaagaagttctaggttataaatatattaataatggcatatatacatttatagcatctctgttttcatcaaactgtttcatagttctattataatttttattcacagacatttaatgattacccttaatattcatgacaggagccctctggcacaaatggaagaagaaagaagggagcaagtagctaaaattaagaagatggagatggagatggagcaggtgtttgagatgaaggtcaaagaaaaagttcaaaaactgaaggactctgaagctgaggtaatcagtccaatattccatctcttagcagacattgtgttcctttttaaatagtatcttcagtaaaatttatagataatataaccttcttatacatattttttaaaaattaataccctagcataacaaaatggagaaatttctacaagcaagcactgtttacaataaaataatatagacttcaatacataagtgcttggacatagtgtattaggtatgacagcataatagagtacttacaatgaattattaaagttataatgaacaagtgtgagttgggaaaaataaaattataagccattccatacaggtggcataagaacactaaaaatgagagtttggggtggatgtatgcacaaaaactagtgttaggataataataattgaccagacttatttgtgtatgaatgaaaaagagggaaataacctttactgaactaaagacatgcctggataaattacacacagttaaaggagagaaaattagggaatgtgatatttttgctaacaggttgggccttatttataatgtagtgtcaaggaaactcctagcgtcgcaacattgggcagggtaatgacaaaacatcccagcagacatatctactatcttgaaacccttctagatgtcgagttatacatttagtttctattagtcaaaaagaccttggagacatttccttcattaggtggcaagaaagaaaagatggagaaaaggataaacttaatataagaatccacagagcagtagtttgatagatatctgagaatagtaggaaaaaaattgggtaatcccaaaataaatcagtgatttcagtatgaagttttctcaacataaatctgctataattaaaaattacaggccttcaggaagtgtcgagtctgggacgcccagcgcgggcccgagcagggggaagggaagcgcagctcggtccgcgtgggtggaggggacgtgaagccgccctgagatgatggttgaggaagggctctacggctcccaagctaggccaaatgcctccggcggccgcgcccgggcgccccttcccctgtggggcaaccctagcttgggacgcgtgaaccacctccgtagctgccccaccagcacccccagccgtgcgcccctgcaccatgcagctgccctgcgcatggagccgcgagggacagcaggcccagccctcagcaccacctgcctgccaggaggttcgggaaactggcgccgcagcggagagggcatctgtccaacgcctcccccggggctcagctgcgggcccccaggcataggcacccatgacccttctgtgttgtttgtctttgtatagtctgcagatgtggatcctgactcctgagagaagtagctcaccgtgacgaagctgcgtttgcttttatcgatttgcaaatcaaagaagggggacatattgggagaaggccccccaaaatctggccataaactggccacaaaactggccataaaatctctgcagcactgtgacatgctcatgatggccataacgcccacgctggaaggttttgggtttaccggaatgaaggcaaggaacacctggcctgcccagggcagaaaaccacttaaaggcattcttaaaccacaaacagtagcatgagcgatctgtgccttaagggcatgttcctgctgcagataactagccagacccacccctttatttcaggccatcccttcatttcccataagggatacttttagttaattgaatatctatagaaacaatgctaatgactggtttgctgttaataaataagtgggtaaatctctgttcggggctctcagctctgaaggctgtgagacccctgatttcccactttacacctctatatttctgtgtgtgtgtctttaattcctctagcaccactgggttagggtctccccaactgagctggtctcggcacttctctttgccttaaaaacaggtacagcggaccttcctggcatcagaaaaaggcctccagaaaaagagacacaggtactagcaattccaaattatccagagcccttctaagttgtaagatctgaaagaaatgtctgccatctatattctcagccacacttagtttcttaatctgcaagatggaattaataatagtacttactttatgatgctgttgcagaaattcactgagttgctacacgccaaacactgagaacccagctgggcatataataagcattctattgcatggcattattgccatcatttttacttctattactgctactgcttgtaactgcttgtaactgtttgtgcttttttgatatgaaagtccaccatcagggagcactgtagtggaaaaggtattaggccaggcatagcctttagttctctggccttgggtccttcatctgtgatattcagttaacaatacctagccagtaggggtgttaaagattaaataaatgtgagaatgtgcctgttgcttaatcttcctcaaagggttatggactctcagagccagaagaaggtcatctctcctttgctcctcgtatgctgggatctgccacatcaatggcaacagctgggcctccagaatttgctccagggtgtttggaagtcctgacaccctcctgatcttctctgtaacatgcacactttggcctgtgtcagtttgctggaaccacatcaggccggccctcttcctgggacaaaattctttctttttctttctttctttttctttctctttctttctttttctttctctttctttctcttttcccttccttccttccttccttccttccttccttccttccttcccttttcttttcttttctttctactgtgacataatcttggctcactgcaatctctctctcctgggttcaagtgattctactgcctcagcctccaaagtagctgggattacaggtttgcaccaccatgcccggctaattttttgtatttttagtagagacagtgtttcaccatgttggccaggctggtctccatcacctgatctcaggtgatccacccacctcagcctcccaaagtgctgggactacaggcatgagccaccacgcctggccgagagacagttaagttatactttaaatgataataggcctcccccaaaactcagctgcttttgtaaagctaatgggaggccatcaggctgggggcaaggaggagagcccggatcctgctaaggtgcagacataaacgagtatcagccattattctggaggttataagatatgcaccttccccaattacccctgcaatcacaccattattgtagattggcccttagagtatcttttcaggttttttggcatgtctgacactcatggctctacttggacccaccaaccctgctcctatggctccacccagaagccattcagcctagaggacagctctgaccccccctgtgatttcatacaatcagcagcaagtaactgttacctcaccatccccaccccttctgccagactgcctttgaaaaacctctaacctgtgagcacgagatgattccagaacaaactctgtctcccatgtggcatgaccagccttgggtctcttaaactttttctccactataatgccatggtctttatgcagcaggcaggaagaattcaggtggttataattccgtatgtgctttttgaacatttttctactgggctattgctctcttcataatgatttttttaacttctctctataaggaactgatttcatctgaaattgaagagacaatcagagaaaaactatagaccactcatgatggttgttatatgtgcttggctgggccatgggtcccagtgtttggtgaaacacagcagcagatgtccctgtgagtagatgttgctttgaaggtatcttttagatgtgatgaacatttgtcatcagtagactttgagtaaggcagatagcccgtcacaatgtggatgggccttatccaattagttgaaggcctttgaaaaaagactgagatcccaaacgaagaaggaattctgcctccagacagccttccaactcaagtagcaacattacctcctccctgcggctctagcctgctggcctttcctatagacttcagacttgccagccccacaatcatgtaagccaattccttaaaataaattctctgtcctgtttttgccccctctctctttctgacagcacacacatgccctcttggttctgtttctttgaagaaccccaggaaaacacacaaaggaaaaacaactcgatagacagaagattcttcaatgacaacaatggaagccatcttcaccattcaactaaacttgaatgggatattatcaaacttaaaaaaaaattatcaactgatcgtgtaatcagtttcatcttttaagacaggaaatgaaataaagtatttacagatgaatgtaaaatgaacttatcattgcatcctgagctacagtaacttctgagagaccaaaaaagcaatactgtctcagcaagatattctaagatacaagaaaggctagtaaaatggagagtctatattacattttaaatattatctaaaatgtaattgtgagattcaaaaaggcacaagatgaaaacactggataggaatagcatataatgggctgggctcgggggcccacttgtaatcccagcactttgggaggccgaggcaggtggatcacctgagctcaggagttccagaccagcctggccaacatggtgaaaccccgtctctactgaacatacaaaaatcagcctggcgtggtggcatgcacctgtaatcccagctacttgggaggctgaggcaggagaatggcttgaacccaggacgcggaggttgtagtgagctgagattgcgccactgcactccagcgtgggcaacagagccagactctgtctaaaagaaagaagaagaagaagaatagtatgtaatggggggataacagttcatgtgtggtttagtctaaatggggtcacgtagtatttaatactttgaataataaaacttcccccagaagttatgtgaaacaggcaggaatgtcttcaaaacatccacataaccatttatttttcaactgaaatggccacagagtttagtcaagcaattttttycctttatttttgttaaataagattccagaaagtatagtgcaaacactcagtagaaaagttgcaattaagaaatgtacattcacatttaacatttcagtccattcactttttttaaaataaaaataggacaaattattcaattacttgtctcaatttaacaatcttgaaaaagactggaaggtaccctacagtgttcagttgacataaaaatagacccgtattgatcatacaaatctatcatgagaagttacccagtgagagtgagttattgtaattctgaatgtactcatcgtgtttctcacttctacagaagcatcctcagtgagttgtattgtgcgagaaaatgacacccttgcccacatcactctccattccatagagggacacaaccctatctagccaaacccagaagaacgcaggcgcttacacaacttttctcggacagtcgagaaaatccaaaagtgggctttgggcttaccttaaataggaatggaatgtaccactacgagatggtcatcataataaggacattgttgtttgagcggggggtgtgcaatcagtataaatgaggatggcggaggaagaggagtggtgactgaagggaggtggtgcataataagtgcacgagctacacaaagctcgagctacacaaagctcaggctccacgggcctcgccttggctcccagggatgctctgcagccagcgggcggatgacctgaggtcgggcctgggcctgtcccttkgtgcatgcggcgtgatttcaaattcaaactaagttccacaccattaggagttttcacggcatgcagttccagagtgcaaatggcttgcatatgtgcagtttttacaggtggaaggcaagaccatacatctctcccacactgggcgtgcctcctagtggacagttgtatgcaagaggcggtgatgggctccctcaggatcccccaatgtgggaatggtcccctgagacttgtgcttcgtgtgcctggggcccagagttgggtggggggttgctggtgggaggtgagaaacaagttctggctgccgtcgggccagcttcccactgccctcacctgggaggtggatgcccacaggcaggatgctctgggctactgttgcacagtcctgcacgagatatttattcagcccacaagatttaatagatctcttgggagttcatctaggctattatgtctgtttaaacattaattctcaataagtgcctgaaagctcttttgaaagcaacctatttgaaggtctgaaccgcccggtaccagcaggaaccaatgcccaggagagggtcagagcacatgtgctctggtggttgtcaaatctctcaccatccatcataagccctctgaactcctgctgaaatcggccctttgaacatcctctaacccctgggaaggcacccggacccacctttacctcaccagcagcatatgacaataacattaaatggctctacagcagaggaagatgaaagtaaaagtagcaaatacaaccaatggccttcccatagctcacagaactcctgagcagaagctgagcagggaagaaatggtgtgtagtttcagggtgtctggaggtgccaccatttctccccatttgatgtcagagaggctttacaaaaaaataaggcaacagctcttaaggagattctgtatatttgaaattagacgcaatgacaggtttcgctcaaatatagttttagaatatagtctgatatgacaaagtagggatttttaaagcctaacattttatttccttgctggggatcagttagtaaagaaggaggaattcctcttacccaagaggaattgcattgctttaatttagcaatgtgaggtaaggcctgccagtgccagggaggacttaggcacctgctctgagggcgggcagttggagcgagtctcacccattgcggggacagccttggctgcattcagaacccacctgctgaggtggcccctccaccacttgggcactagcatgtggatgagctagagttctccatcaaaaccaacacaaatcttgcagatgttgctgttagcaaagaggcactaaacataatggaaaacacaagggcttggaactggatagagcaggaatggaaccctggtcctgcctctcagggctgtgtgactttactcaagtccccaacctctctgggcctcagattcttcactgtcaacataaggagtataataatacctccctccatgggctgtttgaagtagagagtgaggtgaagcacacagaaggtgcatagttactgtaaagcccgacttagatactagtgatgagtgtttcctttatttgtggtcacggcaaaagacccatggagactgtggtaaccaggtgggagagcgacaagtgcccttcccctgtggttatcggtgtattaatagaacatattgaatctggtgacgggtagaaggaaactcactaatttcacaaagaatgaaggagttgtgcctaaaatgagtgacccctgtcaggtacaaaaacacagcattaggccaggtggctaccactgtggtcgattttctgatttctttctttcttttttttttttttttgagagagtcttgctctgtcgcccaggctggagtgcaatggtgcaatctcagctcactgcaacctccgcctcccgggttcaagcaattctcccaccttagcctcccgtgtagctgggactacaggctcccgccaacacgcccagctaattttttttttgtatttttagtagagacggggtttcaccatgttgaccaggctggtcttgagctcctgacctcaatggatccacccgcctccgcctcccaaagtgctgggcttacaggcatgagccactgcgcccggcctgatttcctgatttcaaagatgtttttcccagtccattgtgaagcacaacccaagaaggtcacctgtctgttgttgctcttccactgcacagctgagagagaatgaagctgacagacactcagctgggaaggcctggcctccaaatcggctcctggtaactggaggggagctggagggccgaattcctgcagcggtcaccgccctgaggctctctctacagcctctgcacaccgagaacccaaaaagaaaaaataagtaaccaaaccaaagaaaatggaacctagttagtgcctcaatgcccctggacttcagtgctgatgtagtagatgataaagttgacttgatgtctgagatgctgctgcccctgcccagaccttctcctctaataacaaggattttctgagggaaatcacatcagggcattcggggatggttccccaaatgccctgcgtggcagttatctgactgtattcaaatttaattttgttcctcatatgaatcccatgaacaaatgattttcatttggcttatgctatgcaacacacagatgtgcatgacacacacaacagaaacacgtgttcacacatgtaatgcaggcacacacatggatttgaattaagcacagcctctagtggagtatctattttttaaggtagtgaaacagacttcatatggaacagaatagattaaattttcagggaaatttaaaaatacaaatatatgcattatttcacaatggcatgttgtttagggaagtctagccccaaaatgtgtggcaactgaaatggaatctggtgtttatggaatggaccacgcaggtgacagatatcctcacatcctagtacaggatctgctttcactaagtgtatgaacaaacagaaggataaggcaggaagcccctagaatactttccagtgcgtgtcccagggctcctctaggtgagcggagggctccaagctccccaccgtgtctgtctggggctgtgctcatgggcacttggccctgcgcaggaggaatgtctatgtgcaggaagcagctgccctggctggggctctgccccctgctgctggcccccagcccaccctgtctgcctccagagacccctctgccttcacagccctgggagccctgcatccagcagcccatgcccgtgtcctctcccaaggccggggcctgtccttcagctccctgctgtcagttcacacagaatcacagacactgcagcttacagacaaaccccgtgtggcattcattccccaacggcagggcctgaccacactcagatcacccaaatccatctgtgaaaaaccacaactatgagaagagccttccttctgctgagcccactgagccttcctcaaagtctaccctgggctccatcctggcctgccctccatgcagggggagcagtcctcaggccctgcccctgctcctgatgcccccacccaggggggctccttggctccagcccctccccccaggctcagtccagctgggatgctggtctcagcccacccagctctgcttgacttggtgggtgcagtgagggccgggactgagaaaggttgaagcaactccatttcccctactgcccatttttgccaactacggacacctgcctgcagcatctcctgcctggtgccaaagagcatggaatgatttgtgcactgatggttatttggggtatgtgagttcctcgaataagacccctctcttggacacccccaagctcaatttgaaggcctaagccacccagttcgaccttctcacacccaggcaagcctagcatggggcccccaggcctgaacaggtgtcctgttcagagggctcttctaccaggatggtaccagcattgtggaaggtgaatggggacagccttcagagtgccaccatttccttaaaatggcctatcacaggtaagccttgatatgttatcctttagactctgcaccaaaccaacaaactgcagcataccaccgttggtcagtgtgaggccagtactgaggctcatcaattggaatggatcttggatggagtgggtgcctttgcctccttccttcctcatccaagcaagggtgtggtgacaatgacctgatcggggtttaacgccggctctgtctgctcaccagacctggggtgctgagctctgaccagcctgggcagcccaacccacaggaactgcggtttcatagctgggtcttcaggaaggggtggaggctttgggagtggcagctccccgcctcccaccaccccaagccagagaatggggcaaacttgtatgcatggcttatctctaaattactaatctgcttcggaccagactcatctctacagtatagagttagagttattgcttctatgacaggtgttccagaagccctggtggctttaaagtctgagaaacacgggctggcaacttgggttgctgggtctgtaggggcgtcctcctgcaggatacagacaccccgcaggcatggaccacccgggccggcatggtcccttgcaagcaactggaagcattccggggctgtgttctactctacggcatcaggcatgaaaggcatgcaagggtcgcgaggggagcacacagggtcatttccaaagggccacagcatggccaagcaagggctgaggtgggtgtggggcttgtcttcatttttggtacgagtaaacaggcagcacctgtcactggtgcactatttacaaagcctcttcaataaataatttagagagaatcctacccgaatggctctaacatttgtacatgaatattgtacatgattaaaaataaataaggcaatataatacagttttcccacaaataaaaaggaagttgtttttcaccaaaccccaagggacattatggctaaacacagttcctgaactcccaggaagtggctggggtttggagttgctgatgatggagatgtttgcccctgaagtggagaccttgccaagtctgccatggggtcctttccagaacagtcgtgagcccagagaaggcagcatggtccccgcgacggcttcctctcactgccctacaagtggccacaccttgggcagcttccaggatgtacatgtgtgacctcccggctctgtggaccccaggcacagcatggcgtggctggctctcttctcagtctcacaggccaaaccaaggtgtcgctggactgggctccactcacgcctggaggctctggggcgaatctgcttcaggctcacttgggttgttgccaaactcagctccttctggttgtgtgagcgacacccggcttccttgctgactggcgctggggttgtggagtggcctctggtgttggctcctggccccttgtctttaagccagcaatgacggcaccatctctgtgacacttcgaatctttccaggctctcctgcctccctcagccattccaaggggtcactgagcccacccagataaaccaagttcccctcccatccttagatccctaaccctaattccacctgcaaagtcccctttgctgtgtgacagcacctggccacagggcttagaactggggcatggacacctttggggttcactcctctgtctacccaccacctggatggccgaagctgggcagcggcactgggggcaacagggttggctgtgccaggggctctgcacccttctcaacagctcgtgggtcaaggacagcaccacggtgagctgggggagccagggcagccacactcaccaccaccgcactactccctcacaggctccctgtggctcctgtctgaagtgactgctttaaatccggctgggatagacagatgaggatgagaaaatcctagtggaaaggggaccataaggacaaaccatttgtcctgaagagaggaaagcacaggagcagggacaaggcagggcctggaggagaggttgacagcagggccccagccaggatctcagcccacagccagctcagatggaccctgggtcctcaggatgagctcaggagccctcgatggcagcctggagattccacataaacattaggtcctgtggatgtcccagtagcagcgagaggccctgcaagcacctccttctgccctaggacctcacgggagcccagcccccaccggcacaaggtgatgccagaacaccaggaacatgagcggacagcgacatgaggaccacccaaggaagatgaaaggtgcccgagctctgccctcaaagtctccagtgggtccatggggtcagcctacctgtggggtcatgtggcctggcctgggagctccctgtcataaccaggggaaggtgctggaaaggcattggtcaaaatcactctgcaagaaggtgtctggagaccatcctgcctcttgcaccatcacagaagccagagcctaatccacaccctaaggacaggcagacaggggcccccacatgcagcctctacccgccttccctgcccgaagccatccaccctgcccacctctgtccggactcctgtctcagctggaagc

SEQ ID NO: 96456 - DNA, 19576 bp, Homo sapiens
  misc_feature (1)...(19576): n = A,T,C or G
ccgaggcctctccagacccggcctgctccccgtttgcggagcacagcccactgtacccccgcctagattgaggcgctggccaggagtacaccaggcgccgccaggtgaactacaactcccagaaggccgcgcggaagcggaacgtgaaccagggaggacttccggacgccaacatccgggccgcgcggggaaggggagacgtggggtagaggtaagtgtaggttgaaggctgaatggggagggcgagagatggggagtgggtctcaaatatagagggggtagcaaggtggaaggggcccttccaccttttgtgggcactcaagttcggacctctgggatcggcgattcccctctggccagggctggttttaatgctctccgtgggcgggcttcggttgagtttggtccgcttttcctttctgctcctcaggggagcattgcttccttctctcgcagtgaccatgacgaaattagcgcagtggctttggggactagcgatcctgggctccacctgggtggccctgaccacgggagccttgggcctggagctgcccttgtcctgccaggaagtcctgtggccactgcccgcctacttgctggtgtccgccggctgctatgccctgggcactgtgggctatcgtgtggccacttttcatgactgcgaggacgccgcacgcgagctgcagagccagatacaggaggcccgagccgacttagcccgcagggggctgcgcttctgacagcctaaccccattcctgtgcggacagcccttcctcccatttcccattaaagagccagtttattttctaacttcgtttagtttgagtatggaaaacgggtattggggattctatgtactaacggtcgagaagtgaatgtgaaagaaccaccttcttgaggccatctcagcctttatctttgcatcttgctggtgttcccatttttgctcccaaggaggcaaagaccccttctcaatatttctcaggatggaaatgacatttcactttcctggtcctttcaaccctgtaggaagtacttctttttttttttttttgagacggagccttgctctgtcgtccaggctggagtgcagtggcgtgatctcggctcactgcaagctccgcctcccgggttcacgccattctcctgcctcagcctcctgagtagctgggactacaggcgcctgccaccacgcctggctaattttttgtatttttagtagagtcggggtttcaccgtgttggccaggatggtctgatctcctgacctcgtaatccgcccgcctcggcctcccaaagtgctgggattacaggtgtgagtcaccgcgcccggcgtactacttctttttttttttttttttgagacagggtctcactctgttgcccaggctggagtgcagtggtgcaatcatggctcactgcagcctcaccctcccaggctcaaacagttctcccacctcagcctccagagtagctgggactacaggcatatgccaccacgccaccaggctaatgtttaattttttgtagtgacagggtctcgctgtgttgctcaggctgttctcaaactcctgggctcaagtgatcctcctgcctgggcctcccaaagtgctgtgattacagacataagccaccttacccggccagaagtactttcttgaagcctaagttccattcttcataacatccaagttttgttatttttaaggccttcctgggtctttccaaccttttggttctttgagataccttttctgagcctaccctaccaacctgagaataactgtggatctatccttcaccaaaccaggcaggtttagaattatgagtagagaatgaaccatcgtgggcaggggtggggaacactttattttaaggcatattcatatcagcatataaggcatattcatatcacaatggcacgatctcagctcactgcaacctccacctcctgggttcaagcaattctcctgcctcagcctcccaagtatctgggattacaggcatgtgccatcatgcctggctaattttgtatttttagtagagatggggtttcaccatgttagtcaggttggtcttgaactcctgacctcaggcgatccgcccaccttggcctcccaaagtgctgggattacaggcgtgagccaccgcgcccggccttttaaggcatattctaaagattgcaccccaacctccaaaattaaaaaaaaaaatctctaaaaaataaaaagtgatttcatctcctaggccccaatcaatcatctaagtaaagctttttctttggtccttttatcctcaaagtcatctcttgttcccacaacccactgcacctgggaagctggacagcaggcccagctgaaacaaggaggtctctttggttcaggttggcactaaggtgcccagtggtcagatgagcagcctcaggtttgcaggagccagtagttcctgtcttgctcctgggggtacttccagaaaagccagaagcggataaagctggtgacgattcctggaaagttggacacctgaaatcacaagaactgctatgaggagaggagccagttttccatcttgcacccctgtcaccccatcccagttgtgcttaccatgatatagggatctctgagtcgaaacccatagaggcaccaggaggcagaggtgagaagggtagcaatggtgagtgggtaggagagacattgggttgatttagtttgaatcaccttagcctgtgggaaagaatggaagactctcttggcccaagcacatcgtaaagcttcacttgcctaagaatttcctcaagaaaaaggtcagacaccctccctgatctgtcacccaacctttcctgcctcccactcgcccacttctactgccttgtcttcttccagggtttggatctccccttcctcgggactgtaagccatagtatttggctatgagagcctgactcttatctctcctacctccttggacacccccactcaccaagtcagccagtggtgagaggtacatgctgatggtgaagacactgcagaagaggcccaactgctgaagccgggcctcagggttgggtaccaggagccaaaagtagccataacccaggagaaggacccctagcagggttgcagtctgtaggagcacaacacgctgcaggggagagagtacccttacttccagatgtgcactctgacttccctgctagagttaattcatcctgccttctccagtgctccaatggggaagccaagctgtctaggcctccagcactgcactgtcacagcttctttcccaccaccaacttgataggaaagtcttatccacccacaacactggagacttctgggggagataaatatgtgtttttttctgtgtgcttggcacacacagtaggagcttcataaatgcttgtgtgatttagcagggacgcagagctaatcatctcattctcacccacaggccctggctctgaaagaaatatcagagacaaaagccctttccccttagcttgttggctgaagcccagggcaggcagcataggcatctcaggctaggcagagctaccagccttgcctaaatgggggcaatgtgttcatctcagaaggctggcttcatagaggaaggggacctgcaaggctggagaggccttcctggaaaaggtggcagtgccagctgttacagtcttctaggaaatagtgtttgccctgccagcaaggcagggcgtgcagcagataggtgggtccaagggagggcctctaccttccgagggcagtaatgcagatatgccaagatatacagggtctgaagcgcagcacccactgtgttgacgacgatgaggatcccgtctcccttcaaagccccataactcagccagcccaggttgctgcagggtggaggggatggacatggctcaaagggttcagtgtgagaggaggacccaaagggtctttcactctttttttttttttgagacgtagtctcgctctgtcgcccaggctggagtgcggtggcacgatctcggctcactgcaagctccgcctcctgggttcacgccattctcctgcctcagcctcccgagtagctgggactacaggcgcccggcaccacgcccggctaattttttgtatttttagtagagacggggtttcaccgtgttagccaggatggtctggatctcctgacctcgtgatccgcccgtctcggcctcccaaagtgcagggattacaggcgtgagccaccgcgcccggccaaacctctttcactnnnnnnnnnnnnnnnnnnnnnnnnnnnnnnnnnnnnnnnnnnnnnnnnnnnnnnnnnnnnnnnnnnnnnnnnnnnnnnnnnnnnnnnnnnnnnnnnnnnnnnnnnnnnnnnnnnnnnnnnnnnnnnnnnnnnnnnnnnnnnnnnnnnnnnnnnnnnnnnnnnnnnnnnnnnnnnnnnnnnnnnnnnnnnnnnnnnnnnnnnnnnnnnnnnnnnnnnnnnnnnnnnnnnnnnnnnnnnnnnnnnnnnnnnnngaactggacgttgtccacactccgggtcattcgcatgtgcctgaggtccgagctgtaatggggccccgaagggaggggtgggggtgggaagggagaagcagagtgctagagggggatgcccaatgcctgtcatcctttccggaccaccgcagaccccgcccccctctcccccccgccagctatcctgccttctccttcaggcctagtgaccagcctcgcccttgtaccccggtcccctcgacccgatcccactttgatcccggttccggacgagccaggtgctgtggccacgtctctgtcccctctctctcctttcctgactgcctagtcctccccaacccagcccggccgcactctcacaggccggcggagaacatgccaagggtgaagaccacgcatgctccgtaaatgagcgagtccagaaagccgcccgcctccattacgactagagtcggatcccgcgcccagcgcccgccgcgagcctgcggttgccgggacctactgcagcccagacctgcggctctggagccccgccccgcgcactcggctccgcccccgcacgctcgggccgtccctccggaaactgcgccgaagccccaccctccctccgacgccgaaccggaactcgcgcccctctcctccgagcgccttcccagtaccttggtccagacctcttccatgtcccggtcagtccccttcctagggctccgcgggtgtgtccccgatacctgccgctgctcacactctgcctaccccttggatcatctagacgcccccagtctcaacgctcgtgttcccacaggcctgtgcgccttcggcggtggacctccaaacaaaagcttgctagtttaacaagacttcagcacgctttccatccagagctccacatcagaacctcagttgcccagggtttgggaagtttttttctggagtgtgctgccgaagctttttctcaaaataacacattaccaggaatcaccaagccttcctcttttgccctccctctcgggtcaactttacatgacgtggccaatccactgacgcctctatcactgacccccggtccaacccacttgttactgggaactttccctcccagcctcccacacgtctctgctagtgtggctgtggggcggggccgcatgcctcagctggcgttcccagcttccctgactcaccgaaacagcgtgagtacctgaatggtagtatgccaaagccctgcggtgacggagtgggagtggggtagaggtcggataggaagaacttccagagtggagtgcagctcagaacccgagagacagctgtcaggagcactccggtcctggacagccctcagaggaggaaacatcccacccttttggcctcgtgaggggcacacattctttggagagaaagaaattcaaacccagttgctactgttgtagcacagagagcctcgcacttagcagggactcaatggtcatatgttttaatatggagtggcagaaaagcatgtccgaaaaaacacattgctttattttgagacaaagaacattgtataaaaaaactccagttgtagaaatcaggacagacacacagcaacttatatacagatactatacacgtgggccctgccctttaggctacactctaggcagaatgtacacatgggcactgcccttacagctacactctaagaacaggttggcacagcccccctgctggcacagctctggggagtgctgccccaggatgggagagaatgcagtacctggctacaaacttctctgtggcagctccacagatgaggtmttgctgggagatgctgggtcagcccaagcatgctgcctctcctgtacctggcttccaagcaagaaactgtttcttgcttttccttcagtcagttcatctgggcatcctggctctctcctggagggggcatctttgacaagctttgcccatccacgtggccccttccagctcagctcccactgtgccttaagggaccatgcctgcacagcttgtttctttggcttaaaggcaggaatggtgggaaaggactgtctccacttctttctccatccctccgaggtgaaggtggggatggcactgtcgggctggttggcctccttccggttgaaaaccttaataytgacccgttttgaggctgctaggtgatagcttatgcctgtggtgggagtggttcccagrgctgggggctctgaaagtggccccaagacaggtttggagtgcctgtccctctcttcagcctgtccctctttaaggccaggtgtggcayacaccttcacggggtttgcagcagcagaagtggaaggagcagcacagtccaggcaagtgggaagaggcgtggggcagcactgtgaccgatgctatgtagaacccgcacctctgggtcatctgcaaggtgagagggcaaaggccaccagtgtgagtggctccactatttgtactggctctcagcccaacaggattccctcagcctcagcctggtaaaggagccacctcctgtacccaacctcttcaagcagaccccttcctgtgccccaggcccagtttgctccagctacccacctgctgcaagtctcttctcctgtggattgwcatgggcctgaggactgtgagctgaaagacaagagtggtagtagatcaggtactgtatcaaagaggcagagggctgtaagtatgagtgggctgggctgcaagacttctataccatcctagatcactagaccgcacccagcatagagatggaggaaggaggcccacagggctcygacactcactgattttgccactgacagtcaccttcaacctcaagcagcggtcttcatgctggtggatgggtttggctgcaagataagcccacaggggttaaataagaaacctttgctggaagaaaatgtaagtccaaatgcccctcgccctgctttctcagctccctactcmatttcattcttctcttccctctaaccttgattcctaccctccttagtttttgctaacttcctgcccaatgttcagcccagcctctcattctttggaaataaccctcagcatagacactgcccctccccacatttcatccttcattcctccgagtctgaatatgttcctcttgcctgggccacttaatactactcctaggccaggcgcggtggctcacacatgtaatcccagcactttgagaggccgaggtgggcggatcacgaggtcaggagttcgagaccagcctggccaatatggtgaaaccccgtctctactaaaaatacaaaaattagccgggcatggtggcacatgcctgtagtcccagctactcgggaggctgaggcagaagaatcaattgaacccgggaggtggaggttgcagcannnnnnnnnnnnnnnnnnnnnnnnnnnnnnnnnnnnnnnnnnnnnnnnnnnnnnnnnnnnnnnnnnnnnnnnnnnnnnnnnnnnnnnnnnnnnnnnnnnnnnnnnnnnnnnnnnnnnnnnnnnnnnnnnnnnnnnnnnnnnnnnnnnnnnnnnnnnnnnnnnnnnnnnnnnnnnnnnnnnnnnnnnnnnnnnnnnnnnnnnnnnnnnnnnnnnnnnnnnnnnnnnnnnnnnnnnnnnnnnnnnnnnnnnnnnnnnnnnnnnnnnnnnnnnnnnnnnnnnnnnnnnnnnnnnnnnnnnnnnnnnnnnnnnnnnnnnnnnnnnnnnnnnnnnnnnnnnnnnnnnnnnnnnnnnnnnnnnnnnnnnnnnnnnnnnnnnnnnnnnnnnnnnnnnnnnnnnnnnnnnnnnnnnnnnnnnnnnnnnnnnnnnnnnnnnnnnngtcttgaactcctgaccctagtgatccacccacctcggcctcccaaagtgctggatgatctcataacttttaaaatccatcaggccatgcgcggtggttcatgcctataatcccagcactttgggaggctgaggcgggcagatcacttgaggtcaggagttcgagaccagtctgaccaacatggtgaaaccccatctctactaaaaatacaaaattagctgggcgtggtggcaggtgcctgtaatcccagctatttgggaggttgaggcaggagaattgcttgaatccgagaggtagaggttgcagtgagcagagatcacaccactgcactccagcctgggcgacaagagtgaaactccatctcaagagtaataataataataaaataaaataaaataaaacccatcagtggcgagagccctcaggataaagtccaaactccttatcaccttttagttcccccatggtctgttctgtccacctctccaggctcacatctcctcacttcctgtgtccctccaactccagccaggmtgagccacaggaagttccctgaagatgtcatgctccctttgtacgtgtgccttcatgcctggccagctcctctgcttgtcctgagctctgggaccatcttccccactgagccttctctgagccccatagcctggcaggtgcccaggtcattttcccaaggcccctgtgttcatgtctactgtagcacactgttctaagggtctcttaacctatgtgtgtttcttcccagcttccttgaggacaggggctctgtagtgttttatttatytttgtgctcatagcgctaaacagagtgcccagcacatagtagaagctcactcacattgggatgtagatgaatgaaaatagaattcaagatcggaaggggccctctgctgctggactctacaccaagcatgtacccaagcatgtatgtaatggcaaaaaagaaacacagacactgtcccctcacaggcactcacagatgtagtagtagctgtgtccttctttgaactccttgcccagggtgaaaggtgtgaagcgctggaacttctcagacagcttctccgggccatgcttggcactgggccggttgcactgccagcggacttggtccttggactggggctggcacagctggtactcctcatgctccaccaggtacagtatgtactgctccatggcagcgtctgccacagagtgatcttcatagtgcggacagatgatgtccacgtagtcattcagctgcacatgtatggtgtagtcctcattccggaacctggggacacacacagggggaagaagcaggtggtcattcagaagccaggccagatccttgggcctctgaatgtttacatgacctctcacatttcacactggaccccaagagatttttccgaagtttcaactcccaatatgtactgatcttgatgtcttacatttctctctgccatctctaaacattcccctgcaccatcactgtctcctgttggtccttcaaatagcattcactcagtatctttcgggtaccaaagcattttccataacccccctgatacttacctgatatttagatgggcttctacctatttctgtagctcacttatcattctcttctacccataaatatttccccaaatctgttctaccagttgctccttttaaatgctgttaggcctcaatctgagacccccacaggtccattctgtaatcagaatccaggaaaccctttctctttaccatgctagcctggagcctccaacacatctgtgtcttcactttccttactcctctcacatttccccggacccactgagtagatctcacatttcccagcttcacttttcctcaaaagtgaagctagtatacccgggcccacagataatgccccagtcctttaagttaaatcactctcatcaattcattcagccccctcaaatcttccctttctagctactcaaagttatacactggtctccttttccccttctcagagcaccccaaaacaaccctgtccttttatctctaaaagccacacttccacctccccctagatgaaatgctggagctctgagcttgagcttgagacagcctctcccctctcccctctctcccctctctcctcctctnnnnnnnnnnnnnnnnnnnnnnnnnnnnnnnnnnnnnnnnnnnnnnnnnnnnnnnnncccctctctcctcctctccccctctcccctcctctcccctcctcccaaggtggagccagcacccctcccctagttcattccccctggccccaccggctccagcctgactgcccaccagcccctccccaccagctccagacacctggctccagcctgggtggggtcccagtagggggaaaagtgcttcccccgaccccgcaagctggtcagtttctctaattcccccaggcactgccagctagagacccagcagaattagcgctaagttgcttcgaactgaaagccctggccacggctgggagggcgaggaaggagtcaggcagagaggactcggaggtgggcacccactgcccaatcagcatgacccctgagaggccaggctttgcagcagcgtgccagcgcccaaactgggcttaccaggcccctcccccaccctggggaaaagagaggagcagagagaggcttttaaaattcctctctggagagayaaacatagaagccatttcagaacaggtatttcagctctgggcctggcgtctttccctcattcccgtgacgggcactgactcattcctcatccacctctgctacccgccccagcactcatgagaacttgtgaaaacttaccttgtcaaatgtgcacagcccccaggaccccaggagggcacagcgcccactcacccccaacagtgtcctccaaacaaagggagctggcaggtcagaatgaggggcctgccctccagcatgagggaggctggcgcccttctcagcatgctgcccccgcctgaggcctggagatcccagggctgctgcccactggcctgagtcacccatgccagcctcacctaccccgttcattgtagcctcatatttgcccccacgcttgggcccagcttggctgcctacggactctactctggactggcgtctctttagtcctgggtatgatagggtgtgcktgtgtgtgtgtgtgtgtgtgtgtgtgtgtgtggccagagggtcacccatcagccccctctcctgggggtacagtctgctgtacttagccttcatttgactcttgctccccatctgggaaaggggggcagcggcgtcagggaaggcggggaggtgggtaaggaagaggctccttcctgaaagagaggaaacctgggagcttgggaacggaaaaggccagggtccccccctccctactcatggcttcctgtcccctcctcctcctccagtcaacacctggcatgggcataaacagggactttgctctctcccatactagggcgagatgcatcaggtcaaggaggcaaagcacagggagcgggtggcggagggctggctgagcctccccagcgtccatgggcaggagggcattgccctctggggttggcagctggctgttctctcccccaccctaacaagccacagacaacagactgcctcaccagacgatgacacggggtcagaggaagctggcacaacatatttctcaaggggagtggggggcaagcttgctagggccgagagtggctaagccggtgagatggctttcgtgataccaagctgcccacttctctccctgctcctccctaccaccctctcctgtattccctcaaatattgttcccataacttcagaaaactcaagggcaagaacaaaggggccgacagagtcttcctcccagtaccatttgcctcacagccctaaacctgcccaggagaaattaactccttcctgcccagaaccttctgtaacccctttaacctcttctgttcattctgaagctttcccatgatctccctctcccagctcttcgcttttactacttgagagccccataaacaggtgattccctcagcctacccatgcacagcatgtgcctcactcatgccaccccaaaagacccctagtgagggactttccaggtttgctttaaatacagggtgaatgcataatgaatgcctacagcccagctctctcctgagaggtccttccagggttaccttgagcattctgtgcactcttgatgtcacaccaggtatctgtcagtgtggtcagatacccaaaggacacacaaggagaggcgtggaggctttcacagtgggggggtggggggcctggaacaagggccctggctgccaggggcgaagtctatgctgaaggcaggaactgcccagcatgagtccctcactttagagtaataggggtgccagagagaaggaagggaagggcagatataagcccatgcaagtagacacaagcatgccccggggtggggtgctcccagatatgacggagaagtgaggggaggaaaatctacagccgccctcctacctcggtcatctactctaggctcagctcagggtttggccgggacagttatcccggtggggtagtgccagccgggagcccaggctgccagcgggagtctcgaggcttacttgggatttgaactgttccagaagacggtgtggcgatcagcagcggccagactgcagcacagacccaagagaggggcccagaggaactccatagcgcggggcctggccaggccgagcggggacgcgggtctcctatgggtctgggttcccactggctttctccgcggcgcagtcagcgctgggctcacagatctggccccttcgcctagcgactccgccttttgggccggcgccgcccgacaccccgccccgccctcgccccgcccggcgcgcggctgcctgggggcttgggggctggggaggtggaggaggggcggggtggggaggcgaggaggctgggggtgcaggaaagagcgaagcgcgctcctctgcccccgcagatctgctcagagatgtgtgttcgctcacttgtgggtctgcgtggagctttgtgagcctgtcccggtggtgggcttgcgtccctgggcgcagtcgcgtgcgggagaagggaagaactcgcaagtgcgagtctgcgaacgcgggggtgcgggacacggctttgctgctccgcgcgcggaccttgcagggtgcgaggttgttgacatgccccgcacctttcygagcctcgcatgcccaggctcgggcgcccgcgttcccacactctcctcctcccccatccccttcccggactctgcgcttgactgcccctccccacacacacgcggctgtttgtttttgttgggtttgtcaatgttgtctttgttctggagattgtgtcatcgcctagatgccgggaataaagtgcaacgctttgtgtgatcgagtgtgtaacgtgtgcggccggggctaaggacgcctctgtccatcacatcagtgcctgcccgcaggagcgacacgcgggaccctgggctcgagagggggccgttcttattttagataagtcaaagagcgctaataacctgagtatatgtaacaacacacgcgtacaccgtgcgaacaggctcttgaatatggactgtgagaatctgggcatgaagggtgacaaactgtaaccacacatgaaatacgtgtgatggcgcgctagcatgaaagcatttgtgagtagtatcacagccgcgtgtgtggaagcgtgtgaaactctttgacagacgtatgctaatgtttgtgaacagcgtgtgaagaggaggggagacgcgtaccggcgtgcagcgggggtggggtggaacggaggggcgtttgtgcgcagtcctcaggctgcacagctggagctggcccagtctgagctggggctcccagtcagtcgggccccagtacccggctcaggccccctcccccgcgctgtgtaaacaaacccactggaatttgcctctcggggctcttctccccgcctggatctgctgccgtctggagagggcttggcgggcgggtgtcagctcctggggtggagagggcgggcaggtgtttgattaggctcacgagtgagcctggagtgggagagccgaatgctgtgtgtctgcgtgcgtttggtggtttacgtgtgtggttgtgtggctgtgtgcgcgccaggttggtgttgtgagtgtgtgtgcgcatcctcagccggcccttccctgcggctgcgcatcgcgggaagccacggacccggggcccctggccagctccggcccagcttctccagttcccaggccgtttcatcctcctattttacggccaggcctggctacagcccctgtaattacgcggggcccggacgccgcagcaagtctggcgctgaccccgccggggaggagcctggagctggggagggcccagccggctccccactgcaccaccacgtgcgctgaggccgctggaggccgtattcgctgcgtttacaataaacatagagtaccaacggcctctaaccccgtggccgggtcagggccgggttttgcgcacggccagcgccacccccctctccctcgggcacctgccccaggcgacgtgcccagccaagcgtttgtccgaggtgcggcccgctcctctcgcccaggacgaagtccacccgccgactgctcccagggcggcacctcacgcgccttttgctcacctaggaggacacctgggtgtcgacctcccacgtggccccggcgagagtactgcctcccagttcgggcattccatagagtcaaagctccaggaggacatgggtttttgttttgttcattatcttactgccagcacctggcacagcatctagcacatacagtagatggtcagtaaatatctgtggagtgagtgaaatcactcactgttcagtgaaggaacttaacttctgctggacataactgttctgaaaaggagccagcaggggggttgaagaggggagggatgctggtagctctttagagcaggtggcccgggttgcctcctggaggagacagctttgggccggattccctggtttctctgaccactgggactgggcggggacgtgtgaagtcccacgctgcagctgcttgggccaggcaggttcgggctcgctgggcccagtctggcggggccacgtcagctcttgcctgcgtctaggtctggagcaagctgggtgcagaagcgtgcatggaaattctgcgcaccgacaggacccggagccctctttccctgctttggtgctgtccccagtattctcatctcacttagggcattgatcccatcactctctatccactcccctatccatatgggggtcgatcatccaccctactggagcagccctagacactgagtgttgtgatgagctgggtgttgcgatgggcaccgagagtgtaaggatgggtttaagataaaatcactaccttggggagcccccaggccggtaggggatattgacaagccaccaggacagcaaacttgctaagtgctcaagcccagactgcggccctaccactcacagtcacactaccctgacccttcctggagcccctgcaatgcctgctgtgctgagaggagagttgcagggcactgtgccattcagacagagataatagtagggacttctgttcctggagactcgatctgctgaccaactctggggccccctcccagtcccttcctcatgccagcccccagcctgcccgggtgggtctgctctccattcttgcttcgtgctgcctctcgccgcaaaattgtgtgcttgtgttggctcccagcacgtcacccgcaggcaaacatctgcgcttagtgacgagagctgcctgaggtgtctgtctgtctgcctgtctgcatgtctaggaaattcctccatgagtcctttctggaaattcctgggagggcaggaatttcctcagaggaaattcctctgaggtcttggggtaggccctggctgcctggaggcagcatttccagttgggaacaggtgcaggtactggattgcgactcctttgctgggtgccctgcagtttggggaggggaaggccagagctgcagggccctggggcaagtgaaacctggctcagccccaggggtcatctctgggcaatggggtgaggcagcagggggaggagcagaacctgggctgagagcaatctctgtcgtactccctcaaggtcattttgaaacataaagtatacccttccccactttattagtaatgtgcacacatttttcagaagttggaaaataggccgggcacggtggctcacgcctgtaattccagcactttgggaggctgaggcgggtgaatcacttgaggtcaggagtttgagaccagcctggccaacatggtgaaaccccatctctcctaaaaatacaaaaattagctgggtgtagtcgtgggtgcctgtaatcccagctacttgggaggctgaggcaggagaatcacttgaatctgggaggtggaagttgcagtgagctgagatcgcaccactgtactctagcgtgggtaacagagtgacactccatctcaaaaaaaaaaaaagttggaaaatagagaacaggaggataaggggaggggaggaccaccggctgctgttaacattggcctccctgccctgccagctttttgctggggaagagattttgcttgcttttagacaatgtgataaacatgactcatttcaattgtgtgcttctttttttccctttacaacagaagacattttccatgttataaaccctttgtaaacaatgttttaaagggagtgtaatgcttcattacgtgagtatttcagagtttgccattgcaatgaaagcaggacagaaataaacatatccatgcacattcagacatccctcagttgctgagcagttgggtggattggctcttagaatttaggactattggccgggcatggtggctcacacctctaatcccagccctttgggaggctgaggcggacagatcacgaggtcaggagtttgagaccagcttgaccaacatggtgaaactccgtctctactaaaaatacaaaaattatccaggcatggtggcacacacctgtaatcccagctacccaggaggctgaggcaggagaatcacttgaacccgggaggcagaggttgcagtgacccgagatcgtgccactgcactgcactccagcctgggcgacagaacaagactctcaaaaaaaaaaaaaaaaaaaaagaaaaagaaaaagaacttaggactattgggaggctgacctgggaggatcgtgtaagaccaggagttagaaattagcctgggtgacattttgagaacccgtctgtacacaaaataataataataataataataagttagctggggtacatagtgcatgctactctggaggctgaggcaggaggatcacttgagtccgggagttgaggttacagtgagctgtgactatgcctctacactgcagcctgggtgacagagctagacagtctctaaaaaagaacttagaaataaccttgcaattgccaggtgcagtggctcacgcctgtaatcccagaactttgggaggctgaggcgggtggatcacctgaggtcaggagttcgagatcagcctggacaacaaggtgaaaccccgtctctacaaaaaatacaaaattagccgggcagggtggcacatgcttgtaatctcagctactcaggaggctgaggcatgagaatcgcttgaacctgggaagcagaggatatggtgagccgagatagtgccattgcactccagcctgggcaacaagagcaaatctccgtctcacgaaaaaaaaaaaaaaaaagaaccctgcaattgacttaacaacaaacacttatggagcacctactatggaccggcttacatttgggcttacagatgtgtgaaaaagcttttgatattgccaaaccaaagccagatcttttgatactagtccagttatcttcttgagaatcgaggtgactataactaaaagatctgtttctacttaattatctatgggctacagagtaatttcaaaatccttcagcgtggcatttaaggcctttggcaacatggcccccacaccacctctgtctcatctcctgccactcccctggacatattctataaaatttcctccccacatcccactcagaagggggccagactctgtgagggaaggtggaattctccccagaagtccactgcagggaagaggaaattggataggatgggagagtgggagggagatgagagaggcagaagctcagaaggatgggactcaggttcctgcacagaaagcagcagaaggtggtttatttttatttatttattcattttnnnnnnnnnnnnnnnnnnnnactctgtcgcccaggctgagtgcagtggtgcaatctaggctcactgcaacctctgcctcctgggttcaagtgattattttgtcccagcctcctgagtagctgggattacaggcgcacgccaccatgcccagctaatttttgtatttttagtagagacagggttttgccatgttggccagctggtcttgaactcccaacctcaggtgatcaacccgcctcggcctcccaaagtgctgggattacaggcatgagccattgtgcccggccagaagatgctttatattggggccttttccaccagaaatttactaatcatttaagccaaacactacactgggaggcactagggactctgaaatacatccttgtcctaaagaatgtataattctggggctggacgcggtgcctcatgcctgtaatcccagcactttgggaggccgaggtggatcacgaggtcaggagttcaagaccagcctggccaacatggtgaaacccccatctctactaaaaatacaaaaattagccgggcatggcggtgcgcacctgttgtcccagctactcaggaggctgaggcagagaattgcttgaacctgggaggcagaggttgcagtgagccaagatcgtgccactgcactccagcctgggtgacagagcgagactccatctcaaaaacaaaaaaaaaagaaggtataattctggcaaatgtataattagaatacatgataagaagtataatagaggtataagtagtataacaagctgtagactcacagaggaaggaatgtttatctggggtggggagtgcttcatagaagagagtctatttgaaatgggctttggagaataagtaggcattcccattcagggaggagggaacaaagaacgcaggtagagagg

SEQ ID NO: 96457 - DNA, 29737 bp, Homo sapiens
gcctcccctgtttgccctagcctcctactcatctagcagcccaggtgatgtactatctttaataataccatttgcctaaatagtactacctgccaggccctgggtcaggacccttagggagatcatctcatttaatcctcaacaacctggtaaggtcggatcaacttcctccatattcatttttttttttgagacggagtcttgctctgttgcccaggttggagtgcagtggcacgatctcggctcactgcaacttctgcctcccgggttcaagcgattcccgtgcctcaggctcccgagtagctgggactacaggcacccaccaccacacccggctgattttttgtatttttagtagagacggggtttctccatgttggccaggctggtctcaaactcctaacctcaagtgatccacccgccttggcctcccaaagtcctgggattacaggcgtgagccaccgtgcccggccctcctaggttctgacaagcagtacagatgccacacacctggctttcttctctgaccccgggggtacctcaagtgggctccaaggaaggggacaggtgcctctaaggtgccccacttgccggcctctcagagccccacttgccggcctccctccttacccaccttggagctgggcgtcttcgcgaagctgagggcctcggtagtgagggagaagtagagcttcttgaaggaggaggacatgagggggcccttgcccttggtcctgtggatgaagagtggcccctccttcacaggtggcgcctgcaaactcagcgtccgctgcaggtccagctctgccaggccagggagggaggggaatagagagcccagtgaatgagggcgggactggggggagggggcggagcagtgggaggggccatggggctcaagggctgagcaaatctgaacagcaggcagtggacgtagtcatggggctcaagggcggagcaaacatcaacagctggtggtgagcggggtgacaggtggactgaggaaggcagggccatgggcttggaggcgggacacgcgtcagtagcaggtggcggcggggctatggagctcaaggatggagcaaatgtcaacaggcacagatgatgggggggtgaggccatgggtctaggggtggggcaaacgtcaacggcaggcagtgggcagggtcacaggaagcacaaacagtggtgcgtgggtctatggcctgggggcctggcaaatgccaacagcaggcggtgggtggggccacgagaggaacaaacagcgatgggtggggccgtggggctcaagggcggagcaaacgtcagcagtaggctgtgggcgggtctgtgcagggcggcgctcaccgtccttctcctcgatgtccacgagcttggtgatgaagtccttcagctgcgccacgccctggcgcacggtgggctgcagcggctccatccaagcctccttggccctggaagccggcgtgtccatgttgcccacgttctggactgcctggaggtgacagcaggaaggaccaggttctgctaggttaggggcctagccactgcaccccctcccaccccccctccccaagtctttgctactcagctgtagcgatggaggcagaggcgacagaggccatgcccacgggccccctccagccccactagggatcagggaggagaggatcatgaagtttgatgccttatgataactgagaccacttgggccttcctctgtaggtttaactgacgctgctgcactggataccccaccccggtgccgggcacataggtgcagcctgagagtaagcagacccgggttggaaggtcccgcgattcaccaccgacaggatgggcggccttggcaacccccgacccctcgcaggcctgttcccttatccatgagatggagctcggacaaggtggccacaggaaggctttgcaaactgtgaagtgcagtgcctacgtgggcgtgccagtggcctcgccggagccggtagggaacactctgcagtccaggccagggccccggtaggacacccagctgtgcatcccgcccgtggccgcaaggcccgcaccttggccaacaggagcagggtgcggctggtgcgggcgtccgcgtggcgctcccgcaggtggaagagcttgggcgacatgatggcgggagagaagaagcgcaggcacaggaagctggtgacggcgatgaacggtacattctggaggggtgcggaagagcgcgggctggagtcccccagaccagggctcctggcagccccctccccttaggctccgtccctgaccctcgccgggacacagcctccctggtcctccccagcgctccctggttccccaccgctcttcacccccctcgccccagcccagtccaacccggcccagcctagcccagcgggtggagggcgcacctcgtgctgggcgccggggaagcgctcgcgcacgcgccggaagagctggcggaaggtggcgcgcaccacggcggggcacgcgggaaccgagcggctgagcgcgctcagcagggcccccaggtgggcgcgcagcgtctgcgcgctctgctccagcacctcggcctcggtctgcgggcggtgcagcccggaacacctgcgtggaacggggcgggttggcagaggaggtcacggtcagcgccagggccacgacaggaacagtggctctcacagcagccgggacacggacacaggggacaatacacgggtgggcagaagcacaaacacacatgctgacagggcctgatcccaacccgctgccgctgcgccccgcacccccccggagttacccccggcctcaccctacatccttaacttccactttgctggggtccagctccacgtacttctcctcaaacaccttgttgatgatggggcccaggacgccgtgcaggtactgcatcccggccacctggggaccaccgcaggtcacattgatcctgtctcccccagtcccactccagctgcccaccttctcccggcagccgcccttgcaccgtttgcctgccgtatccgcccaggagggggacaggtacacaagcagggcaaactgtttattcatgaatgaatgaatgagtgagtgaatgaatgactagaattcttagcccttgtaatcctagcactttgggaggccgaggcaggaggatcacttgaggccaggagtttgagaccagcctgggcaacatagtgagactgtctctaacttaaattttaatcacacacacattcttttgggggggggggtgcggggcacggagtctagcacggggcccaggctagagtgcagtggcgtgagctcactacaatctctggcttctggttcaagtgagtctcctgcctcagcctccccagtagctgggatcacaggtgcccaccaccatgccaggctaatttttgtatttttagtagagatggggtttcgccatgttggccaggctggtctcgaactcctgaccttaagtgatccgcccgcctcagcctcccaaagtgctggaattacaggcatgagccactatgcccagccacattcttaaccttaaagggctctcaatatggagatagaacactggagtcgaagtcccagccccctctgtcgctctctctgaagctcagtgttgtcatttgcaagatgaggacaatatagcatgcaacctcaccttcagaaaagactccatggactttgaggccagagagttgctccggaacagggtgttggtcttttgttacttggtcataagtaggcgttttccttttgatttggttctaggaggttagtgtgcattggcgttctgttgcctgcttccagcccctattctcctgcctcaggttcattagaaaagactgagtttggggccgggcagggtggctcacacctgtaatcccagtactttgggaggccaaggtgggcagatcacgaggtcaagagatcgagaccatcctggccaacatggtgaaaccctatctctactaaaaatacaaaaattatctgggcatggtggcacgtgcctgtagtcccagctactcaggaggctgaggcaggagaattacttgaacttgggaggcagaggtttcagtgagccgagttcgtggtcactgcactccagcctggctacagagtgagattccatctcaaaaaaaaaaaaaaaaaaaagaatgagtctggcccctttttgtctttctctcatcctctttgcctttcaccatgttatgatgcagcaagaagcccctcatcagatactagtgccatgaccttggacttcccagcctccagaactgtgagaaaataaatttctgttctatgtaaattacatagtctgtggtactttgttatagcagcacaaaacaaacaagacaacaagcaacaatcatgtgaacagaaagaaaaatgggcataacaaatgaaccatgtttttgtccaaattaggttcacaagcccttatctgcaccatccagactcaaacaccttaagattttggtagttcatttggtagcaaaaactgaccttaattgtcatgaggatatttagagtcgtcttatattccacttagctgattattcacacatatcacacacttagctgattattcacacatatcacagcaaaagcatgaacatgtctgattaccagttcctgtccagatcctgtgataagggcttacccaggacatacatggtataacttttctgaaatcttagattgaattccaaagcacatctggacttaagggattgtggatatatacatatatatactatatgtatatatatacacatatgcatatatatacatatgtgtatatatatacatgtgcatatatacatatacatatgcatatataatatatgtatacatatacatatgcatatatatacatatgcatatatacatatacatatgcatatatacatatgcacatatacatatacatatgcacatatatacatatgcatatatacatatgcatatatacatatatgtatacctatacatatgcatatatatacatatatgtatacctatacctatgcatatatatacatatatgtatacctatacctatgcatatatatacatatatgtatacctatacctatgcatatatatacatatatatgtatacctatacctatgcatatatatacatatatgtatacctatacctatgcatatatatacatatatgtatacctatatctatgcatatatatacatatatgtatacctatacctatgcatatatacatatatgtatacctatacatatgcatatatatacatatatgtatacatatatacacacatagtatatatacatatacactatgtgtgtgtgtatatatatacacatatatatactatgtgtgtgtatatatgtatatatatactatactttttttgagacagagtcccgccctgtagcccaggctggagtgcagtggcgctatgtcggctcagtgcaagctctgcctccctggttcacgccattctcctgcctcagcctcccgagtagctgggactacaggcgcacgccgccacgcctggctaattttttgttttagtagagacggggtttcatcgtattagccaggatggtgtcgatctcgtgaccccttgattcgtccacctcggcctcccaaagtgctgggattacaggcgtgagccaccgtgcccggcaggatttatattttaaggaggcaggggagttattctccatgggaggaaataagccgtgagctgccttgcgctttggcatgtttctctatcatacagataagaagctagttcagtcaagtgtatgcagatttgtggatggaaaaactggtgctcccaggaggaggggagcagattgaggaattactgacaccttctaggggcgaccagccagatgtgcaggtgaagcacaagacaggttctcttcatgcctccactatcctggcctcgaccaaactgcagagggaaaaactcaggtgagagtgagaaagcacagtcactttcagttaggtttgtagcggtgtgatcgtcacttagcactcatttattcgtgtattcatacatttatgcatgtttctttcacagatcaaactgttgagggtccacaaacaggctgaagacctcgtctggagggagactgcagtgaacccaagatcgttcaaataagcgcatcgacataacaagatttagaaaagaataagcacggtgctgtgagagcagctagcgggggctggactgggtcccygcggccaggcttccaagtcgagctgccgtttgggtgggaccagaagacgggctagtctgcgccccaggatccctccctgaggacaaacagaaggccgggtcctccsttctcccgcttgtccttcggcattcgcgggacctgcatgctagaccagctggccggacagctcgctaggacccgcgggtgcggctggcccctrccatttccgcttcctgccgtggggcggggtttccggttgtcggaggcgaggcttgtcggctgtcaaaggggcggcccggccsggcccggaagctacagcagcggcgcggagactgcggggcgggccatggcggcgaacctgagccggaacgggccagcgctgcaagaggcctacgtgcgggtggtcaccgagaagtccccgaccgactggtgggcggcgagacgggccagggtcgggccaggggctgcctcaggggtgggtctgtctggggcgagcgggggactcggggggagcgggagcgcgagcgcggagcggtgcccaggcaggtggcctggggcttacctgtctgcccctccacaccgcagcaggagtgctgtctcaccctcgtgaccccttgccccgccgatcgtggacaggttaaacccggcttggggggacccagtgagtccccgcccctccccctgtcgctcgccacccactgtgggcttcgcgggcttccatgttggatcctcggcctggtcgtgcttgctagcttcgccaggttcttctttccagtcctgggacttccctggagaaggggttcctgcacagccctctctgagaaggcggaagccacgcccggtttttttgcraacgctgtgttcggggatgggcatttgagagcggcctggcagccgggctgtgaatgtgagccctgccctgggggcttcagacgaggagctcagggatctgggttcttggctgtctgtgaacgtggacttcagaactttcgtttctccaaaaagtgtactctttcttgtgcctgagccatgggaagatgtacgaaagtaggatgctcgctatctatttgggaaaaggtcccattttccctctaccacccaagatatcctcactttcctctttgcttaaattgtttttactgaccagttttgagaaatcccagttctgagaaatatgctgagtatggtgggctaaggtgaccaactttggggaatagaaactgggccttggagtctgagtcgtggtggggccacactgtggtcagcactgaggccctcccaactgtcttccccttgtgtgggggccatctccacttgtgtaagtgctttctcatctcctctgctctccgtagtgcccagcacagagcggcttttatgcagtgtactattgtgaccctgaggatgttatggctttgctttttcctcagccctgggccattaggggaagagctttagaacaccagttgcttggttctatggggtctctgtagactctcctgtcaggtctgagtgccctggatggcacttatgccaaacagcacatcytctgttttggaggcatctaaagaaggatatctcgtcatttccttggtggggttttctgcctgctttataatccctcagatttacccacgtcagtcagtgttatttttctcaggagagtttctagatgtcagccctctgttttgcctctctcctattcctgttcgtgtttctcttagacctctcctgttacttcaaacccagtcaaaagtatctctgcaatgagtgccccattttcatgtccacatcataccacttggctttagaacccagaagaatctttgcccctcttcagccctgccaaattaaagattttgcttcttaacatgctcttgatcactctgtttaccctggcagacttacctaggagcttcctggcactcctcatctatctcccttccaggtctctcttcatcatcagtcttctcaggaaccatcactggtttgggatgatgcctcccagcccacctggcagtttgggcttccctcttcagacctcctatgttcctagcctttccttgggctgcttacgagagctgtctgctaccactcctggcccggtgcttacccaccccatctactctctgtccctcatgagggttgtggagcctcctctttcccctcatgaagtcagaacccacccatctcactggactcatctgcccagacagccatgctatgctccctccctacctccaggctcctgcagcactacaggttgtgtcactcagcagcataacccactgacctccaccctcatcgtcacagccattaaggtagttactcagcagatactatgtggcagattcctgcacactgcggaaaaatatctggaccatgtcacttccgtgtctgtaactctacagtggcttcctgttgcatgttgaataaagcctagactccttgccctgctgatgccctgcatgacccagaacctaccacccctttcatttaccacactgtggccacacctgtttgtcaccactctggccgtctttctcttcctcaaacttacaagctggttcctcttcagagtccttgctctgctgcttcctctgcatggagcacactttttccacatcgtcccaggtggctccccagccttcacttcttggccccgaggttgccttctcagagaggccttccttgattcctagctccttgtttgtaggcactttttcccatctttctgtttgacttccttcagacacatgccagacacaaaatatgctggaaatccttatggattttcttgtcacctttatctcttactagaaggggtggggtgggctctgtctctgtcctcggtgcttgaggcacggttgttacatgtggcagatgcttagatgaaggatggaccaagtcatacagaaaaagtggtagagatatcagaggaagaagaggtggtctctagtttggtgggtcataagaggtttcacacacacagtgctggcattggggagggcagatagagtggggagcaaccatgacatcagctctccatcttggatctgtctcccgcccctgcttactccgtatcttggcatggtttgttctcacctggttcatgtgtcaccttcagcacctgcttcactctctaatagtacgttagtgttaggtgtgtgttttttcttccgttagaaagtaagttccatgggcaggaccttttagggattgttcatagctgcattcctgtaactaataagcagtaggctctcagtacttattttcaaaggcactattgaattataagatgcttgacactccatatgccttgctgttcagaggccagtgcaccatgttttttcatgttgatttgaaacttccttcgcccttctttcaaaaggcctctgaactgggaatgagcctctgcgctgggaacattcttaaaggtggcctggggtagagagggatcaagtcagagggataggtggcaggcattgagcttggctcttattatattagctgctgagtcccttttttttttttttttttttttgagacaagagtcttgctctgtcgcccaggctggagtgaagtggcacgatcttggctcactgcaacctctgcctcccaggttcaagtgattttcctgcctcagcgtcccaagtagctgggattacaggcacccaccaccacacccrgctaattttgtatttttagtagagacggggtttcccatgttggccaggctggtctcaaactyctaacctcaggtgatccacccgccttggcctcccaaagtgctgggattaccggcatgagccatcgcagctggttgagtcccttcttgcaagagctgggttgagctgccatcttctgttacctgctgcttgtgccagcttgctatcttctgggagccagggctttgtggccatcaagaggaatgggcttctttcctccagggagttccccccagctcatgctggcagtgtgccacctcccaaatctttctcttgtttttctgtgttcttttctctagttccttttctctgagtgtttctcattcagtgtttctctcctgtattctgtctcccctcctggtaaggagtgccttttcccggaggcctgtctcctccctaccaaccagatccactgggcctgggtctaatttcttccatttttctgaggcataagtatctctgcccagtggcactggcaaagccctggggaagccaagttgaagctgatttggttcctgtccgactgtttatccctggagcttctgtctggcctgcctcagcaggcctgtgctttagagcctggggagatgacacacactggactgggttttgcctttgacttatagtccagtgggtcagtgcctccagcccatgtccagcagccctgctggggatgttcagttgctgcaaggttcatgctattagcaagccagaatgaatctttaccagagttttgtttttgtttttgtttttaagagttggggtttcactctgttgtttgggctggagtacaatggcatcatcatggctcactgtagcctcgacctcccaggcttaagcaatcctcccacctcagcctcccgagtagttgggactacgggcatatgccaccacgcctggctgatttttgtatttttggtagagacagggtcccaccatgttgcccaggctggtctcaaactcctgggctcaagcgaccctcctgcctcagcctcccaaagtcctgggattacagacaygagccacccacctggcccagagttctgttcttttttttgagatggagtctcactctgttgcccaggctggagtgcagtggcgcratcttggctcactgcaagccccgcctcccgggttcatgccattctcctgcctcaacctcctgagtagctgggactacaggtgcctgctgccacgcccagctgattttttgtatttttagtagagatgggatttcaccgtgttagccagaatggtctcgatctcctgacctcgtgatccacatctgcccgcctcggcctcccagagtgctgggattacaggcgtgagccactgcgcccagcccaaagttcttatgaataattaatctttcaggaaaagaaagccatggccccatgtcacccatggagagataaggctctgctagatagaaaacttgctcatgggtacctgtccgtgaggggcttggcaggttcatggctttaactgtgtgatttcatgtcgtgtcattcctttgtggtttctgataaacacaacctgtggtagtctgtgtttaccaaagagtctcaagcctggaaggacctgctgccctacccaccaggcttcactggagccagggcagacgtgcacaggagtggtgggcagccttccaaggggcccagtgtgtgtatttctccgacttgcttctccttttgggtgctctgggttcaggaatatgtagatatgttttgtctcttcaaatccatatacctagtggccaggtgagtatttgacacatgaatgtatagcagtcattgggaaactccacagctcatgttttcctcatagtagatgtgtgctcccatctccatggctttgtccctcacaacccccaccccatggtaagtcaggccagtgtcctcccwgctgcagagctgagaaggctgcacagttgcctactgagaacctgcctagtgggtcagagcaaagtgagaacgggcctgtgcccacccacagtgttactgtcagcccaagctctttgggatgtagtggaaagtcatggtggatacggtgaggagagatggaacccaaggtgctggctacagagctcacttgtgtttcgtttcagggctctctttacctatgaaggcaacagcaatgacatccgcgtggctggcacagggggtgagtatgactccaaatggactcrgggacaccaggaggtaggagggtgacgacgaggggtcagcgcactcagctgtcttggtccactgagccacatggggcttccagtgctcactggccacttctggcaggccttaggtttcagatatgtgtaagtgaaaacattcctccttggttctccttccctctgggtgcaggggagtgctttctctttgtctacttggggagagctgagagggaaacaggcctctccagcttgtgggcagcctgcgttgggagctgcggtgggaagctcaccagtcccagaactggtgctggtggaaagaaagtccacagacatatcttcttctccctttgtcctgccctggtcttgtgccgagtgcttgcaggggccccatcctcactgggagaggcagtatcactgcagatagtcacgggggaggctctggaggtctctacaggaaggacaggctcttggccagcacagagcagaggttgtcagggtaggcttcgtcagagtgtgacctgtgggcccctcagctgacacccgtgactgctcctcctccagaagttgcctgacccctccctctgtcctgagctggacatggcttcattgttcaatgaacactcggagtggttctccacggtttgatgtctgttgttggtagaaagccccttcctttcacaatctttctgggaggtgtcccctttctagaaggattgccattgaacagtagacatgtggtgtggcaggtgactgggagttgcagagatcaacaacttgagagtttcctgtcatccccagtggcacaggacagggctctgccacaaatgcaacaatttgctgtccccagagtggggctcatgactgcctccactcatacggagccctgtagatgaaatacctgatcagctcttcctccttataacctggaaaagtttgtgagggctaagcctcagtgtcagggagaatygtttagagctgcccactcctgtgctccccctgtccccatcaccctctcttctggagtctgaggactgagccagttacgccactgcaggatgttcaatctggtctggccgtctgggtggccctggaacttgagcagacacaggtgcaggcagtggtgactctacaggccctgctattccgggcccttttgcaacgttgtggcaacaataaaattttgacgtagccatcctccatttggaagtctggtggctggtttgccgtggaaatgaccctgtttttatttccagaattacctctgggtttagagaagtggtttttaaacgagtgtgggtaaaaaaaattacctgaggtacttgtcagaatcgcagacttctaggtcccacccagctctcatcaatcagtttagtgagggtggtgcccaggactctgattttaaacatacccctagaaagattctgatacaggtagaggtgagaagccctggtttagaagcagctcggcctcccttcatggtgggaccagggccagcagggaatgtcagggccacccctgaccttcactgtgactctgctgcagagggtggcctggaggagatggtggaggagctcaacagcgggaaggtgatgtacgccttctgcagagtgaaggaccccaactctggactgcccaaatttgtcctcatcaactgggtatgtggagcctgtttcatctaggtgtgacccargaaaccccattgtcttctttcctgttttgacttgacttcaggaacaaagtgttttactggcatgacttagtagatcaatagaacagctctgagctggtgaatgagcagaatagttgacagattcattgtggcccaaagaataactgtggctttgctatgcagaattcaccttccaagcctagagttcttcctgcaaaatggattaaaagcagtcacagggagtccttgctccgtgctcttgagggtggttgttctgatggagtagagagcctgagggagtgtttaggagcctgggagtacagggacagggcctccttgatcccttggtggggatcaagaaaactcttgaaggctgggtggggtggctcacacctgtcatcctagaactttgggaggccgaggtgggtggactgcctgagctcaggagtttgagaccagcctgggcaacatggtgaaaccccatctctactaaaatacaaaaaattagctgggcatggcagcgtgcacctgtagtcccagctactcaggaggctgaggcaagagaattgcttgaacccaggaggcagaagttgcagtgagccaagattgcgccactgtactccagcctgggccacagagcaagactccatctccaaaaaaaaaaaaaaaaagaaaattcatgaaatgcccccacagcgaaagccggtagccatcctgcccagggagaatccatgagccccttggaggcatgggaacttacctcacccatgtgatgcagtcagaagaataggttctgctttgggggttgcagttttctcttttctgggacacagggtagatgttgggtccccagggaagggaagtggctttgggggaggcctgggtcaacctgggcatccttgtgttgcagacaggcgagggcgtgaacgatgtgcggaagggagcctgtgccagccacgtcagcaccatggccagcttcctgaaggtaaggccaggtgaggcccgcttcactgggaacaggcctcacaggcttgaggtctcgcaggttcctgggtgcgagcaagtgggaatcagaactggagttgggagtgtgctcatagctaatgctctctgcctgcctttgagggcatgaccagaggctgcttcactctcggtcagtgagtgcatkggaggtcaggatgttgccagggccacctacaggcctgcctcagtggggcaggataaaggactatgctggagctggtgccgtgagaagggtgggccctggttctgttttgttttatgatccctctaaacagtttagtaataccgtcaggatttggaggaaggggagagtgcccaccatcttagcacgcatgtgcccttttgatgcattcctttccagccccctctacatggagttatgtcagtcctataatagaacctttttaaattttaaaaactatttgtaacaaaagcatttgttggtcacttgtcaggtaactttttgcatttctctggcaaaggagactcagaattttgatttctcgttctgccaacatttcttcagctatacctcagtttccatctaggagctgataagagaattcccagcttatcgatatacaggtttgagtatcctttatctgaaatgcttaggaccagaaatgttttggattttttcagatttgggaatgttttcagttcagcatccaaaatccgaaattctccagaatctgaattttttttttttttttttgagactgagtctcgctccgttgcccaggctggagtgcagtggcgtgatcttggctcactgcaagctccgcctcccgggttcacaccattcttctgcctcagcctcccgattagctgggactgcaggcacccgccaccacgcccagctaattttttgtatttttagtagagacggggtttcactgtgttagccaggatggtctcgatctcctgacctcgtgatttgcccgccttggcctcccaaagtgctaggattacaggcgtgaaccaccacgcccagcccagaatctgagattttttgagtgctgacataatgcttaaaggaaatgttcattggagcagttcagattttggaattttaggtaagggatgctcaacctgtatagcaacagtgaatgacgtcatgggtctggcttcttatgaagaaatcattggcttactttttgtagaaaacatgcatggcattcttttatcagagttttttttaattgttttgttttttgtttgtttgtttgttttgagacagtctcactctgtcacccaggctggaacgcagtggcacgatctcggctcactgcaacctctgcctcccaggttcaagtgattttcctgcctcagcctcctgagtagttgggattacaggtgcctgccaccatgcccggctaagttttctatttttagtagagatggtgtttccctgtgttggccaggctggtctggaatccctgagctcaagtgatctgccctcttcagcttcccaaagtgctgggattacaggcgagagccaccgcacctggcccagagtttttataaattgatatataatagttgtacatattttttgcatacatgtcatattttgatacctgtatacaatgtatacgatgaatcagggtaattagcatgttcatcacctcaaacatttatcttttctttgtgttgggaacattacaatttttctcttctagctaatttgaaatacacaaaattattgttaactataatttcccttctgtactattgaatactagaatttattccttctatttaactgtacttttgtacctgttaagcaacttctcttcattttctctcccccatgcccttcccaacccctggtaaccagcattctactctctccctccatgatacccacttttttagctcccacatgagtgagaacatgcaatacttgtcttctgtgcctggcttatttcccttaacatcatgacctccagttccatccatgttgctgcaaatgacaggatgccattctgttttatggctgaataatattccctcatgtttatatactaaattttctttaccctttcatccattgatggacgttttggttgattccgtatcttggctattgttaatagcgctgaacttcagagttggatatatccccagcagctggattgctagatcatatggtagttctgcttttagtaggactaaaatactgttttaaaaaccatactgttgtctaggcgcgatggctcacgcctgtaatcccagcagtttgggaggccaaggtgaacagattacctgaggtcaggagttcaagaccagcctggccaacatggtgaaaccccgtctctactaaaaaaatacaacaattagccaggtgtggtggcgggcacctgtaatcccagctactcaggaagctgaggcagagaatctcttgaacctgggaggtggaggttgcagtgagccgagattgtccactgcactccagcctgggcaacagagtaagactctgtctcagaaaaaaacccaaaaaaccatactgtttttataatggctgtactactttacattcctaccaacagtgtataagaatttccctttctccacatccttgctagcatttattttttatgttttttataatagccattctaactgtggtgagatgatagcccgttatggttttggtttgcatttccctgatgatggttagtgatgttgagcatttttttgtatgtagttagccatgcgtatatcatctttcgagaaatatctgttaaggtcttttgcccattttaaaatcagattattatttttttgctactgagttgtttgagttccttatatattctggtcactaattccttgtcagatggatagtttgaagatattttctcccattctgtaggttgtctgtttactttgttgattgtttcatttgctgtgcagaagccttttagcttgatgtagtccaattggttgatttttgcttttgttgcctgggcttttgaggtcttaacccaaaaaaaatctttgcccagatcaatgtccaggggcatctacccagtgttttctttgagtagtttcatagtttcaggtcttacatttaagtctttttaacccattttgagtttttttttaatatggtaaaagatgaagatttagtttcattcttctgcatatggatatccaattttcctagccctgtttatgaaggagaccgtcctttccccagtgtatgttcctgtcacctttgttaaaaatgagttggctgtgtgtgtgagtgctctgttagtttccattgttgtgtctgtgtttatgcctgtaccatgctgttttgcttactgtagttttgtagtttaatttgaaatcaggtagcatgaagcctccagctttgtactttttgcttcagattgctttagctattcagggtcttttgtggcttccagatggcatttaaaattagttttcattgattagaaggaaggcctttgatgcaaattatgcctgggctgtctattgatacacagcagggaacagctacagaaggaaccactggatagcacagtggaggtcaagggtctcacgtgaactgggacaagaatgaggggtttgctccaagttggtttgtttgagcccttgaggggaactcgtgcctcagttttcagcagccagacaggtgccttctagtttcctgattccagtcctgtgtggtatagtagtggcccgtgctgtatggactgacaggagtttggcccatctcctgggcttgcaaagcccttctttcaagtgctgctcctgctgcagggggcccatgtgaccatcaacgcacgggccgaggaggatgtggagcctgagtgcatcatggagaaggtggccaaggcttcaggtgccaactacagctttcacaaggagagtggccgcttccaggacrtgggaccccaggccccagtggtgagtgctgcttgcccatcgccagcccttttgttgctcagggcctgaggcagggggccaggaatatgcacttcccagcacccgggctggctgggcccatgcctgcttagtttctgcagatggtaacccctgagctgtggtgattgcccactgaccagatgagcaggaatagccctctgaccttgcctaggggttggactagctgttctggagccttcctctggagcccagcctgtgtggtcagagtggaggctctgcagcatgcatggctatgatagtctggctgccctcaaggtcatggcactggmacatcttgggctgcccctggaggtagccaccgtggaggaactaaaggaggcatcaaggcggagcctgaaaccagagcaggccccttggagtcacgggagatacctgtgggcctgtggccccagtgctgtgtggagctgatggctgggagctgcgtccgcatgcgtgtggttggacgtgattccttggatgctcttgtggtagtcagctgtctgagtgcccctggtcagaggcctgcctcagaactgcccaatgtctaggagtctgcaggtggggtatgggggcctttcttgccctggcccccatccatgagggcgagagaccaccagagacccctctagtgttgtctgggattgagcatcccccttggggcagtgtcctgggcttctttcaggtcatcttggtgtgtgtctccttgagggtcactgggcagtgctctgctgcctctgctgggtccagtcctagcagcactcacctgtgctgtcrcaagtttagcgtattctctcctttggtgcctgtgggcctggccttccacctgggtccaggtctctaatgagtgctgtcccctacagggctctgtgtaccagaagaccaatgccgtgtctgagattaaaagggttggtaaagacagcttctgggccaaagcagaggtgagtgctgccccggggcatgctgggcaygtgggagtgttctgcttgctgtggctcatctttcctcacaagtgagctcatgcagcatccactctccttggtgcccattacagatggtcacactgaggctcgggtaagttaagccacaaggctaatgawcgactggctctggtgcccgtctttggccatgtgcctaaaactcagtcctgggcaggggattaggctgaagtggcagcayagggctgagcgggcagtggctctccctgcagaaggaggaggagaaccgtcggctggaggaaaagcggcgggccgaggaggcacagcggcagctggagcaggagcgccgggagcgtgagctgcgtgaggctgcacgccgggagcagcgctatcaggagcagggtggcgaggccagcccccagaggtgagccagaggtggaggctggcctgggggacccaccctgaggcattgctgggcacctgctccatcccatggaggcgaggaggactaaggggtgtggcatgagaagctgtgactgtgcctcagctgtgccccacccggcccttcccagcaggacgtgggagcagcagcaagaagtggtttcaaggaaccgaaatgagcaggtaagatgggggtgctctacttgtttggacctgtcctggccacacgcagaagtccctgatctyggattgagggcccagcccagacctgggcagaggctgccctgcagtcagctggggcaggttggaatctgggcacctcaagaggtggcagtagagaggaaagccaaaggcggaagcgtcgggcttggaccacacctggtcctgggggaggccctgggagccccttggcttctgtgttttacttccttttttaacgttactttttatttttaaatgacttctctcctgagaacatgttttgcctcctggccccacactcacctttgaggggctactgggccgacagctggaggggctgtgatctggggagaggtggtgaaggttttgcccactgcaggggtcaacatgtgcttccctccaggagtctgccgtgcacccgagggagattttcaagcagaaggagagggccatgtccaccacctccatctccagtcctcagcctggtgagctctccctttgggcctggccatgaggcagcagcaggctgagggggagcctggggtcctatgtgggctcccccaaggctagtgacagatatatcggtgacgggtgagtgagtgaggagaagggacacctggggccattgacctcatcagtgaccacactggtcaccagtttggcctccaaaagatattgggctgcgctgtctaccacgtcaccacatagcacatggccctggggcctctgttcctgcactagcaagagcaagccccatgagactgcctygagcacaccagggtggagggtgctgtggggtgcgtgggtgtstggtggtgtttctgaagtgatgtatatatttacccgggtttgcaggcaagctgaggagccccttcctgcagaagcagctcacccaaccagagacccactttggcagagagccagctgctgccatctcaaggcccagggcaggcaaggcgcttgtcaccccatggggaccctgggggacagcagtggagaagggggatgtgtgggagtgagaacctgctgtgttccctggtgcagatctccctgctgaggagccggcgcccagcactcctccatgtctggtgcaggcagaagaggaggctgtgtatgaggaacctccagagcaggagaccttctacgagcagcccccactggtgggttcctacactggggctggggccaggaaggrgctgcatactcaggaacacttatcacgggccgcctgagttttctgggggcatgcaacaggttttaaagcacatgcatttttggagcagccctgtgttataaattgtcagggcacgccccactctataggaggtgctgggtgggaagaggaccttgcagcctatggctgagggatttatgcactgtcctgtggcttctgtactctggtagggcggggacagcagcagcccagcccccgagcctgtagactgcttgycctctgcgtactcccagcttgacctgagccatgtggggcagagcagcgattgtgtgtaagggctgagtctggggtaacacctttgtcatccctgggcaggtgcagcagcaaggtgcyggctctgagcacattgaccaccacattcagggccaggggctcagtgggcaagggctctgtgcccgtgccctgtacgactaccaggcaggtaaggtgccctggcctggctggcacagaccacagggtcctgaggttaggagacaagagggtctggggttttatgggaagatggcaccagggggtatcaggaagagaagacaggagggtgggcggtgcgtttaggggtagaagcacctctggagtgggggtgactgtggcactagagtgttctgcacagcccaggcctccctacatgttcctcattagctatttgctggccgctgatgtgaatcccagttgccacccttgtcacagaacatggactctgagcagggaggtgggccaggcctggatgctggttcaccaggcktccctgggtggaggccttggagaatggggtggaggccccctacggagcaggctggtgtctactctagccttttttgggaatgctctgtaggagggtatgccctgggggtgtggtcactggagccgcattgggacagggtgcagtgttggccaaggcttagcagggtggcagggatatttctgaggaggaaccagagctgcagcgaggtgtgctgcagcagtgtggggctgccgtgggctgcccgagcaggtgggatgtgggagggagcccctgatatgcatctgggctcatcctctttgyagccgacgacacagagatctcctttgaccccgagaacctcatcacgggcatcgaggtgatcgacgaaggctggtggcgtggctatgggccggatggccattttggcatgttccctgccaactacgtggagctcattgagtgaggctgagggcacatcttgcccttcccctctcagacatggcttccttattgctggaagaggaggcctgggagttgacattcagcactcttccaggaataggacccccagtgaggatgaggcctcagggctccctccggcttggcagactcagcctgtcaccccaaatgcagcaatggcctggtgattcccacacatccttcctgcatcccccgaccctcccagacagcttggctcttgcccctgacaggatactgagccaagccctgcctgtggccaagccctgagtggccactgccaagctgcggggaagggtcctgagcaggggcatctgggaggctctggctgccttctgcatttatttgccttttttctttttctcttgcttctaaggggtggtggccaccactgtttagaatgacccttgggaacagtgaacgtagagaattgtttttagcagagtttgtgaccaaagtcagagtggatcatkgtggtttggcagcagggaatttgtcttgttggagcctgctctgtgctccccactccatttctctgtccctctgcctgggctatgggaagtggggatgcagatggccaagctcccaccctgggtattcaaaaacggcagacacaacatgttcctccacgcggctcactcgatgcctgcaggccccagtgtgtgcctcaactgattctgacttcaggaaaagtaacacagagtggccttggcctgttgtcttcccctattttctgtcccagctcatccgtgtctctgaagaacaaatatgcttttggaccacgaattcccagtttggtctacacaggctcgcagctctcacctgtcctgctgtagcctgaatgctcccatgtgggaatagcaccccaccacctgcccagtgtctgcctctgctccgtgtctggggtgagcaccctcaccctgagactgtggctgatgatgatcagccaccaggaagaggctaaatgttaagatgggactgaagttggagccttcctgcgttccagttcctctaggagaggccaagggctgccctgctcccagcttcagggagcctctgcctacatgggatggcccactgtgtggcgtcaggtacctggcacccactgagcatccggggaattaggtccctcctgtgccccagagctgctaggcagactgctaggcggttgactcaaggtgttacctgctagtgcctggggtgaaggctgcatggagcccaaccttgctcctggccttcctgtgctcaggcctctccccttttcgccagggcttcctggtgcctctcccatgaagagggaacttcccctccactcccatggaagacccaggtttgggctgttgccagctttgaggccccctgtgggcttgcctgtcccaacccaagaggcagggctcaaagtgccacccgggggttgcaaggacagcagaggaccacctgccctctgcaggaagctgtccaggaagccgtgtcctgggctgtggtccttgctccccatggggagagctgggtcacttggcctcttctaactggccccaagcacgccaattctggagcatggttactaagtggctctgaagcttcagggtcaccacaggcttgtcctgactgcaaactcatggagtggttgcagccctggctcagtgtcctgatgactaggtgtgggtactaggctcctgcccctggtgacacacgtatggagtgggggagggtgggtggctgcacccctggttctggagtccccacagctgatggcggtgtgagcctggcatgcacggctgcgctggactccaggctgttgggggaggtgcctttattgcccaagcccacccctcacttggccttgccctgggcagccacagcctccatggccttccgcaccgtttcctcatcacccaggaactgcatgggcttggtgggcttcagctccttgttcagctcatacacaatggggatccccgtgggcaggttcagctccatgatcgcctggtctgacatccctatgccggaaggaataggtgtccttagcccctctgtccccagcctgtttacacagcagacactatgtgacctttatggtccacagagccagttcccctggcaccaattccttcccagccctgagaacgaggccacagaaatgttgccaaaggtcaaggagtaactgagttagaccaagcagcctacagaaatagcccagtggtgaaaaaaatggggacttcagccccacccaagtggctgtgatctgtggtggtgctgtccatagttccctcagcccagtgtgactccagccagactgaagttgagggtcaggaagggacactcaccctttggtttttttttttcttttctttttctttttcttttttttgagatggagttttactcctcttgcccaggctggagtgcagtggcacgatcttggctcactgcaacctccatctcctgggttgaagtgattctgcctcagcctcccaagtagctgggattacaggtgagcgccaccacacccggctaattttgtatttttagtagaaacgggttttaccatgttggtcaggctggtctcaaactcctgacctcaggtgatctgcctgcctcagcctcccaaagtgctgggattacaggagtgagccaccgtgcccagcaccctttggtttctaaagtgctctaaattctagacatcctgaacagaggagcaagtgcggaatggagctggaggagggacagggaggccgagcctggtcgaaacctgaccctgcctgcctcctgcagcccctgagctgggaatagcagctcgacctttgatgttcgcgccactccacccctgctccgtgcaggagggtttaagaaaatgttctctggggagtcagagtgaaatccctcatattcaccaccaaaagtgcgtcccctttccccaaaccaggctgtgggagggtcatggggctgcatgaagtctccggaagggagaggaggcaggtggtccttccctctgcctggccccagtgccaggtgccaggtgtccgtgtttggagcgggcaggcttggggctggctgggtctccggggcctgccggtctgggtgctctggccaactgcccaacggccctaggagcaggaggtctggggcacacccttctagcctttccaggactcaacaagctttaaggtcattcagatgctaatttagactgcccttgtgtcagaatactaaggtgggaggcggagcggaggtgccagtcactctgggcgaggccttactgcgcccatgcatcccgggcccatttgtcagcccttgctcttcagtgggagcccagctgcaagcccagagtctggccactccatagtcctgcacccctcttttgattggtctttcctttgcccagagaggggctccagagggagataggtggtgaagctcatgcagggattctgaggacctgatgggggagggccctgcgaggggtccaagcctacatcaagaggaattcagtaccagggggagctccccaccaccccggaaaagggagaggcccagagatggaggtggcttgtccagggccccacagtaagttgggatttggagccagatgctctaagcccagcccttccgtttcctagctgggtgtcccttggcagatgccacctttggagcctgccccacctcgggacacagcgagcttcgagtgcagtcagcccctgtggagtgtgtcccagttacacagaaatggggaaaatttcacaaaactaaaaaatggcttctcagccctcctttttcagtgaatgatgtggagccccacgcctagaaagcctggtccatgggcgagagactttgctgagatgagaagccagctggggctgctgcccacccaccctgcccaggctcctgaaggtggcctcaccttccaggtgcttgacaatgccccgcaggctgttcccgtgggctgcaatgagcactcgcttgccggccttgatctggggaacaatctcctcgttccagaagggcagggcccgggcaatggtgtccttgaggctctcgcaggtggggagttccccgggcttcaggcctgcgtaccgacgctcctgggggacacaggcacgctgctttccctcccaagccagtgggcccccacccgactccccactctgcagcttcccagaggccttcccagcaaaggcagcccaccttgctaatggagttgtagtaggggtgcttctcgtccatcgggggcggcgggatgtcgaaggagcgcctccagatcttcacctgctcctccccgtgcttggcggccgtttctgccttgttgaggcctgtgaggcccccgtaatgccgctcattgaggcgccaagtgcgcaccacaggcagccacatctggtccgtgccgtccaggatggcccagagggtgcggatggcccgcttcagcactgacgtgtagcagatgtcaaactccatcttggcatccttgatggccttggctccccgcttggcctcctcggtccccttttcactcagctctgcatcgaaccagccacagaaacggttctcctggttccatgtgctctcgccgtgccggaccatcacgaggcggtgagtggccatggtggcagcagggaccacagaggactctggacggggacggctgcttcccaacactcccagctttataatagtgtcttcccagcccccacccaccccagccaactgccaatcagcattccaggcggtggcaggtgaccagtagctgagctgctgggggctgggggccaggggagtgtgcaggccaagaggctgtgcttaaaatagccccacgcatccaccagctcctggcctgggttcaggtggcatgtctataaccagctggcacccagagcccagactgagtggggctgctggtcagggatgggcgtgaagggcagaagtctgggccaggggagatggggatagcagggacagaggggctctccagggcaacgctcagtggcctatcagccattctctgctcagacagaggcacaaacaaaatcccaacccctttctcctgtgattggcagccaggctaggaggcggccctcagcaggcagaggaggagagccagaggagctggtgcagaccacagctttgtggagaggagtctggccttgtggaaggtaccaggcagcagcagcagaatgggcaagggctggggctgagccgggtttccaggacaaagggggaaagggcccctgtctttcctccggggtccctttgtcaaggtctcatccatacatgccccatgctcccaccctatctgccctcacccaagccacgctcactctcctagccgaaaccaccttgaaaaagagaaatccaagggggtttgggggcaggactgaggactgtcagaagtcttgattgttaggtaaatgctcagcttagcaggaacccacaacgtaggctgaagggtggcacggagttgagtctaggaccaagacttctgcattcaggtttgggggatgagagccaccaaggcagggaagagactatgagcaataaagtcacaattggggccctaatgaaggggccatggccagacccttgggcatgggccccatccagggcctcccatttcctcccaccccagtgaccacactgtcacctgcgacacttctgataacaggagcgggtaggtgagaggccagcagagggaccaccactctgagacttggatctgagtgtgcaagaaaccctcgacaggcctccctccatccctgctggcctacctggggaggggctcctggcttggggcctgtgaagctaaggctctgtacccaaaggttggcagacaagtcccagtgggcaaagtcctgtcggctgccaggacccccaaggctggcaggtggaacccatccctcctagcagtgccatgcgcaggtctcactgttccacactgatcctgattgaagccacatctcctcatctgcttttgtccctttgaccaagagttgattcactagcccaactaaacatgactgaggaccaggctctggcagtcccacaggggccagacatgaagcccatatttcagtggaggagggatcgtaccagcagctaaacatgcctaccgtagatagcaccagatgctaggaaggaaggaccataatgtactgggagagatgggaaaggagaggccggggacagccctgaggtgacatgtgagtggaaagagcggagtgcaaaggcctcagctatgatgagtcctacagggagagcaattcaggtagaggggttggcaaagacccaagccctacagaaagcaaacaagctggggcagcgaccatcaggggcacatggcagagaggtgggctttgtgtcccaacacagtgggaatcactggagactttgaagcatggtcatattttcaagtcacttgcagctgtgtaggagtggaagtagaagctgagtaccctgcaggtctcggcagctttgatgagaacaaggccgcttagccagggctgggtgcagaagcagtggcaaggatcccccagacctgggagacctcactgccaaccaagcaggaggtgtcaaaaaggaaaggggagcccaaagaagggctggacttcggggaagcaagcccctgcttctgacccttggctccggcttgactttcctttgattcatttgacaagtagttgctggcctctgcagtgtgccagagctttcttggaggggtacaggggtaggaaaaccaaaagccaccctcagggcctccatccaggaaggcatagcatggtgggcggcgaggaaggctgctgagtcaacaaggtggtcccaggaaggtggagggagcatcttcccatgtctctcccactgacagccaccaatcctggacagatgcaggagcagctgtcagtagacagataagaaaaggagatcagattcaaagttccgcagagaagtggtgaggtaacaagtattgcctagcctggacacacaggcggcttga

SEQ ID NO: 96458 - DNA, 26587 bp, Homo sapiens
gagactgccagtcggcctggaacggacgctgacgtgaccgtctccgcagctcggcccgcgctgccagcgcgccgtgggttcagcccccgggcgttgcggccactgctctcggcccgagcttggcccttgtgcctatgctctggctctgccccgaaccctcgtgggctggtgtggcgctacgccctgtcccctggcactccctgctccctgctggcctgctgctctgctgctgctgcctgtggtgtgtgtggctgctgtcttgttcctgctggtggctggcctgatggctgcgctgctcacctgtggcccctgcatgcgctgctggtgcatcacggctggctcgtggcctggggacttcgttgggacatcggaccccggcgcggagcccagcaccgccgaccacggaagcacccctaggaccgggcggagcggcgcctgcgcagaaggggacggaagccgggagagggagggcagtgagcgccgggaactggctgcgcccccggggcggggcgggccacgtggaggtggatcctcttcccagcgcccaccgccaggtccggaccgattcccgggcccgatgcggtgcctgcgaggcgagagcggggaaggggcacctgggggtggggcgagccccgcactgtgccccggcgcccctcccaatgagctgtccgcccccgcctgcgccctggtcgcctggcggccccagagcccactccaccagccggtggtcagaccaccgagaggacgggcccgtcgtgaacctgagtggatcctcgaggggcccgggcggagtggtcgtgctttgggggagggggcgggccgcagacgtgttttccggtggggtgccagcggagtgagcgcctgggaggccgccccagccctggtccggagtgggccggggagtccttatccaggaagtggacgccaggcttgtgcggaggcccccgcccctggccggggttgtcacaggctggtcgggggaaggaaggagggagcggcgcggattctgcctctgcagcagagcccccatccctctttccgcccagggatgctgaagggagctcgcccacgttctgggttgggcctgctggagcgcaggcagcctcctctagaggccgaggccagaccagggctgaacacggcccggcagtgcgcagccgtcctacgcttctgaggcctccccgacggcccagcgcctgtaagctctcacaacctctcaagtcagatccatgcccctagggaggggcagggacggtgcttggcccagtggacggaagggcctaggggacgggccctgagggagctgggcacactgctggctcccacggcccatggcagccccagcacccagcagagccatcccccgcttctggccacttgaaggtttatctgggtctgcagggcccctccactatggcaggcacaatcccaccccacaacccacctctgccgcacaaaaaccctcgaggggcttttcctgagctttgacttctgtgaccctggtcctggaaaggagcacctgaaaaggccttgaagagcaactgggcacctggccgcgtcaggtgggagacgctgggcaggacagacgcacaggccatgtgtctggagccctcagatgagtgtgacacctggtcctacagaaaggctaacagggcaggaccctggtctccaactgcctctcctcctctgaccagccgtcccacccccatgggccccagccaggacttcctggggagggaggggccatcagccggctggaagccaccagctgtttgtagcactgtgtgccgcttcccggggtgggggcataatgtgtcatcaatccgtgtttataaagcagccctggatgtgattccacaccctccctgcttatctgcagccatgcctcccaaacaatgagtctctccttcctgtgggaacagccccccatccccccgagtgctccccctcagtctagtagggaaactgaggccccagttgagcctttgtcctcttgatgggcagggagaggatgggtgttactttgtacttatatttattctgatgttacaagtgatacatggtccttgcagaactcacggggagtccagaggctcccagaggggtgtttttatccccacctttcttatgaggaaagagaatcacttggagagcagattggcccctgccccaggaggtggagaggccggcaccggggcgccagcaaccaacttctccagatgttctggactgagtgctgggggttgcgcaatctctgggcactccccccccccacttcctggtttgtggtctcatgctcccaccacaggctggaagcggtgggatgagagttccaactgtggcctgcagagtgggctggcgggctggtccaggacaagagaaagtggtgccaggtgagaggagggggcctggggcttcctctgtccccagtttgtcccactgctgggctggaacaggcttgttggaggaggcaaggatatcagtggaagatggagatgagaacacccttgaggctttgaaaggagtgaaggctagtattggtgctggggtgagcagccctgacccccgacctccacaataggccacaggctgtggaggggctggagctgcctccagctgtaggaggtgtggccatcagtcgctggagcctttataaacaagtctttgagagatgtggctgtattggctacaggggccagggttctagtatcagccttatgaccccagggtgcccagcacactggctccgtcttctctctgatggaggggggtgctgacagctgttgaggtgggtgtcaggtcagagcccatggactcctctacacagctttgagctggcagcttcccagcagggtggctgctggcctcttgactggtctctgcggccgtctgtgtctgatgagccctggagggccaaagcttccttgggcagagaaggcagccactgggcaggccgaggttgggtgtgtgtgagctacatcctccctgcctggggctgtgctgccaggccctgggcccaggtgcttatgggaaccccttgccaaaccctgggatatggggagggggcagctgcctcagaaatagcctatgacttcaggccactggctggcctggcccccttctgcctcttccccaaatagccaggagctggtcatgggcccatccctggagccctgctccccaggcggtttcttctgatccttccagggactccccaaagcccagggtctgaccccttgggtgattacttgtggcctagaagctgagctgaggattctggggtagcagaggattctggggtacctgttgggaacactcctcttactggtcagggctcccattccctcgtgtcctggtgtgagggccacaaaccctgggtttggtctagaccctaaccctaacccattctcagacgcctgcccaccagccccgggagtgctgggcaactgcagctgatttccatttctccagggtgcatgacgcgggaagagaggggccgggagctgggtttccgtatagggggctcctccaccaggacagagagtagtagggcaggcaggaggcagagcacacatatgtgcacacacttgtctatgtggactgggtacaatcctgagtttcgtgcgcgtccgtgtgaagagaccaccaagcaggctttgtgtgagcaacaaggctgtttatttcacctgggtgcaggcgggctgagtccgaagaaaagagagtcagggaagggagatggggtgggaccgttttatagggtttgggcgggcagtggaaaattacagtcaaagggggttgttctgtggcggggaggagtgggggtcacaaggtgctcagtgggggagcttctgagccaggagaaggaatttcacaaggtaatgtcatcagttaaggcaggaaccggccattttcacttcttttgtgattcttcacttgcttcatctggatgtatacgtgcaggcttgggctcagaggcctgacactgagcacacgtgtatcgacccccctctgatcatccttctgatgacctcactcaggaggccagggtgggctgagagcctggggattcctggacacaggctctgagctggggatttgcctgcagaggcagactggggcatgctccccactgaaggtgactcctgggtgcggggggtttcagctctgagccggctgtgactggtgctcctggcagctggcgatgagtgtctgggtcttggagcgggtctaggtggggtctgacagagtccactgcaggaggagacctgctgacaccagatgcccagctgtggcatgctttggaggcaagcccagtccccagctttccagagaggacaccacttctggccctgccagcctagtctgggcatccaggcccgatagggcttgcttatccctggcagggtcaataatgctaagcatggagactgtcctgtctctggctgtgagcctggcatgggaggggtggcacgtgcaggctatcggagcactgagtgttggcaccggggcaggctccctctcacccggtgtccgtgatgcactggcagtcatcccctggtggagttaccctccaccccctccaaagcttccattgtctccttctacatgagaattgtgttgatattgcttgtgttcagagagcacccattatgtgcaggcaccgccctatcccgtggcatggacaaggatatgggcaggggaatcttgcccaggctctgggatctaccggtaagtgtaccagcaccttaagttcaaattctccccttttctgtctagccaaggagcaggccattgtctgcgtcgggccctcaagtgcaacagctcagtttggagagggctggtgccacccagacccagaggatggcactgaagcagcagcaccttgtgaccagcacagggcctgaagacacatttgtccgaggcatgggggggcaccctgtagaggggtccttagggacccatgggacgaagggatccctgcaccctctatccagaggaagccttggccacccaccactcagagctcctggacagccctgcccgtactctgctgttggcacccctgtcccccaccctgggagggtcagcccacccagtgtcaggagagaaatgctgggaaactctcaccagcagccccagcggaaagcagagtgccattttgagtccagcccagattgtgcagggatatgagcccaccccggggtggccgctgagctctgagacagtgagaagagcccagagtggacaccagacactgcgctgcctctgctgagtggcttcgggtggggccggtgcagcctggcctgagtgcctgctggtggagcggggcttctgggggtaggggcacagggcagggggaggggtaatgactgtggtcctgaactgagtgtgtgcatcggtgtgtacacgtgtgtgtgtgcacgtgtatgtacccatgaaagatgtacatgagtaggtgggtgcatgtgagcacgtgcatgtgcaggcgaatgaacgcatgaagtggaaggatgtggggacgtgtgtgtatgattgtgagtgatcggtgcacatgaatgtgtgtgagggaatgtgagtgcttagtgggattgggtgagtgtgggatacaggacttgtcagcgtgggcctctggaggaggtcgggtttaggggagccagggatacacacccatcctccgccctttaccccgtgcctgctctccctcctcaccctcttctcagcacaaatcagggcaggacagctcaagcctcaatctggagccagggagaggcggagccgcccagcgctgacactgccgtccgctcccaccaggtcctccgtcgggccgaggcgctggagaccccagccccaggtgtccccgcgggcggaccccggcggccttccgggaggaggtgacttgggccgggcaggcgggcggcgcgcattcctgagctctgagtcagcgcgaccgccccgctccggccgggcccgcccccggcgcgcacgcccctcgctccagggcattcccgggcgggccggaccggcgggcgggcggggactcggcgcgggcgccctcccggccagcggcggcagcccctcctccccggcgccctcaggaccccccagagacccccggcggcggcagtgagtgagcgcggccgggagcgcagggctccgggggcgggcgggttccggggctgcgtccgcggagcgcggggcgagtcctcagcacccggggccggagctgctcagagcggccggggycgtgtcggggccggggccggggccggggaggggtcgcggcgaggccccsccggggcggccgggcttttcttcctggagtttcccgagtcgcccgcggaggcggcccagccccggattcctagcccggcgcgccgcaaaaatagcccgtggccggattagcagccccagcggcctggccgggcsggacagctcggctccagcccccgcccaacagctgagggtcccaggagcgggagtctagagtccgggggtgccccaggttcctctgaactccccccgctgcattttccttcccggccacgaccggcgggtggtgtctccgagctgaaactccagcccagggcgggatggtccctgtcccggctgccctcaccgatgggaatagcaggagccgtggagctgggggtgggggactgactccgccttctgccccacgacactgactcccccatctgtacacttcgaagctccagggtgggctgggagcgactcccgaagacagactctcactctgtgcgcagaggccaacggggacaggccttctcccggctggggtgacagccagaccccagatgctcagggcattggcagagggcctggttgtctgtcatgctgggggcatgtttgtggggctgggcggggaatgggcaggggatcttccctggccccccagggcctgcttccgaccgaggtggtcctgaccagagtttcttctgtgtgtgccgcttgagatggtgaatgtgtgtgtctgtcccggtgggtggggcctaggtctggaggcccttctcctatcctgggaactcccacccgccaacgggacttcctgttggagaccgggagaagattcaaggatgaaactggcttttcaggtttgacccagctagatgcctgggcagtcccaggctcggttctcctcacccctgtggagctaaccccaacctcctagccccgaccccaagggtgggcagaagctggggaccaagcagctggctggggctcaaggggtccctgaggcggagccccctgccaccaggggtcattctgggcaagccgggccccttttcctgagaatggggcaggggcaaatggagtgcatgggagtctggtggtgccagattgaaggggcctcagaccctttcccagcccttccaagtagctttcactggctgggtggcctccgttgcacaagcaggcccctcaaccagcacccctcatgagctggccggtccccaccttggggagctgactttctagggtgcgctcttggtttagggggagtcgtccaggtctcccctgcctttcagggaccatcaggccctcccctaggatcttcccagctacagtccctgcccagggcacccccagttgctcttggctgtgagggcctccgccacaccggctccagttcccccacctcagtgtctgtgccaggatcacattttgcccagtgattggattccttggcttctgcctttttttctgagttggacgattttgggggtgagtccttccttcttcaactgagatgcccctgatggagcaggtggcaaggggtcttagaagggtctgacagccgtccacagccacaaggctgaagaacccaggtggtctgccttgtcttctgggggtctgcagacagggtcccttccactgcagctcctgggcagacctggcccaaggctttgagctcccttataggccctgggaccttaggcagtgatgggcttctctgagcctcagtttccttatctgtaagatggatacagaggacccctcccaggggttagacagaccagtgtgatcagtcaggatctggtttgaggaagctgagccaggctgctgaggaccgaagccatttctgctctgacttggtttccctcctgtggcctctctagtcctatcctgcttctggtgggtcctgggagggggttgcagggttgctgagcccaagggtgcctgggcacctgggtgcatgtgtgtagggtcagtcagggacacctctggagggctctgactggtgactgggctgcccatctgtcctctggccagacgtgtgcakgggatgtgggcctctcccacctgcagcctggggagggtgttttcgcctaactcctgagacccagctagactccagactggggactagcagtgaccagcataccaggcagtttacccccagaatctagtgtagctaagtccttgctgccatcccctttctgactgtgtggcctggacaggtgccctgagctgcacttggtgtcccctgattcctgggtgtgtctgccatgtcagcccctgtcagacccaactgagtcaggggtttagctctggtgacccctgtgccacatttgctagctgagccttggggcagtgcccccccccctcctgccaagtgctggcccctttgtgcactaccctcacaggtcaggtcctcagggattcctgtgtctacaggccctagggcggcttccctcacagatggcctgtagcagggaacctcttgttctgtctccttgtctagggtgatgaggggaggcagggtgccagtctgtcctsctggggacctggagagaaccctgcaaaggtctcaggcctgccctgctccaccctgaacctcatttcttccacagaaaagaagaggcttcactgggagggttgaagagmactttggggtttgcaaagggcctagcaaatatcattctcagcatgatgccattaatagacaaggcagagaggccaggtgactttcccttcattaatccagaagacctggaggctgggctgccagacagctggtgacccccttctcaagggagatctaggattgagcttcagattaggagtcaaacagaagactgagggtcagagagcagcgtgtgggtggggatgctggaggagccacatccccctgggatgaggctcaygtgagctgaggacacgtctgggaaggtgtcccggggtgaggccccttgctccagctgacctcggcagcaggcagttccttgggcggagcagagcccaggcttgatggttctggccccggggttggcagtcaactccgccgccagttgtccctgccagcatggtcctgtgagtgtgcagggcaggcctgagyacagaggtggttgctgctcacacctgaggatgcagctctccactggctgtggccactgtctatgcctggactggccagagcttctctctagtctcttcccaaactcgacacctttggagggttctgtccccaggtgtccccagggctgccctcttgttgcatatgctctagggtcctttcaccccccagctcctgcccctcagagagtgccaagtacccacaggctacaccaccctgtgatggagtcagccgctgctaytgtgccaggcactgctgtgacccctgatttccagatgggaaagctgaggcttgcttagggttgtaggtggtggagacacatggggcccaagcatcagcctgggctgtccccagtggcctccctgcatcggctcctgctttctggctctccctgcacctgtgcacgcggccagcttgatgggtgcccagacatccccagagcagaaacctsagttaacaggactctccaccatcccccactcagcccttccacaccaggctctgcaggcagcsagaggggacgtcagcatgcatggcgccagtggctcccttgaccctcctcgtccctcagcctcatcgagagtcctgcccgcagccccccccagctggtcctgggatgcactgtggctttgggtgtctcctgatggggctgggcctgggctggcagctgtgaggctgctgcartgactcagatgctgtgtgaccccaggcagtgaggccttccgtgggccacggtttccccatacactgaggggtcagcggggtgggggagacactgtttggatccccccgaggggctttctgggaacaagagcccactgtgcgcctggggaaggcctggacactgagccactgtctctgggagggcaatgtgccgctccctggccagactctttgtccagcctgggcctgcccctccccacgcctactccggctcttcctttggaatcccacccacttgaggcccagatggggatctaggcacacaggggtggggcagaccagaacacccagcactgcccacccgcaggacctataactgtcggttctcaggtcccctcctgcctgcactcctagcagtgggggtttttgtggaggtgggaaccccaggagacctggatgtagaggcatggcggctggtgcctccttcatgagctgagcactctgctgtctcctggggccgactgtggtccccggctgagacagtcctggggaggttcctggggccgactgtggtccccggctgagacagtcctggggaggttcctggggccggctgtggtccccggccgaaacagtcctggggaggtcaggttccccgtacacgctcacagctctcggctcttctcaccccctgactgttcctgcttgcatccgctcatgccaggcagctcgtcttcccagacccagctgagaggtcatcttgaggaatcctccgttaccccagattagggaccccgatggcctgcgttgttcagtgatcagtgcctacccagcggtggcttcagagcaggccagtcctgagcactgtggaggcagcagtgacaggacagtggcccatacatatgtgaatgaactcctgccttgtgctgtgcccagggatccaggccaaggaccgcctttgggtagtagggcagcctgaggctgcaggtcctcccacacaggggagggtgggcagagcgcatttgcagggctctgagatgggagggagtcaggtgtgaggagcagcggagagcaggagccagggaagtcatggatgtgtgtgagcccatcagctggcaacggtctctgttggcaaaggtcactcacactcctgagtgaagaaccagctggatgtcgcctagtgctgctgggcacaggtggagactcctggagaggctggccccctggattcagcctgctgattcctggcagtggccccagtctctacgctgggccctgctcctctctggcccccataatggcctcactaagagcattcgtccattttctgggtgagaacatgctgggagtgtactcagaatgctgtcccagcactgtgggttccggaagccccttgccgagcaycacctgccttcccaacgtgtctgatgctgtctgaaattccacccttagtgtctgagactcagaggtggcccctcctggctattccttaccagcagggtgatggtactgcagtccatataccctgtggagggagggctgggggacgatgaggaagtctagctgtgaccccttcacgctgtggctgggccgtatccaggacacgcaggtctgggctgggtttgggtcacgagtcagatgcagaggggtctcctggtgcagttcccagagggaccttgacccacccagttctcagttaggatgcctttctgtccgaccctgttgcactctggggctctgcatgggtgaggggccctggagggatttcccagtgatgtggagttgctgcccttggctcgtgcccctgattccaggccaagtatgggccagggacaggaactcagccttagggggccatgtggatggaatgatccctgggcaccatgcctggggagtgccccaaagctttgccccccagctctcacctgggacctgaagtgcacagtcagctcagataaggggctggagcgtgaggggtggggtaagagccagcagaaggcatccctgaagtaccccctcccacctgtgtctgttctggtccctgtaggaccagtaggggctgtgagcagcattcccagcctttccctggtagtacagggtcggaaggagccgtgagctctgtcccaggcctgtccctggctggcataagaccattaggagctgtgagcagcaccctgggctgtctctaattgtgctgccctccatatatgaccgtgagcgaggcaagcctgtgtttcctggcctcagtttccctatttgtacagcataggtggggctttcctccaagcagttgggagggagacctgtgagtgaaagccatttctggggccttggtgggtgggttgccgacccagcggctccgagcctgtcagaggctgcagctctttaaagaggctgaggaatttggggttttctgtccaaaattgcttcagctctggccagccccccactatctgtctcgtgtcatgctcaggggcccttctcaatctgggtctccactggaatcgccgtgtggtccccctgggttggggacagctgcaggtctgccaggaaggtgtaagggggaaatggagtcgtagtcatatggccaggcagtggtggccagaatcgaaccctggcctatctgctctggggccttccgtggggccctggccccgtgcctggcatgtcatggtagagccaagcttgcaatgccccgcagccccggcaccgagccgcctcactgctgtttctgggcgcgtggcgtcacctggtggtcactacggtgtctgcgcccgggtrgtttctggaaagtcatttgtgcccaggagcctggggccactagctgctgctgtgtcaccctctttcctgaatgtggtgactctatgcactggaccgatcacacacctcttgcaggctgtcatgtgcatagtgggccctttgtccctggagtggaagtctkggtgggtaagagggtgaggcctggtaagacaggtgtgagatttgccctgggcacagactagggtgagcctcctgtcactgagacctcagatcggctgtcccctgtgtgtggaaacccctgcaaccccagctgtgctcactcccctccttcaagcctttgctcagctgttacttcatggggaggcctcactgcctcctgtcaagcaaccctagtttgcttcccccgctcccatcatacttagcatcttttaaccagtacattcactcatttaaaaatattgtctagactgtaagctccaggagggcagggattttgtctcgtttctccaccaatgtgcctcaagcacctagagcagtatcctgaccatagtgtgtgctcagatagttgtcccatggacttatgttgtctgaggacctaggctgtgcccagcactgtctgctgggatgaacaaggcaggcacagagaaagtcgrtgctgagcacacagtagtgctctgacagtgggggacatgagcaccacggttgggctcatcactgcttctccctcctcccgggtctgggtgcaatgaatcttcagatgtcagctttgtcattattgaataacacaccatgccccrcaggcctgccttgctctgccaggaaccatgagtgaggcccgcagggacagcacgagcagcctgcagcgcaagaagccaccctggctaaagctggacattccctctgcggtgcccctgacggcagaagagcccagcttcctgcaggtaggccctggcctgcagggactgtgggtgccccctgtccagtaccctcaccatgaccctgttgcccagcccctgaggcgacaggctttcctgaggagtgtgagtatgccagccgagacagcccacatctcttcaccccaccatgagctccggcggccggtgctgcaacgccagacgtccatcacacagaccatccgcaggtaccaacaccgcccagctgctccatggggtgggagctgggggctggtggggcagaggcaggtacacagaggatggaaatgagaacaagggccctcttgtttcagcttcctcctccatctcggtccccaccatccccttgccctcctcctgttctggatacygaccgctctcaccccactaccctgctccactcccttctcttcagcactcactctctccttctctgtctccaccgcccggatgctcttgcctcttagcagccgacaagtacgcttcgggcgtgtccacactctgcccctcttgggtccccgggctgcccgcagggccttcccacagcgccagtctctctcttggtccctgctcaggtatctcatacaggtcatgagtgtgttggtgttttctggcatgtgcttggcatgtgacctcttgggagctgccagtgtggttggcattccctggggctcctaacggcaggtgctggcagtgtttttgtttgcatgtccaagtgctgtggacagcctgcctgggcccgtaagcacctgctgtctgagctctgtggtgtcctggggccaagctctctcgggttgagctctcagctccttctctggactcagtgcctcccctcaactgcccctcagggatggtggggtgagggcctctatgaagcactcaaccgggcaaggccagctgcggtctagtggaaacttggagttggctaacagttcrgggggtggctggaacccactcatcctcttattagaccttgcccacycagaccctggtccctggagtgactacaggcctggggcagggcatgctgccccggaggagggcctttgaagtcccctgcctgggaggggcgatctggccgccccttgctgagtccctgccatgccagggggaccgccgactggtttggagtgagcaaggacagtgacagcacccagaaatggcagcgcaagagcatccgtcactgcagccagcgctacgggaagctgaagccccaggtcctccgggagctggacctgcccagccaggacaacgtgtcgctgaccagcaccgagacgccacccccactctacgtggggccatgccagctgggcatgcagaaggtatgcctgcctgttgctgcctcctgcaggcccctccttccgctctcaggggctggggctgcggacacagccagcctgagcagaagggactstctgggagctcacagtctggaagggcagtcagacagcctgctcgtgaaggcacctgaaacagtctctgggaaggggtaccttgggatggggacatggtcttgggattgcaccagggggccagtgtctggatgggagagcattccaggcaggacctctaggtgctgtggggtgggagtggtggccatagagctgtccaggggcccgtgaggagtcaggagcagcagtcacgctgtctttgcaaggcctctgtgcctctgggtgagctaggagcccccatggtcctgactccagcatctcctcccctcctccagatcatagaccccctggcccgtggccgtgccttccgtgtggcagatgacactgcggaaggcctgagtgccccacacactcccgtcacgccgggtgctgcctccctctgctccttctccagctcccgctcaggtttccaccggctcccgcggcggcgcaagcgagagtcggtggccaagatgagcttccgggcggccgcagcgctgatgaaagtgggtgcaggggccaaaggcggggttgggggccgacccagcagccgggtctcatgctcacttccccgtccccagggccgctccgttagggatggcacctttcgccgggcacagcgtcgaagcttcactccagctagctttctggaggaggacacaactgatttccccgatgagctggacacatccttctttgccygggtaagaagtgcccggggtgtccccccaccccacgttcccttcctgcctgtgtccaccctgacctcatgtgtttgctcaggaaggtatcctccatgaagagctgtccacatacccggatgaagttttcgagtccccatcggaggcagcgctaaaggactgggagaaggcaccggagcaggcggacctcaccggcggggccctggaccgcagcgagcttgagcgcagccacctgatgctgtgagtgcggcaggcagggaagrggggcagagagagaccccggggcccgtcaggaacagctgggcgagtatcggcattcacctctgtgggcgatggaaggggtagcctcagggactgggaactcactactcactgggccaccaggggtgggagacgcagrgctgggcatggccccagtctcatggcttgcctgtggaatgggacagcaawcttagaacccaggggctgggcagaatccaacggggaggcggaggtgacagaggtgatacttgctgagttgcagaagtcagtgtgtccccgttccagctccctgccatccccggaggcccgcagtgttgcttttttactggcaaggagaaggcagatgccgggcgacttgcgcagyatattcgccaggatagagacagggtgccctggtgccccycggggagggactgcagcagtttgcggggctggggcgggaggtgaatgccggctccctccaggcccttggagcgaggctggcggaagcagaaggagggcgccgcagccccgcagcccaaggtgcggctccgacaggaggtggtgagcaccgcggggccgcgacggggccagcgtatcgcggtgccggtgcgcaagctcttcgcccgggagaagcggccgtatgggctgggcatggtgggacggctcaccaaccgcacctaccgcaagcgcatcgacagcttcgtcaagcgccagatcgaggacatggacgaccacaggtaggcgtggcaggcaaggcctgggttgggatggaggctcccgggggagggtgggggctccgggtcggggatgaggcccccgctgacgctccaccccgcaggcccttcttcacctactggcttaccttcgtgcactcgctcgtcaccatcctagccgtgtgcatctatggcatcgcgcccgtgggcttctcgcagcatgagacggtggactcggtgagcccctgtgccttccctgggcccagacgagtggagtccgggcactggaccccctcccgacccgctctgggaggagagggccagagtcggggcccgtctgatcccgctccccaacctcccaggtgctgcggaaccgcggggtctacgagaacgtcaagtacgtgcagcaggagaacttctggatcgggcccagctcggtgaggacggggctgggggcggggccggcgggggcgggacctggaggtgcccggcgggggcaggaggccccggactgcggccgctcgtctccctcgcccgcaggaggccctcatccacctgggcgccaagttttcgccctgcatgcgccaggacccgcaggtgcacagcttcattcgctcggcgcgcgagcgcgagaagcactccgcctgctgcgtgcgcaacgacaggtcgggctgcgtgcagacctcggaggaggagtgctcggtgcgtttccccgcccgggactcccgccttcgtctgcccggtgttcgctcttcagacctcagatagactcggcagagtgatccttcgccctcgttcctggcacatcccgccgtccttacgcgcaaggccttgtcatattcattcctcctcatccccaccctcccccatctccagctcctcgccccgtagaccrtcatctgatttggtcttttgatttgggtgtactcttccagcatgtgtcttaaagcttacataagtggtatttgcctcttttccactaagcaatttttwaaaaaattcatcccaactttcatcacatcatcttatgtggaagtgccgtagtccataccagttccctgatttaggacacagaggttgtttctgattttcagctaacaggaattatgccgtcaaactccttgtaagagtcttttccaacatgcacgtgcatctcaagagtgggggtgacttgtagaagcggagggaagagctcagtggttttgccttcgactcctgactccctgcgtgcccctcattgccctgacccaactggacctgaccctgtgtccccctcccacagtccacgctggcagtgtgggtgaagtggcccatccatcccagcgccccagagcttgcgggccacaagagacagtttggctctgtctgccaccaggatcccaggttagtcctgccggcagctctctcacctgcctttgtccacaccttccccgggggctgtggtgcagagggtgtaggggctcctcttgttggcgacttggctggaagggtgccaatgctaggggctcgaagccggtctgaccacatacttggctcatgcagggtgtgtgatgagccctcctccgaagaccctcatgagtggccagaagacatcaccaagtggccggtgagctgcagtgggggggttgttagggagccctccgtgtcatgtgggrgagaatgccacaccccacccactggtgataccagagattcccatcatgggaccacctcacgttttcagaggctgtgcacctgccctttgtacagcctgtccatcaaccagcgcctgcccctctgagcaagtagatcaagagaactagatggagacttgaaaggtcaagtgacattattccagtttgatagagactcagtgtggtggcctgcttgaagtcaaggaagccacaccgttttctgctttatgagcccacccatctttgcctctacccccaaacgtggtgtggggccaaaggttgggggaggccctgactcagctcgtcctcatttgtgacccagatctgcaccaaaaacagcgctgggaaccacaccaaccatccccacatggactgtgtcatcacaggacggccctgctgcattggcaccaagggcaggtacgtgtgcgtgccagcragtgcagctggtctctgggctcagagcatcgccctagggygtgccytctccctaaccaaatcctgaaataagccagtataccaaggatgtggggttagagggggtctggacttccttggggccaacaaaggtgggtaggtgcggctgaaactcgccctggatgccagcaatccccctctgcaaggcagcagtctccgaaccctggcctgcctttctaggtgtgagatcacctcccgggagtactgtgacttcatgaggggctacttccatgaggaggccacgctctgctctcaggtaggtctgcagagtgtccgtcgttcccctcccccagctactgtgatgctgatatgctgctctgcgcaggtgcactgcatggatgatgtgtgtgggctcctgccttttctcaaccccgaggtgcctgaccagttctaccgcctgtggctatccctcttcctgcacgccgggcaagtgacactgtgggccgggtcgggggtctcagggccctcaggattggctggctgggggtggcagaaaggtcacttccctgctgaatgtctcccgacccccgcctgctactgactacaggatcttgcactgcctggtgtccatctgcttccagatgactgtcctgcgggacctggagaagctggcaggctggcaccgcatagccatcatctacctgctgagtggtgtcaccggcaacctggccagtgccatcttcctgccataccgagcagaggtaaggctggccctcagggtggggatcctcccgtgtgcacctgcagcctgctgtgaacctgtccatatcgagcactgagtctgggagcatctccagttggatcctcggtcccaatatgctctgggccatgggaagtggggcagaaagatgaggccttgggtccagggggcctgcccagccccactgccttacagctaccccaaccatcccccaggtgggtcctgctggctcccagttcggcatcctggcctgcctcttcgtggagctcttccagagctggcagatcctggcgcggccctggcgtgccttcttcaagctgctggctgtggtgctcttcctcttcacctttgggctgctgccgtggattgacaactttgcccacatctcrgggttcatcagtggcctcttcctctccttcgccttcttgccctacatcagctttggcaagttcgacctgtaccggaaacgctgccagatcatcatctttcaggtggtcttcctgggcctcctggctggcctggtggtcctcttctacgtctatcctgtccgctgtgagtggtgtgagttcctcacctgcatccccttcactgacaagttctgtgagaagtacgaactggacgctcagctccactgagctggctgcgggctccagcggccgtgtgctccagcaggccagagccagacacgacctccctgagcctcacaggcttacaggagtcacctgctccatgtggggactggcctgtttcctgaacacagacctctttcttgtgccttgttcacttctgttgaacccctcgtactgccgggcatttattatactacttcctgtcataaccttctaacttgtttcttgacgaccacctcatgtggccaataaatggactgggagcgttttagctgccattaacttgaccagggcttccctatccttctttgtttctggctggaagctgtggagggaggtcctgcaggccccttgtggctgactcacccgggcagggaactgagtgtcagatacagtcacgggctctttcacttcccagtgaaatccttcagccaggcacgtgcaccttgctctttcttagagtggctggtagccgacgctgggacagggacctagggatgtactgtcataccctccccacatgctgggaagcaccccgcccccacccttagcagctccaatttccaccccacactccctccctgtccaccgaacctgctgcagggaaccctaaaggctgaggctggagggcccacacacagctgtgctatgcttgctgccactgtgagctccaggatgcaaaccctaaagccgctctgcttttatttcctccttgctgtggagatcatggtaacacagttgtgtggtttggggagtggtgtggcctcaaggctttggtggtgtggcgccatcttggactataggactcgcctgtaccaattctctccccttaactcacctctgtgatggggcaatctcagtctttgctacccaggttactgtggctttctacttttcaaactaagaagcaaacaggtttattttatacagtgggccaggccgtgggtctgccatgtgactagggcatttggacctagggagaggtcagtctcaggccaagtacatgaaaggagggagcactggctcaccctgtcctagtcctgagggcccccaggtttatgctgacagttcctgttgggcatgcctggggtgaggccaccacaacgtcctttctgtgaaagaggcacgatgattcgaggacccattcctgctgggaaaaagctcagccaccagtgatgaagagggttgtcctgtctggaggctcacttttgcctcagctttttgatgaaggaaacctcgtctcgattccggatgccgtagctgaaaaagaaggaaaggcataaagcacctgccctacagaaggacatatctgtgactcccctcctgaggctgtggaggaccacgaagaaacaacagaggggaggcgtgtggcttctgggaaggccaggaagtggcagtggccatcctctcacagacccagaagcactccgactcacaagtccccggggcagggaactgagtgtcagatagagtcacagcctttcgcctccatgcccactctgatttcctccctcctggcactgtgtagccctaagctgccactggtgggaagcagcaaggcccctccaggtgccctctgcctgccattctcctagtggggagggccccaaggaagctccttggaggagggtgttatctccggagagggagccgcagccctctggcagagcatgggggactaaggggcaacagaacagcggtgccctacggctcaggacgtggccggcacttactctcggagcttctttctgtcttccgtgagtttctctcctgcagaggtcagatggtacgtcctccacacgtaggacctgcaagaggggaatgcaggtaaaccacgtgccctgagcagggtgagctgagtggctctgcatgacgtgggcttgaggcatgcagtcctatgggacctggggcagctgtcctccctacctgggctgttctgtacaatgtgcagattgggtctgaggcagctacaaggaggctctgttctcagagggctgtctggggcggcttggccaaacaaaccttgctaatgcaacaggcgacagtgttgagactcagtgaacaggatagttgatccaataggagagtgagggctgacagcacccaggtgagaaggggatgggagcccctacaggtgtaccatccaaaactagggaggccacttccagacacactggaaattcccgacagtgtccccaagtgaagatacccagcagctcggatggggtgatgccgatggaagagcagaatgttggggatggccgaggcaggagtcccaggcacagaacgacccgcactgtctgtgacagggagctcatcactcttgtgacagggagctcatcacttcagtggtgctgtactcatgcagagctgagagctgtttccaggtggtgcctggtgacagtgccaagaagggcactagccccacgaagggctataatgaagggaatgttgttccacttaccagctgatgtgctgaatgcccccttcacgctcctgcttgagctgcacgtatctctggatggccttcttcaggtccaggactgtggcactctgcactacaaccacggctgcaaccacggacacagatgggagaagatccatggtgagaacccaaagccacagcctccgatggcaggaaaggaaccaacacctctgtgcacagggcaggtttgtggttgccccagtacccctgggcatggcctgtgagtttctgagcaggctgaccagcactgttaggtcttcctgctgtgaaagcctggaccacataacctgaagggaggagggtagcacttacgcattacttctccatccatcttgcacactcggaccgtcattgcctggccgtattctagggctatttgggagttgacttcttccagagtaacctacaaaagaccaaaggcagaagtgggaaccctggctctctttaccaccttgagcaacaacaaagaacaagccgatagtggccaaaaagtggtgctccattttacgaagggcaaggaagggtggttgcctgtacgttacggtttcccaattcatcagagccccaatctcatgttccactcacattttaatgtccatagtggacagagtctctgggggaaagaggtgctaagaaacaggcaagagaataaactcacatgaggacctgcccccaggggtgggtagaggcctgtcagttcacgctgagtatatccctgatcatcaggacccaggccaggcttcgggactgagtaaggcaggtgtgcaaaatttaccggggcagcaaaacacggtaataacaataaatattttaatacaacatttaagaaatacaaggcaattaaaatatccatgatgagcaaaatataaaacatttaaaattggccgggcgcggtggctcacgcctgtaatcccagcactttgggaggccgaggcgggcggatcatgaggtcaggagatcaagaccatcctggcccaacatggtgaagccccgtctctactaaaaatacaaaaaattagccgggcgtggtggcgcgtgcctgtagtgaacccgggagggggaggttgcagtgagtcgagatggcaccactacactccagcctggcaacggaccaagactcagtctcaaataaataaataaataaataaaaagacagtatcgtcccaaagcatgatactgacgctttgacacatgattgacgcttgaggcaaatggaacaatcagtactactaatcttgctcttatttaaaactaaatttttcttttaccgtaggctctttttttgcctcaactttgacttttaaaggtattacaggccaggcgggtggctcacacctaaatcccagcattttgggaggccgaggcaggaggatcgcctgagcccaggagtttcagatcagcctgggcaacatagtgagactccctctgtacaaaatatttaaaaattagccgggtgtggtagcgcgcacctgtggtcccaattactcgggaggctgaggtgggaggacgccgctgcactccagcccgggcaacgcagcaagaccctgtcccccgagccccctaaatacaattacattaaaatgtcatttgatgtcactcactaatgaggtttttggttcctctttaagcttcgcgccccaggcgagtgcgcccggtcaaggttaaaaccctcgtttacgcccagaggcgccttcctcagccttgggccgcagtctcccaccagcaccttcggaggctgccggcgcccggatgcccggaccccggggaacgactcccgcgcccccagcccccgcccgcacacacctggatcggcagatcgcagagcagcgggtcctgcaccaccatagccagaccctcctggaacacgtccatggcctcggagtgcggcagcgcctcttcttcgtcctcatcttcctcttgcgcctcgggcccacccgcggcctccgtctcctccagggccgcccctctcagccgggctctgcccgcactgccagcccgcactagggaggccaagcgcgcacgcgcaggaactgcggcccgccccagcgaggccgcccagccactggcgcgccggggggggtggggcggctgcagtgaccaatgacaagtgcgagacagcctgcagcagggccgggagcgcagaatcgccctgtctattggttggttggtgtggcgggaaggctgccaggaccaatgtgagctcgaggcgggcggcgcatcggcgctgagcggcagtgggagctgccgggagttggagcctgcggagttcgagaccatgctgctgttctgccccggctgcgggaacgggctgatcgtggaggagggacaacgctgccaccgcttcgcctgcaacacgtgcccctacgtgcacaacatcacccgcaaggtgggacccgaaggccggcgctgggccgcgggcgactctcgcaggccttccgcgtcctccgactgctgctccatcgccgccagccccggcgtctgcctctgtccgctctttctcgcgcccctttctggtctgcagcagatctgtgggctctactttccaatacactcagaaagccccaccgtttcccaccgccttgggttcctgctcccacgctcgcgcccttctctgcgttcacagcggcggccacggtgatttccttaaagctgaggcacgcaggtccgtgctgtgcgcagaaaccttcggctcttctccagctcacgcagacgaaaagccggagttctcccagggcctaccaggttccgacactgactccctcccctgcgtgcgtctccgatttcaagtcctaatgcccttcctgttgccctttgccgcatcaacaccgcctcctggacgatctctcatcgtgcacatggtgctagcagggcctttgcacttgctgttgctcagttcactcttcccctagatcgccaccttactcattggtcttgtctttaccgtattttaaatttcagcccctccttccaatttattctccttccctttgtaattgtttccatagggcttattaccttctaatatattatgtaatgtattgtgtgctttctttatttttttttattgttttttttttttttttttttttttttttttgagacggagtcccgctctgtcgcccaggctggagtgcagtggcgcgatctcggctcactgcaagctctgcctcccgggttcacgccactctcctgcctcagcctcccaattagctgggactacaggcgtccgccaccacccctggctgatttttttgtatttttagtagagatggggtttcaccgtgtgttagccaggacggtctcctgacctcgtgatctgcccgcctcggcctcccaaagtgctgggattacaggcgtgagccaccgcgcccgtccttttttttttttttttttttgagacagagtctcgctctgtttcccaggctggagtgcaatggcgtaatctcggctcactgcaacctctgcctcccgggttcaagcaattcttctgcctcggcttcccgagtagctggaattacaggcgcctgccaccatccccggctaatttttgtatttttagtaaagacggggtttcaccgcgctggccaggctggtctcgaactcccaacctcaggtgatccgcttgccttggcctcccaaagtgctgggattataggcgtgagccaccacgcctggccagaatacctttactttttagcagttagaatatgttggtgctacgtcagtcttaatgtttgcatgctactccagtttgtactgtgttgtgggagtttggagtttgaaactacgggaagagtgaactctttgt

SEQ ID NO: 96459 - DNA, 39474 bp, Homo sapiens
gtagtccctgctactcaggaggctgaggaaggagaatcatttgaacccggatgatagaggttgcagtgagccgagatcgtgccactgcactccagcctgggcaacagagtgaaactccgactcaattaaaaaaaaaaaatcaaaagagattcattcatcagttttccagtgacagttctgaaaaacttacacatacatctatcataagaaatctaaaattcttggccaggcgtggtggctcatgcctgtaatcccagcactttgggaggccgaggcgagcagatcacaaggtcaggagttcgaggccagcctggccaagatggtgaaacccgtctctactaaaaatacaaaaattagccaagcgtggtggcacgcgcctatagtctcagctactcaggaggctgaggcaggagaatcgcttgaacccaggaggcaaagttgcagtgcgccaagaccgcaccactgcactccagtctgggcaacagagcgagactccgtctcaaaaaaaaagaaagaattctgaaattcttattaaacacttattttgtcaactcagagaattttggaaaagaaacagaattatgtgtgtccacactgagtagctgcaaagaaaaccattaaacatgctgcctgtaataaggcaggaacctggagtctgtagaacacactgagctgttttctctgagtgctggaccatccacatccccgctaagatcagtggtatgcactttatgcccacaacagacacctgcccagcagcagggaccacacccaggactgggaaatggagccacttcatctacataacatcaaaggcccccatgagggcacattcacagcagaacccttggtggtgggcttaattttttcaggggatggggggtaggctaggatttgaagagagtaaactagatctaaggcctaactttgttacttttagctgtgggatactaaactccgcttttctgaattccgggatccttctgtctgtagtggggatattataatatctacctgccaagattttttgaaaggcttagattacagatcttgaatgtgagggtacctagcattgagcctggcatggggcagcgctcaaatcatgtctgttgactcattccttcccagaacaccctaatcttactggatcactagcacctggggcagagtacgcctgaagacacgcctaggtgacagtaggcactcaacttgtgttctccccttcgtggacaagaagcggcggagtgcctatcttcctccgtcttcgagctattttaaatttcttctattacagcactttgggaggccgaggagggtggatgacgaggtcaggagatcgagaccatcctggctaacacggtgaaaccccgcctctactaaaaatacaaaaaaattagccgggcgtggcgacgggcgcctgttgtcccagctactcgggaggctgaggcaggaaaatggcgtgaacccgggaggcggagcttgcaatacgccgagatcgcgccactgcactccagcctgggtgacggcgtgattctccttctcaaaaaaaaaaaaaaaaaaaaaaaaaaaattcttctattaaagaatttcaggccaggcgcagtggctcgcgcctgtaatcccagcactttgggaggccgaggcaggtagatcacctgaggtcaggagttcgagactagcctggccaacatggcgaaaacccctctctactaaaaatataaaaaattacctgggcgaaatggcacgcgcctgtaatcgcagctactcgggagggtgaggcaggagaatagcgtgaacccaggagatggaggttgcagtgagccgagatcgcgccactccactccgggctcggcgatacagcgagactccgtgtcgaaaaaacaaaacaaaacaaaacatttcaaactgaaatgggcggttaaaatgcaacttaaaatgagatggtgagtttaacgcaccacttttccactaggtggtgctgcatgttaaaactttccctccatttactctaaaatattaatttctacagcaggaaaactgacggccccttggaaaaggaaagaaaagtcaatatgtcaccaaaaaagacaatttattaataactcctccaaaacctctgtgggttccccttggagtgaagcgcgagcagggagccgccatagggagccaggcccgcagcgccgttcgtcctcagcacaacgagcggcagcgggcaccgaattgttctgcaactacttttcacatctgccttttgtagttgctgaacaaaattcgttcccatttgtttccggttggcaagttcgtaggcttcggcggaagtgtaaagtcaagggcaagtggcggaggctgcggccaccccggtctctgagcggcgcaccggacaggtggtcagtcccgggacgcggtgacccgacgcccgagctccaaggctcggcccacgccgggttcgccccagtcccgctggtccctcagccgacgccgccgggcctcgcaccgccccccgaccccggacccccacccacgcggccgctgtgcactcaccatggccgctagccctaggctctggcctcgcagcgccgccaacaagcgccgcgtcgccccgagcgccccgagcaccgccgccattggccgtctgccgagggctgccccgcgcgctgcctgccggccgcccacagccgcccccgacccgaccacgcccagctaccgccagccctggtagtctccctgcggggctggcccggagcggggtctgtgtgtgggaagcgcccagccttcccgcgggcacaggcgcagcccggaccccgaacacccccaggagcttcagcggtcgccagcgcccttggccgccaggtggactctgcgcgccccacagccgtaggcccagcaggcgcgcgcggtccccgccccgtgcgggcccgtcgcgtctgtgcccgggacgcaggtcgcccggcgcgcgctggccttgccctccggtcctcgctgcgctaggaggaacttcgcccagcctcgggcgccggcctcctccgcttcgcgggcgctagcaccgagctgggctccccgcttggcggcgctgcgcgcagtccatgcgggcaggaggatgtcgtaggccagggcggggcagttgagcggcggggctggggcagtgaaccacggcagttcccatcgggggctcctaagtcttgcagtagtgggttcgaacgcagcctctgttcagtcatcgcgcagctgccaagttcttgagccagctggctcgtctgggtttgcctggaccaaaaagtgtggaaacccggcctgtaatcccctcccaaacgtgtccgtgccctgtttacccccaggctcagcacacagtaggagctctgcagacagctgtgaacagatttaggtgaatcttttcttgtatcatttttggggaggtattctttcattcttttttttttttttttttgacttttttgagatgtaattgacatactattaagaatactcacttgtatcttttttttttttttttttttttgagacggagtctcgctctgtcgcccaggctggagtgcagtggcgcgatctcggctcactgcaagctccgcctcccgggttcacgccattctcctgccttagtctcccgagtagctgggactacagtcacccgccaccacgcccggctaattttgtttttgtatgtttagtagagacggggtttcacagtgttagccaggatggcctcaatctcctgacctcgtgatccgcccgcctcggcctcctaaagtgctgggattacaggcgtgagccaccgcgcccggcctcttttttgtttgtttttaactgaatagtttaagcaggccaggcatggtggcccgcacctgtaatcacagcactttgggaggacaaggcaggaggatcacttgaggccagatgttcgagatctgcctgggcaacatggcaaaaccccatctctattaaaaatacaaaaattagccacgcgtggtggcacgtgctggtagttccagctatccgtgaggctgagatgggaggatggcttgagcccgggaggctgcagtgagctgaaatcacgccactgcattccatcgacagcaaaataccctgtccctcacccccctcaaaaataaaaaaaaaagtttatgcaaattaataagcagttttgcagaggatatggcaaaatattttttttaagaacaagagtccatttaacttcaacttagcagttattagcagtccatccatatggacctagaaaaaataaagcattttgcctcaaagtagcccaaaattcacgggcttctgttcttcccatttgcccacttgacaaaatgtaaccatttcgccgggtgcagcggctcatacctgtagtcccagcactttgggagggtgaggcgggtggatcaattgaggccaggagttcgagaccagcctggccaaaatggtgaaaccccgtctctactaaaaatacaaaaatcagctgggcatggtggtgcgtgcctgtaatcccagctactgaggaaactgaggcaggagaatagcttgaacccgggaggcggagggtgcagtgagctgagattgcaccactgcactccagcctggcaacagagcaagactctgtcaaaaaaaaaaaagatgtaaccatttcaaaagcaaaactcgggaggaatcacactgggggcccttatcaaatgttgctggtcctaaagaattaaaagttatatttccaacatttacattgactgtttatgatcatgaaaactactactcagattcgctcattaaagtaagaactaaaaaatgaaccagtggatgtgagtaaacaagtgaaccttcattattttcagtaaatttaatcattttccttccttaataccactgtatgaaactggcatctgggatatagtcactggccaggcaaagtggctcacgcctgtgatcccagcactttgggaggctgaggcggatagatcacttgagcccagaagtttgaaactaggctgggcaacatggtgaaaccctgttgctacaaaaaagtacaaaaattagtcgcgcatggtggcgcatgcctgtagtcccagctactgaggaaactgaggcaggagaatctcttgaacctgggaggcagaggtcaagatcgggccactgcacttgcactccagcctgggtgacaagagtgaaactccacctcaaaaaaataaaataaatttgatcatgcagatctagtcaaaaaagcagcgaacggcagatgctagggcccagggaaatgatgacatcagtggatcacatcacaggggctgtgaattgtctgcccacacatgtagctccccaattaataggatttaagtcccttagcaaagatttactggccacatgctctgtagtggaaccatgcttagcttgggctgttcagctggtctttgatcacttccttccccttttcactttccctcaacactactggtgtttttgttttgtttttctgattttgggggtttgagacatgatctcgctctgtcaccccggctgcagtgcagtgacacaatcacgactcactgaagcagtcctcccactacagcctcccaaagtgctaggattccagccatgagcccccgcacctggcagcaccagtgttttgaggctgatcctctctatacttgaacctcctctccagggaatggctctgctccacatttccctccaggggaaccccatgtagctgggccatggtgcaaaggcagggcagggtgccatcccacataaaggttttggagtaaatttaaagcctggttccagccactggaagctgcatgaaggaaagcaagttattgagagcctcaggttttttcttttgctttgagacagggtctcactctgattgcctaagctggagcgcagtggcatgattacagagctcactgcagcctcgacctcctgggctcaggtgattctcccacctcagcaccccgagtagctgggactaccaggacgcaccaccacacccagctaattttttgtacttttagtaaagacagggtttcgccatgttaaccagcctggtctcgaactcctgagactcaagcaatccacctgcctcagcttcccaaagtcctgggattacaggcgtgagctactgcaccaacctagtttattctttaaaaaggatattaaacaaaatagtatatgtaaagcatctaaaacagtacttggcactcacacagtaataactcaatataagaggtggactcactagagttttccttacatttgtatttataagtacacacatgtgaagattcaaatcccagcttcatcaacttacaatctgtgtaacctgggcaagttatctaactctctatgcctcaatttgctcatgtgtaaaatagaaataatgtgccattctgagatacggtcccctcctgccagtgaccaccccaaacacagctgttggaaacatgacacataaaagttgtaaactcccattcattgtaacactctaagaaggagactcatctgaggttttatttctatagaatttagggtgccttgtgaaataaacattcaactactctaaaaccctggaaacaattagtataaaagtaatttatgatgaggtaattagctgtcatatctgaatttaaggaatcttttagaaacagcttttcaaaaagtttgtttaggccaggcgcagtggctcacacctgtaatcccaacactytgggaggctgaggcgggtggatcacctgaagtcagcagtttgagaccagcctggccaacatggcaaaaccccatctctactaaaaatagaaaaattagctgggtgtgatggcacaggcccatagtcccagctactcaggaggctgaggctggagaatcgcttgaacccgggaagcagaggttgcagtgagccaagattgcaccattgcactccagcctaggtgacagagtgagactttgtctaaaaaaaaaaaaaaagtttgtttaaattacatgttgtctctttactaaacatgtgtcttgaactagactagaatcaacttgtgggcaagaacagtgttttacacttcaatacttctttttgtttgtttttgagatggagtttcgctctggttgcacaggctggagtgcagtggcatgatctcagctcactgcaacctctgcctcccgggttcaagtgattctcatgcctcagctttcccaagtagctgggattacaggtgcccgccaccacgcccagctaattttttgtatttttagtagagagagggtttcaccaagttggccaggctggtctcaaaagtcctaacctcaagtgatcctcccgccttggcctcccaaagtgctgggattacaggcatgagccactgcgcccagcctgctgggaacattttaaggttcaattaatgcatgctgcttaggtaactatgattaaaatgtatacgttagcatagaactgataataattgagctttagttacagcatttcctttctcctaacatctcccttacccagaaacaacttaaaacacttcaaattttttgagttagagatcacaaacatcaaggtatttgactcttattttccatcacttgctacttgagggggtcacactaaccaattctggttacatactttcctgctatggactctagaagaaaaactgcaaagaaacagaaaactaaccttcttaaacatatataaggaatcaagggtttccttaaactattacctgagagtcctatttttgccttctgtatagtaagcatgtcattctactcactattctgccggaatacatcttcacatttcaaactggattactttccaaatactggattacgtkcatgcagtaaaaacaagaatagtgcatctattgaatatttttgcatttgcttattgcaatactagttaaaacaccagtttataatttttttatacattcagttgttcaacaaatgattcttttaatctgcctgaagtttcaagtcaacacgtcactggagaaaatgtatgaaactgtagcactaatttctgaaaygaaggattgaagttcctctttccaacttctttcagaccatcactactccacatgttcctgctcttgtcctggaattagccaccgaatactctcagttcgaatggtagcatacataataaaactaattaaaaagaataaggaaaatacaagcaaccagtccacactttttatcaaagtgctgggaagagggcctatttggtcggcttgagttaccaccacattcttcttggcttctatacctgaaagaaaaatcactggtttcaaatcaggcagaaaaagcacccaccacagatttttctcaagtattatgtatggtatgcaaaatgacatgcagtcctaaaataagcattgccactagtatatatataaatatatgggatggatttcacttgcctatcagtgtaatttgtaagttgcctttctccccactgcatcaaaggatcaggaacccattcagctgttcacaactaaaacactagaatttctgtgaactcatcagaagtttcttagtcaatgtgtttataagagttgtattttggtgtcttttgagaccaaagttcagtaagtaactagtaaaactcctctcaggtgtctacagaatgttttcacaggttaagtaatgctaaattcgaaatgcttttttttttttctgtgatgaagtcctgctctgtctcccaggctggagtgcagtggtgcgatctcagctcactgcaacctccgcctcctgggttcgagcgattctcttgcctcaccctcccaagtagctgggattacagacacacaccgccatgcctggctaatttttttgtatttttagtagagacgaggtttcaccatgttggccaggctggtctcgaactccagacctcagttgatctgcccacctcagcctcccaaagtgttgggatcacaggtgtgagccaccgcacccagccccaaaatgcttttaataatttactgaaagaactgttataacaacaagccaccaacggaaacagggattaccaaagatgctctgactcccagatttgtgttctaggttttcttagagcactgaataaaatggctccctctccacacatcaatcgaaatgacaatcagggatccatgacaagacttggactagctaaccaccttgtaatatcctacttttactcctatcagccaactcagctcttttttctttagtgttagctaaaatgattatatgcaatttaatatatatgcaatgtgtgttataatttttatttatttccagtgagcatactttgggaagagtgggatgctcacaattgagacagtgaggctttagaggaatgaacttttccaatggaggtaattttttcaatttacaatgctttacaatgttttacaaacaataaaaaataaggccatatgttttggcaaatattaaggaactaagatagcatctacaaatggattaataaatggaacagtagcagcaaagaaaaagaacaaaacataaccatacatgacaatgcaggtgcatctcacaagcatactgttggatgaaaaaaacagacacaaaataaaacatcctgcatgtctccattaatatgaagtccaaaacaagtaacacagtctatgatattaggagtcaagactgtggttatctttatctttggggaaggcaggagcagtggtgctgaagggaggctggtaatgttctgtttctctttttttttttcttttttttttgagacggagtctcactctgtcaaccaggctggaatgcagtactgtgatctcagctcactgcagcctctgcctcctgggctcaagcaattttcatgcctcagcctcccgagtagctgcgactacaagcacccaccaccatccccagctagtttttgtatttttagtagagacagggtttcgccatgttggccaggctggtctcgaactcctggcctcaagagatccacccgcacaggcttcccaaactcctgggtttacaggcataagccagtgctctgtttcttgatcagagtggttacccagggtgttcactttgtgaaaattcatcaccctgtacactcatgacttatgcatatctttgtgtaaatattaagtgaaaaatgtgcgttaaaagttataagtaaagtgtatggtatgtgaattatatttcagtaacacttgttttaaagtatctataataggccaggcacggtggctcacacctgtaatctgagcactctgggaggccaaggcaggcagatcacttgaggttaggagtgcaagaccagcctggccaacagggcgaaaccctgtctctactaaaaaatacaaaaattagccaggtgtggtggtgcgcacctataatcccagctactagaaaggctgaggcaggagaatcgttttaacccaggaggcagaggttgcagtgaactgagattatgccattgcactccagtctgggtgacagagcgagactccgtctcagtcaatcaaacaataaagtatctataatagaccgggcacagtggctcacacctgtaaaatcccagcactttgggaggccgaggcgggtggatcacttgaggccaggagatcgagaccagcctggccaataaggcgaaaccctgtctctactaaaaatacaaaaattagctgggcacacgcctgtaatcccaactactctggaggctgaggcacgcaaatcacttgaacctaggaggcggaggctgaagtgaactgagatcatgccactgcactccagcctgggcaacagagtgagactctgcctcaaaaaaaaggaaaaaaaggctgggtgcggtggctcacgcctgtaatcccagcactttgggaggccgaggtgggtggatcacgaggtcaggagatcgagaccatcctggctaacacggtgaaaccccgtctctattaaaaatacaaaaaattagccgggtatggtggcgggcgcctgtagtcccagctactcgggaggctgaggcaggagaatggcgtgaacccgggaggtggaggttgcagtgagccaagatcgcaccactgcaccccagcctgggcgacagagcaagactcaaaaaaaaaaaaaaaagggaaaaaaaaagtatctataataattaaaattacctattcatgttaaacttcatactgattgggaagtatttaacaggatcataacagttcattagaagagaagttttacaactcaaagtcagtcttgaatccttcacttaaggattatagcagatcagaacccacagaaggcacagacccccagcaayagaatatcttcttcctcagcacattacttccacatacctgtctgattaaaaatgaagattttcagtgtttccagtgttcgatctgtatgattaaatctggccattggtttagctccttgaaataataaaatattaggaacagctacggtgccaaacctggtagaaaggctacaagagaaagaagtcaaaaaacctgaatttattattaatagagggctttctcatacaattaccatctcagaatagacagaaataaatgaggaagttgcgtgtgacctacggagatttctgatacttgaaacttttggctttttcatttgtttctgacctctttgcttatgggtcatggctggggggcactccttttctgcaatctgagttgctttcaattataatatggatctaccaatggcacaattattccactagttaagttcctgtctaaacaaaccagaccagaaaactctaattcatggacaaagcacactgtgtcaacttatttgacagaaaaaatttccaactcttcagaatgcccatccctgtccctcaaaaaagatcaacttacagtaggcaattggtttggtaagctggcacaagggagtatatgatctaacaaacacaccaggatgttcacaattagggcaggatgacttgtttagaaggaatataactgtgcgggcttatttcacctttacataatacagactagtggtgataagctcccaagtcaaaacactctgggttgaagcctcagttctgccactgaaccaatgtgaactctgggcagattatttaaccttgctaagcctcaattttccgcattagtaaaatagtaatagtgtataaccaggatttttttcttttgtacacatgctgtaacttaaatattaacataagaagcaaacatgtcccagcccatataataacagcaagagccttagtctccataattaagatacaacatggagctgaaggaaggaaagaagaaagcaggttagggagggagttgcgggagaggcaggagggacagtgtgagacccagaaccaaagagcactgagtatgcctgggggcagtggaggccccaccaaagctggacactgacgtgatctgtccttccaatcagtctgctcccttgggcccagtcacttagatataacccagaagcctatatgaaaattactaatttgttgagccatttctttcttcataaaagtttcaggtaaacattggcagttatattcccacaatgaaaatcagtggaatacaatttttttttttttgagacagggtctcactctgtagcccaggctggagtgcagtgacaggatcacggctcactgtgaccttgacctcccctggttcaggcaatcttcccacctcagcctcccaagtagctggggtaccacaggtatgtgccaccatcctcagtcaattttttgtatttttttttatagagatggagttctgccatgttgtccaggctggtctcaaactcttgggctcaagcaatccttctaccttggcctctcaaagtgatgggattacaggtgtgagccactgcacctggcctcaagtacagagtaatggaagtttactcaacttcattttaccaccaattgaccatttttcagatgttctagatttatttacacacaacctccttgttgaggctgacctactaaggagcatctgatttggaagagaagaacagtttataactcaggcacaatcgcagcacttaggagaaacatataccatctcaacaaagttctctgtaacttactttactaaacatttaaaaaagacaaaaagtggctcacacctgtaatcccagcactttgggaggccgaggctggtagatcacaaggtcaggagttcgagaccagcctggccaacaaacggtgaaaccccgtttaaaaatacaaaattagccggcatggtggcaggtgcttgtaatcccagctactcaggaggctgaggcaggagaatcacttgaacctgggaggcagaggttgcagtgagcctagatcacaccattgcactccagcctgggtgacagagcaagattccacctcaaaaaaaaaaaaaaaagaaaaaaaaaatgaccagcctggcatggtggcgcatgcctgtagtcctgctactcaggaggttaagtcaggacgatcgcttgagcccaggagttcaaggccagcctggacaaaaacccagtgaatgatacacgagaaatataaaacaaagataaatgtcatgttaaagagctaaattaattcatgacttgatcgagtgcctactacagaacatgactgcaagaataagtacgcaggaaagaaagaaggaaagagggaaagggaaaagaaggaaagaaaaagaaaaggaagggaagaaatcctgagtagacacaaaacaggggtgctgggaattgggctgcctgggatggggatttaacctgcgccttaaagtcacaaaggaatatcctactgtgataccaattgtgctgattcagtctggctatggccctcaaaagtcttctggcccctcccctgccatcaggtgctaccacctgccacctttaaatccaccacacagagaacagcccactttctttaaggggcctccataaagtgacaccaccagctccctcaggagtatgataatcctcactattcactcttgccttgccttccatcccaggacacagttcatgccccccctcttctgcttctaacttaactaattaggacctccaaataactgcaaccatcagccaggaggatggacgtaaaccccaccaatggaagatacctgctgtgctgagatgcatccagtgccaaaaagtgaagagctggaaatgcccggggcagagagttaaagtgaggggccaaactggcagaaaagcggcaccacggggtgtaaaacaggactagagtacagtcactaccgtttgggttcagaaaatccataaggtcctgtggtaaaagaaacaagcattaaagttagcagtaaaagtacatttttctgaaaggatacccaagaaacaggacacactgctgctccagggagaggaacgggtgggtaggagcagcgagagaaggaaccctcggaaccttttggattttgaaccatatgaatccaggaaccagcaaaaaagtatgatcaaatgacaagttataaactttcactttttttaagtcttgctgaattaagcagaaagttttaaactttcctctgcgctttcctaatattacaagttattttaatatttttcataattcatcatttcaaatacaggcatacctcattttactgcatttcactccattgcactttgctgacattgcattttttgcagattgaaagtttgtggcaactcggcatccagcaagtttttcagcaccatttttccaacagcatgtgctcaatttgtgtctgtgtcacattttggtaattcttgcaatatttcaaactcttccattattattatatctgttatggtgatctatgataagtatctttgatgttactattgtaattgttttggggcgccaccaactgtacccatagaagacagtgaactttatcagtaaatgtctatgttctgactgttccaccgaccagctattccccatctctctccctctcctcaggcctctccctgagacacaacaatattgaaattaggtgaattaataaccctacagtggcctctgtttaagtgaaaggaagagttgtacatctctcgtgaaaggaagagttgtacatctctcattttaaatcaaagccaaaaatgattgattaaacttagtgaggaagccatgccgaatgccaacataggagacaggctgaaagctaggcctcttacaccaaacagccacattataaatgcaaaggaaaagtttttaaaggaagttaatgtgctactccatccagtgtggtgacctctgatgcttaaaaataaaaataagtgctactcaatgaatatgcaaatgataagaaagcaaaacagcattattgctcatatggagaaaatcttaatgctatagatagacgatcaaaccagtcacaacatttaagccaaagcctaaatccagagcaaggccctaactctcttcaattctacgaaggctgagagaggtgaggaaactgcagaggaaaagtctgaaattagctggggttggctcatgaggtttaagaaagaagctgtctccagaacataaaagtgcaaggtgaggcagcaagtgctgatagagaagctacaacatagtaacatcaaagatcaatggggaaaaaaaaaaagaagctgcaacaacttacccagaacatctagctaagagaattgatgaaggtggctatactcaaaaatcaattttcatgtagataagacagccttctattggaataaggtggcttctaggactttcatagctagacaagagatgtcaatgcctggcttcaaaggacaggcggactctttttagaggccagtgtagctgcggtcttatttatttatttaacaataaatcttattatttatttatttatttatttgacaaggtcttgctctgtcacccaggctggagtacagtggcgcaatcatggctcatggcagcctcagcctctgggctcaagcaatcctcctgcctcagcctcccaagtagctggtgcccaccaccatgcctggcaagtttttgtattttttgtagagataaggtttcaccatgttccccaggctggtctggaactcctaggtttaagcaatccacccaccttggcctctgaaagtactgggattacaggtatgagcaaccacagggccaatgctcattgctcattgcccattctgaagatcctggggcctttaaaaattatgctaaatttattttgcctgtgctctagaaaaggaacaacaaagcctggatgacagtacatctgtttacagcatggtttcctgagtattttaggcccactgttgagacctactgctcagaaaaaaagattcctttcaaaatattatactcgttgacaatgcacctggtcaaccaagagttctggtggagatgcacaaggagatgaatgttgttttcaggcctgctaacacagcatccattctgcagcccatgaatcaaggagggatttcaacttttaactcttattatttaagaaatacatttcataaggctatagttgccatagatagcaattcctctgatggatttgggcaaaataaatttaaaaccttctggaaaggatttaccattctagatgactttaaaaatatctgtgattcatggcaggtggtcaaaatatcaacattaataggcgtttagaataagctgactccaaccctcgtggatgactttgaggaattcaagacctcaatggagaatggaactgcggatgtggtagaaatagcaagaaaactaggattagaagtggagtctgaagataggactgaattgctacaatctcatgataaaacttgaagagatgaggagttgatttttatggataagcaaagaaagtaggtttttgagatggcatctacgcctggtgaagatgctgtgaacactgttgaaatgacgacaaaggatttagaatattccataaacttagttgataatgcagcagcagggtttgagaggattgactccaactttgaaagaagttctactgtgggtaaaatgctatcaaacagcattgcatgctacagagaattctttcgtgaaaggaattaagaaactgtgggccacaggccaggtgtggtggctcatgcctgtaatcccagcactttggaaggccaaggtgggcagatcacttgaggtcaggagttcaagaccagcctgaccaacatggtgaaaccctgtctctactaaaaatacaaaaattagctgggcatgtgaagcacgcctgtaatcccagttattcggcgagaggctgcagtgggagaatagcttgaacctggtagatggaggttgcagtgagctgagatcacgccactgcactcccgcctgggtgacagagtgagactccatctcaaaaaaaaaagaaagaaaagaaaagagaagagaaaagaagagaagagaaaagagaaaagaaaagaaaagaaaagaaaaaaacgaaacgaaactgtgggccaggcatggtggttcacgactcacaacactttgaggggccaagacaggaggatcacttgagcccaggagtttgagaccagcctatgcaacatagtgagacctcatctctacaaaaaaaaaagaaaaaaattagccaggtatggtggcacatgcctgtattcccagctacttgggaggctgagctgggaggatcacttgagcctgggaggtcaaggctgcagtgagccatggtctcaccaccacactccagcctgggtgacagagcaatactctgtctcaaagaaattgccagagccaccccaaccctcagtaactaccatcctgatcagtcagcagccatcaacatcaaggcaagaccctctaccagcaaaaagattacaactcactgaaggctcagatgatcgttagcattttttagcaataaagtatttttaaattaaggtatatacattttttaaacataatgctactgcatacttaataaactacaatatagtataacttctgtatgcactgggaaaccaaaatattcacgtgatttgctacactgcgatatttgctttatcacagtggtctggaaccaaacctgtagtatctttgaggtatgcctgtactaagtactcacagggtccaggcaattgcccccacctttgaattgtgcatctcaaaccatctaaaatggaattattagaggactacgatctcaaatccaaactatcatctcagcagagctaagtctgaactaagcagtcatatcgatatgtttggccaaaggttagatcaattcaagagtacactgtcctagccagccacagtatcttacatctgtaatcccaacactctgggaggccaaagagggcaaatcagttgaggtcgggaatttgagaccagcctggccaacgtggtaaaacctcgtttccactaaaaatacaaaaattagccaggcgtggtggcatgtgccgtaatcccagctactcgggaggctgaggcaggagaaccacttgaacccgggaggcagaggttgcagtgaacccagatcatcccattgcactccagcctgggtgacagagtgagactctgtgtcaaaaaaagaaaaagggtacaccgtccctgccaccacctgtttaatccataactcagactgtttaaactgctctctcccagtcatgtgagtgacacctgtgggagtcccacagaccacagcatctacaggcactcaggagtggatgcaaagccagcgccgagcactgcccttggaggagctatgtgcactacaggtgctgtgccctcactgacaacagtcacagctcttagagtcaggatttacctctcttacataagcagtgtgaatgcatcctacccttctgttttctgaaccaccccacagaaattgtcagtcattgatgaaagagaaacttttcatcaatataacatattttccaggggcattactagtctaaataatggtaaattataattttagtaatccagatatgtttaaattgcctctgtaataaataaatacttcatttggaagaagaaaaatggccgggcacggtggctcacacctgtaatcccagcactttgggaggccgagacgggtggattacctgaagtcaggagtttgagaccagcctggccaacatggtgaaacccatttctactaaaaatacaaaattagccaggcatggtagtgcatgcctgtaatcccagctacatgggagactgaggcaggaaaatcatttgaactcaggaggcggaggttgcagtgagccgatatcatgccattgcactccagcctaggtgacaagagcaaaactctgtctcaaaaggaaaaatgctatgattttggtgccaagcaactatctgtccactgggatttctatcgtgaggtttggtggtgagactggcccaaggataactaggtttaggccatctgaaaagcataatcaacactagttatatttcctcgtctccctataaacatcacagagggcaaagttgattttcactgaagcagccattaaatgctatctcgcttacaatatgatcaagatcatgattttccatttcaaagttgatagggtattaatcataaaataaatgtactgaaaaggagaaaagcactaaataatttttccttacctgtgacatatttaaaattttcagagtgaaattttctaatcctgtaatgtttctctcctcacagttcacctttggggatttcagactttcagtgttattggagtcctctgtcggggctgcgtcagattccgccacttctggctctgtgtaatactcctcttctctgtcagggaagtgtgctccagcgccatccagagagaaaaggctctctcggacgttgcaccttgagtcctccgctcctccagcaccacaggtgacgccgctaggctctgaactcacyttgtcctcagcttccccaggaatcacagacagcatcaccatgtgatcgccttgggtgtccagccccagcaccgcattggcctcttctgctgccctgtcctggcccatcgggtcatgcaggagctcctcctcacccaggtacacagcccccacctggagagggtgagcaggctgctcctctgaccataagcgaccactttcctctgcaactaaaacatgccagcacattcagagtcatatttgacttcaaaacaaatgaaccccaaagaattacagttcccctctaacacgaaattttcccctctggagacaaaaaggtctcctttcattaaactatcagagagctactcaccatttcccaggttaggaagaaggtcacaagcaggtactattaataaattaatgaatgtcaaagaaggccgggcacggtggttcacacctgtaattctagcaccttgggaggccccaagtcaggtggatcacttgaggtcaggagttcaagactagcctggccaacatggtgaaaccctgtctctattaaaaatataaaaattagccgggcatggtggcaggcacctgtaatcccagctactagggaggctgaggcaagaggattgctggaacctaggaggcggaggttgcagtgagccaagactgcgccactgcactccagtctgggcgacagagcaagactccgtctcaaaaaacaaacaaacaaacaagcaaacaaaataatgaatgtcaaataatagacaaacacacagctctgccctaaacttgctgcttgccatgtggattataaccaaaaacattccagttcagatatctcattaggaaaatagaatataaacactttcattttttgataagagtttcatttgtttgataatatccaagaaaaggatcatggttttatgcaagattctactagaacaaagcatctttgcacacattataacagtcctgtgagatgggcaagacaagggttaccaagaccactgaacaggtaacgaggcaaggcacagagaggctcagcacagtgtccgatggtacacagatagtaagcagcaaagccaagtctgcgagcaaagttttctggctgctactccagaacgagccgtaggctccctgccatgatacctcggggatgctgagccacactgcctgaagaacactgttcaagccacacagcagctccttcctgaggtggcctctgacagctggactctgctctcctgcctgccacccttgggctgctgcccttgggagtgctgggagatgggctcggcagtgcagaggcagcagcaggaggaagaagagaactttcccccactttggagctagaaggtgggtcttgagcataatgctcagataagggaagagtcccaggtagtctcgtacatctatttacccaactccactcacctccrtagcaatgcctcctgccctccaactcatcaactcaacaccagctgccagactttgtgccaggcaccaaccagcagaaaccagtgaggccagcagccctcacgaaagctcaccatgtggttaagaaaccacccgctgggtgatgagttctgcgtgccaacagcatgtcactggagtgtcagtgaccaactgacttcaaagttgggaaggtctgggggcttcctcaggtatgcacatttgtataagatttcaaagaatatccctgtagagctttttgttgttgctgatgcataacagatgtacatgtgataatcacaaagcacatgtgataatcaatatattcatgcaatttgtaaagatcagatcaatgtatttgggatatccatcaccttaaatatttgtcttttcttcatgctagaatcattcaaattcttctcttctagctattttaaaatatacaataggctattatgaactacagttaccctactgatctacctcacactagggcatagagctctgtggattcattcagagattcaaaaacattatctgggaattctgcttctggccaagatggagtaacaagaaccagatttaccttacctactgaaacaaccaaatagataatatatataaaacaacagtttcaggaaatcagttatgaggcaacagaggatagtgacatccgagaaacaggcgacaaatgaagagaaccctacaactgctccaacttactgccttgatggcgttcccactgtggctcagggaggggaaatccaggcagagcccagcagactctcccagttgaggagatggagctaagagtccaaggagaccaagaagccatagtttgcaagacagaatactgcagatgagaggagctatctagagaggggactccagagatctgcagaggcccccccaagtatacagcagggtacgggtcatcacatgcatgtgagtaaactacccagtgccagagaaagaactaccagaaaggatgggaaggaacagtacccaacattcacacagagcagggaatggtacctcttcttaccagctagactgaaaaacttcataattcacagggtattgagtagagtatacaaaaggacctgcgtcagtagtgggacactattaaccctaaagaaaataacagcttgcttgcttaaaagcaaaacctgaaagaatcaagctgttctcaagtaacttcactgtaccccagaacaaagctcaagaatatatatacggggccaggtgcagtggctcacgcctgtaatcccagcaatttggaaggccgaggtgggtggatcacctgaggtcagaagtttgagaccagcctgaccaacatggtgaaaccctgtctctattaaaatataaaaattagccatgcatggtggcgggcacctgtaattttagctactcggtaggctgaggcaggagaatcacttgaacccaggaggtggaggttgcaatgagccgagatcatgccactgcactccagcctgggcaacaagagagaaatccgtctcagaaaaaaaaaaaaaaagaatatgtatagggaatctaaaatatccagcattcaacaaagtaaaattcatgtctggcatccagtaaaaaattatcagacatataaggaagcaggaaaataggacacataatgagaataatcaatcaagccacactgacccagaacttgcacccatgtcacaattagcagacaaggatattaaaacaataattgtaactgtattgcattcaaaaagtaaagtagatatcaagatataagatattaaaaatatcaaatcgacctgggaggcagaggttgcagtgagccaagatcaagccattgcactccagcctgggcgaaagagtgagaccctgtctcaaaaaaataactaaataaaaataaaaacaatcaaattggccgggctcggtggctcacacctgtaatctcagcactttgggaggctgaggcgggtagatcacctgaggtcgggagttcgagaccagcctgaccaacatggagaaaccccatctctactaaaaatacaaaattagcctggcgtggtggcgcatgcttgtaatcccagctttttgggaggctgaggcaggagaatcgcttgaacttaggaggcagaggttgtggtgagccgagatagtgccattgcactccagcctgggcaacaagagcaaaactctgtctcgggaaaaaaaaaaagatcaaattgtaccctttttttttttttttttgaaactgagtcttgctctatcgtccaggttggagtgcagtggcacaatctcagctcactgcagcctccacctcccgggttcaagcaattctcctgcctcagcctcccaagtagctgggattataggtgcctgccaccacacctgactaatttttgtattttttagtagagatgaggtttcgccatgttggccaggctggtctcgaactcctgacctcgggtgatcctcccgcctcggcatcccaaaatgctgggattgcaggcatgagccaccgcgcctggctttctttcctttttttttttttttgagatggagtctccctttattgcccaggctgagtgcagtggcaccatctcggctcactgcaacctccacctcccaggttcaagcaattctcctgcctcagcttcctgagtagctgggattacaggcacccaccaccacacccagctaatttttgtatttttttagtagagatggggtttcgccatattggtcaggctggtctcaaactcctggccccaagtgatctgcctgcctcagcctcccaaagtgctgggattacaggtgtgagccagcgagccaccaggcctagcctttttcttttcttttttttttttttttttttttttgagacagggtctcgctctgtcacccaggctggagtacagtggcacaaccacctcccgggttcaagcgattctaccacctcagcctcccaagcagctaggattacaggcatgagccactgcacccagctaattattttgtctttgtttttttggttttttttgagacagagtcttgctctgtagcacaggctggagtgcagtggcacgatctcactcactgctacctcctcctgggttccggttcaaggaattctcctgcctcagcctcctgaatagctgggattacaggcatgtgccaccatgcccagctaatttttgtatttttagtagagacggggtttcatcatgttggccaggctggtctggaactcctgacctcgtgatccacccaccttggcctcccaaagtgctgggattacaggcgtgagccaccatgcccagcctaattattttgtatttttgctagagatggggttttgccatgttggccaggctggtctcaaactcctggcctcaagtaatctgcccgcctcagcctcccaaattctgggattacaggcatgagccaccgtgcccagcccaaatcgtacttttaaagacgtaaattataataactacaatgtctgagatgaaaattgcactctataagaataatggtaaagtagacaatacggaagaaaatagtcaacttgaagatagcaatagaacctgtccagctctccctctccctctccccctccccctctccctcctctttccacggtctccctctgatgccgagccgaagctggactgtactgctgccatctcggctcactgcaacctccctgcctgattctcctgcctcagcctgccgagtgcctgcgattgcaggcgcgcgccgccacgcctgactggttttcgtattttttgggtggagacggggtttcgctgtgttggccgggctggtctccagctcctaaccgcgagtgatccgccagcctcggcctcccgaggtgccgggattgcaggagtctccttcactcagtgctcaatggtgcccaggctggagtgcagtggcgtgatctcggctcgctacaacatccacctcccagcagcctgccttggcctcccaaagtgccgagattgcagcctctgcccggccgccaccctgtctgggaagtgaggagcgtctctgcctggccgcccattgtctgggatgtgaggagcccctctgcctggctgcccagtctggaaagtgaggagcatctctgcccggccgccatcccatctaggaaatgaggagcgcctcttcccggccgccatcccatctaggaagtgaggagcgtctctgcccggccacccatcgtctgagatgtggggagcgcctctgccctgtcgccccgtccgggatgtgaggagcgtctctgcccggccaccccgtctgagaagtgaggagcgtctctgcccggccaccccgtctgagaagtgaggagaccctctgcctggcaaccgccctgtctgagaagtgaggagcccctccgcccagcagccaccccgtctgagaagtgaggagcccctccgcccggcagccaccccgtctgggaagtgaggagcgtctccacccggcagccaccccgtccgggagggaggtgggggggtcagccccccacctggccagccgccccgtccgggaggtcaggggcgcctctgcccggccgcccctactgggaagtgaggagcccctctgcctggccagccaccccgtccgggagggagatgggagcgtcagccccccgcccggccagccgccccgtccgggaggtgaggggcgcctctgcccggccgcccctactgggaagtgaggagcccctctgcccggccaccaccccgtctgggaggtgtacccaacagctcattgagaacgggccatgatgacaatggcagttttgtggaatagaaaggggggaaaggtggggaaaagattgagaaatcggatggttgccgtgtctgtgtagaaagaggtagacatgggagacttttcattttgttctgtactaagaaaaattcttctgccttgggatcctgttgatctgtgaccttacccccaaccctgtgctctctgaaacatgtgctgtgtccactcagggttaaatggattaagggcggtgcaagatgtgctttgttaaacagacgcttgaaggcagcatgctcgttaagagtcatcaccactccctaatctcaagtacccagggacacaaacactgcggaaggccgcagggtcctctgcctaggaaaaccagagacctttgttcacttgtttatctgctgaccttccctccactattgtcctgtgaccctgccaaatccccctctgcgagaaacacccaagaatgatcaataaaaaaataaataaataaataaataaataaataaataaataaataaaaagaacctatccaaaatgaaacacacaggaaaaaaaaaaagaatggaaagaaattaagagcatcagtgggccgtaggacaatttcaagtggtctaatgtacagtaactggagtactggcaagagaagagagtggaggaacagaaaaatatttgaagaaattatagccaaaaactttccaaacttggtgaaaactataaatccatagatctaagaagctcaacaaaacccaaactcaatgaactacaacaaagcacatcacaatcaaattgctcaaaaccagtgacaaagaaaaaaatctttaaagcagccagaggaaaaaaaacaaaacatcatgtagagaggaacaaaggataacaacaggtttctcactggaaacaaagcaagcaagagtgcgactccatctcaaaaaaaaagaaaaaaatgattttggctgggcatggtggctcacgcctgtactcccagcacttagggagaccgaggcaggtggatsacttgaggtcaggagttcswgaacagcctagccaamatggtgaaaccctgtatctactaaaaatacaaaaaaaaaaattagcctggcatggtagcgggcgccygtaatcccagctgctcgggaggccgaggcaagagaatcgcttgaacccaggaggtggaggttgcagtgacctgagatagtgccactgcactccagcctgggctacagagcgagactccatctcaaaaaaaaaaaaaataataagtgaaataaatacttcttcacttcttcagacatacaaaagataaaagaattcattaccagcgaacccacatgacaaaaatcttcaaggaactccttcaggcagaagaaaaatgttaacagatggaaatatggatccacataaagaaatagagaaaccaaaatggtaactacatggataaatatacacaattctttccaaaaatctagctataaagggggcgaggaaggtagggtagattcgctacaggcaaggaagactaagggaggtttctattttgctatttggaacataggagcaatctgaggatacacaaagctgatgagaaagcaggtaagaaggggctgggcgcgtggctcacacctgtaatcccagtactttgggaggccaaggagggcggatcccttgaggtcaggagttcgagaccagcttggccaacatgttgaaatcccgtctgtactaaaaatacaaaaattagccagatgtggcggcatgcaccggtaatcccagctacttgggaggctgaggcaggagaatcacttgaacctgggaggcagaggctgcagtgagccgagaatcacgccactgcactccagcctgggtgacagagcaaggctctgtatccaaaaaaaaaaaaaaaaaggcaggtaagaagggagaggtggcaatggaggttacataggacagagtttaaggcttgggcagcaaagtgagtctttagcagaaggtcaagcacttctgtgactacaatccagagaagcggctgggtgcctgggaagggagctttgccaaattggtggaggggcgggatcacattggcggtatttctatagccttttatttctatagcctttggttaatgagtgtgtattgcctgtatgatcagaagaaaaaacaaacacacatgttttctgtgtcagccacaagacaaagcaggaaatgaagccagagaggctaagagtctggaaaagaaaggatgccaggtttggggtccaacccwactcccaaacaccacagttcttcagagatttgctcttgctacctaatcaacattctagattccacaagtaaatgaagaatgccaaaacgaagaacctcaggataaaaaaatcagggcacaaattttaatctggttctctctgatgaccctcagatagcccctgcacaaaatcaaaagggaatgtaagtggtgcatggagctggtattttaagttcaagagtgttgtcccctccatccccctgcacattgtaaaaatatttaagtacacagtacagattaggaacaaaaaaatcttatgccttcaggtaccaacgttttcatttaggaattaggaagaaaagaaacactgaattattccacacgaaaataaaaatgtcatactatgtgacagtcattgaaccctcccttggtaatgtgcttttattttttattttctttgagacagagtcttgctctgttgtccgggctggagtgcagtggcacgatctcagctcactgcagcctccatctcctgggttcaagcaattctcctgccttagcctcccaaatagctgggattacagatgcgcaccaccacacctggctactttttttatttttagtagagatggggtttcaccatgttggccaggctggtctcaaacttctggcctcaaatgatccagccacctcggcctcccagtgtgctgggattacaggcgtgagccactgcacccgactggtaatgtgccttttaagagactgcagtttgagctatacataaagtgataattattgcatcactggcagcaaagaagttgtctgaaggacaagtgtgagggcaccatgccaattctgccagggagccctagcctaggtcagcaccttcacacccttccagcttttctcagaaggctctttaccagctgcaggtgttttcacaatggcttctggcaggaaaggcaaatgaggagggaccaaaaacagtcaagggttggagggacagcaatccatactttccataggcaatactgtgtgctcatttagcaaatggagacaataccaccaaaatgtagaaaattatgaggctactgtgaagattaaatgagaaaagatgtgtatggtccctgccacaggttaaacactccataaatggctgtggtgatgatgatgattatgatgagtggtgtttacaattcaaagagatggaaaggcacaataactaagttctattaattaacctgcacactgggcttgctggttcatacctgtaatcctaacactttgggaggccaaggcaggcagattacttgaggtcaggaattcaagaccagcctggccaacatggtgaaaccccatctctactaaaaaatacaaaaattaggccaggcgcagtggctcacgcctgtaatcccagcactttgggaggtcaaggcgggcagatcacctgaggtcaggagttcgagaccagcctggccaacatggcgaaaccccatctctactaaaaataccaaaaattagccggggtgtagtgacgggtgcctgtaatcccagctactcaggaagctgagacaagagaatcgcttgaacccgggaggcagaggttgcaatgagccaagatcgcaccattgctccagcctgagcaacaagagcaaaactccatctcaaaaaaaaaaaaaaaaattagccaggcatggtggcgcatgcctgtaatcccagctactcgggaggctgaggcaggagaatcatttgaacccaggaggtggaggttgcagtgagccaagatggtgccactgcactccagcctgggtgacaagagcaagactccttctcaaaaagaaaaaaaaaaatttcacctgctaaacacattcacaatccatctactttccccatcccaactaacacttctcagcaaaggccacagccaattcttgtctgggcaactactgtagccacctaaactggtctccctggtcagcctgctatcccccctccagaccctgaccttcacagcaatacaagtgaaactgaaagataaaaggcatatctgatcatgtcactcccctgctaaaactctttcagtggcttcccctaccctgtgaatgcatctgcattctgtagcagagctaccaggccccaatgtggcctctgtctgcactctcacctgtggccatcagatccctctagtccctgatcatttacactcctcctatccccacctgccttagagccttcctgagggctgtttctctgctgggaagcttcctcctgccaaatccttcatcctcctcattcagatctcaccctaaatgtcacctctgtaaggacacattccctgaccctcagaccagggtgggaggtctcccattacagttcccaaaaacgccctgggactctccttgatgcatttctcagtcttgcaattttcttagtaatttgtagttatttagtggctgccttccccaaaggcctgctgctctaactcaccactggatccccagtgctcagcacagtgtttagcatatgatgagtgctcagtaagaatttgctagctgactgcctagggaagagtggcataggggtattgaagccaggagtttgcttccattcctagacacctggatagcattgctacctccaggttgcttagtctctcagggcctcagcacctgaggccagcataatctgccagtggcatcctctgcagaaaaaaaaaaaaaaaaaacacctcagattttcagctactctgagaagaaatcagctggtgaagtttcttctgtcttcaccccattcatggcctggccatgatgaccaaagacccaagctgaaccctgaatcagccagggttctgccaggaaacagcacatttaacttgggcaagttgaggagagtttaatgaagggaccactaatgtgtaggctgggtgcagagaaatgaaaagcaatggtaaggaattccaaggccagtaacagtagaggaggagccagttaccactcatagaccttaagagtctggagagagaagtagtcacagaaccttgaaacatcaagggtaacacagagggcagctttctagaattcaatgctttccaccgggggcaaagccagccttcaataacttctcagggagggagcggagagaatcaataccctgacctcactctcccctcattccaacacaatggaagcaagacggtaggacagctggtatttattccacacaggacagccacacagggcacagagcacggtggaggggctgaaacagaagatatccaacccatgccatcccctctgtgaggctagcagttaagtatagtgaaaatgcagaggttgggctctgaagtcaggcagacatgggcttgaatcaaggctcctcaacttctggctgtatgaccttgtcaaaggacttattggctctgagtcttaagttacttctataaaatgagcatgataacatctactgcatatgcatttaaaaattactaaggccaggcacggtggctcaagcctgtaatcccagcactctgggaggccgaggtgggtggatcacctgaggtcaggagttccagaccagcgtggccaacatggtggaccatcatctctactaaaaatacaaaaattagcccagtgtggtggcaggcacctgtaatcccagctactcaggaggctgaggcacgagaatcgcttgaacccgggagtcagaggttgcagtgagccaagatcgcgccactgcactccagcctgggcaacagagcgagactccatctcaaaaaaaaataaaaataaaaattacataaaccgggagcagtggctcacatctgtaatcccagcactttgggaaacaggtgggaggatcacttaagcccaggagttcaaggctgcagggagccatgatgggccactgcactcccgcctgggcaacagagcaagccctcatcccttaaaaaaacaaaaacaaaacagtaaagattccaaaagatgatgctcgtaaagcactgagcacagcatctggtacacagtgagcgctttcattcatggtaattgtgttactatgactcacccttctccacaactctctgctgtcctgcctccatccaggacaccccagggaaaagaaagacctgcctattcctgttaaggtctaaatgacaagcgagaccgagggtctggactttaacaggactatgaggagtggggtgaaggagcatgaaagtaaggcctccactctccaccctcgccatgcctctagagtggctgccttccctaccggcaagttgggggttaccgggagtctcccgtgtttctcgtctgtttttcatgcagggagctgagcaagactggcctccttaagacagtggtccagcagcgtggactccagactgggctttggcgtcagagagacaggcttctgccacgtatcagaagcgcaaacttaggcggggcctgagcatcttcatctgtgaaatggagacactaaacggaaccgatctgacagggtttgtgggagcattaaatgggataatgatgtaaataaagcacgatgcacagttcctggctcctaatacggccacaacaatgtcggtatttgatataatgttattaataataaattgcttatcaccagagggtatgcctcagcagcgcttaccgcactgtccctcctggctaccagccacgggctgagggcggcctgaacgcggcccaaccacccccgggctcccgtccaccggccctcagcccaccggccccctttcgcgggccaccagcgggcggtgcgcggggagagaagtcggggagacgcgcccggggagacgccaagaaggggcgagtcgcgcaccgccggccttcgcgcaggtccagagcgtcgcccgggtggacctcagctcgccccatcatctcatgcaccgcccccggcccacactcaccctccacgccgcggacgggaagtcccagcacccacagcaatacttgccaccagccgaggagccgcatgacgcggggcggtcgtcgaccggcagccgggaccattgcccaggccgagaggcaatcggcgcacggctacgcgagtcgtgctgccagccggargaaggctgggggaggagagcctgggagcgcgggcgcggccccgcgccgccatcttaacacctggcagctgtggcgggcgccatcttggagtcgggcggacggcctctagccgctggccgtcggcgctggactggagacctctttaggagctaagcgccagacgttgcaggtcgttttgaactctgctgaccccagagtgcagagcatggctctggcagaggcccatggcctcctttcttccctcggaagtcagagcttggctacttgaagcactgcgcccgcctaaggagggttttccacgcttcattcccagagccagaaaggcccaggagccttcctgttctagtgtcccatcgaggtgcagaaactttggaggctgcaaatcttctaatcgcttgcctaacctgtgctcccctacctagggttgccacatagaatacctgatacccagttatatttgaatttcacataatgaatattttttactataacccttatagtataagggatataccttaaaactgagcatcctgtaacttcgtgacatctggcaaccctaaccctacctatccactcagggcaggagaggttggttttaactgatttaccttgcagggcaatctctttttaatcatggttggggccgtgagcatcattggctctggctcatggtggaggtggagccacctcgagcataaagtagataggaaagggcttagaatgaagaaagcatagatggggagatgaggaacagggctctgcattcccaagcaaacgcacagagcgggagtcttaagagaaaattcttggaatagagaggatgacaccactaattggggtattttgccggggggcctgctaaaatggaataaggcaagctttaagcagccaccagtgctaaatcagtgcagagtgcagcttttcaaacttatgaggttgaaaaaatagaaactgatttaaaatacatcagtctattggttaacatagcaatggtaaggggaacctgtgctttttggccgcttggtgaatcccaacttcagcacatgtgatagttcacagtcagcaggttatgtaacttaaagttaagtttcttcagctgtaaagtggaaatgacgttatatagagtcttatagatgaaatgagatgtaaagtgatgagcacagtgtcctggggcacaggaagcatttcaaagtggtaggcattattaattgaataatacaattctgatggtgtggccatagtccccttatctctatgcccatcaaaaagacactgttaggccagaaagatgcatcattaatctgtccctgtggatgattcttttattctaaatacgttggtatggttttgctgttgtagatcctcaagtgccatcttgtgggtccagaagaatatgaaacaatggacatggataaaagagcccacagttctagagcttattactagtcatcatttcgctaagtacctccctcacccctaacagtggaacaacaaacctttcctttttaaactatctttctcatacccccatacatgatttgaaggtgcatgaaaagccaacaggacagagcaccaaaaggatttatgactaatgaaaaggaagctgatctggatactccaacatggatgccctgtggttactactccttcctttttattatctcctttcctttcctgtatgtgtgtttgtttgatttttttattttttgagacaagagtttcgctcttgttgcccaggctggagtgcaatggcgcgatcttggctcactgcaatctccacctccccgggttcaagcaattctcctatctcagcctcccaagtagctgggattacaggcatgcgccaccacgcccgactaattttatatttttagtagagatggggtttcaccatgttggtcagactggtctcaaactcctgacctcaggtgatccacccgccttggcctcccaaagtgttgggattacaggcatgagccactgcgcccggccccttcctgtgtttttactttagctctgtgtttgggacagatacgcttacagatgttagaattagatgttagaattggatgttagaattgtctttcaatttttttttttttttaggcacagtctcgctgtcacccaggtgcaattgctcagttatggctcattgcagccacaaccccttgggctcaagcgatcttcccaccccgtttttaaatttttttctagagatgaggtctcactgtttgacccagtttgatttcaaactcctgggctcaagcagtcctcccgcctcggcctcccaaagggctgggattacaggcttgagcgtctttgaataaatactgtatataccccctctaatgacaacaaatgtagtccacaggttagaatccttatttaactgtctcaccaccaacgtgcacttcttttcagtgagaaaactgccttcacaattgtcctggtttctatcaaatttctgggggtgaggaaagaaaagctgacattattctcttcctttggctgaaattaaatccgccaaatttgtcttgctatctcaaaaggcctttctgtgagtctgggacatcttatatcaaaatgcaaaacttaaatatataagtaaataaataaataaaagaataccagggtactacggtcatttagaatgactgaggaaccaaactggctcctacttgccaaagatgggatgatttgagcataaaaatgaaaaatttcaatagactgaaatacactgcatatgttaacatctatgagttcacactgctaacaaaatttttttaaaactagtcggccgggcgcagtggctcatgcctgtaatcccagcactttgggaggccgaggcgtactgatcacctgaggtcaggaattcaagaccagcctgaccaacatggaaaaaccccgtctctactaaaaatacaaaattagctgggcatagtggctgcatgcctgtaatcccagctactcaggaggctgaggcaggagaatcgcttgaaaccgaaaggcggaggttgtggtgagccgagatcacgccattgcactccagcctgggcaacaagagcgaaattccatctcaaaaaaaaaaaaaaaaaagagaatgtaattggattacttgtaaatcaaggataaattctcgagcggatggatactccaatctccctgatatgcttatttcacattgcatgcctgtatccaaacatctctgggccaggcgcggtggctcaaccctgtaatcccagcagtttaggaggccaaggtgagcagatcacttgaggccaggagttcgagaccagcctgaccaacatggtgaaaccccatctctactaaaaaatacaataattagccgggcatggtggcccatgcttgtaatccctgctacccagaaggatgaggcaggagaatcacttaaaacccggggggtggccgggtgcggtgactcagtcctgcaatcctagcactttgggatgctgaggctggtgaattgcctgagctcacgagaccagcctgggcaacacgatgaaaccccgtctctactaaaatacaatagaaattagccaggcatggcggcatgtgcctgtagtccctgctacacgggaggctgaagcaggagaattgcttaaacccgggaggcagaggttgtagtgagccaagatcaggccactgcactctaggctgggcaacagagtgagactccgattcttaaaaaaaaaaaaaagaatcccggttgggtggaagttgcaataagccgagatcctgccactgcacaccagcctcggcaacagagcaagactctgtctcaaaaaacaaaaacaaaaagaaactcatttattccataaatatatacacctactatgtactggcaatttttttttctcttttctttttcctcgagacagagtttcactcttgttgcccaggctagagtgcaatggcgcaacctcggctcaccgcaacctctgcctcccgggtgcaagctattctcctgcctcagcctcccgagtagctgggactacaggcatgcgccagcacgcctgcctaattttgtatttttagtagagacagggtttctccatattggtcaggctggtctcaaactcccgacctcaggtgatccacccgccttggcctcccaaactgctaggattacaggcatgagtcactgcacccggccaaaaaatttttttaataatttaaaaattaacaaaaacaacaacaaaaactaccagagataataagtgagttttggaaggttgccagatagaaggtcactatgcagaaaacagactatatttatatatgctaccaaaaatcaaaaaaaacttctattcacagtagcatcaaaaataataaaatatctaagactcaattcaacaaaagaagttcaagttttatacactaaaacataaaaaacacggctgaaagaaatcaagacagatgaaaatcagtggagagacatactatgttctggattgaaagacaatattgttatgatggcaattctgtccaaattgatctatagatacaactcctaaaaaaatcctagagatttgtagaaattgacaaactgatcctaaaatctatatgaaacaaccaaaatgattttgaaaaagtaggaagacttacattacctgatttcaaaactttaattaaactacagtaatcaagactgtggtatcggcataggtattagcagacagatcaccaaattagacaagttagcccagatatacacctacacatctacagtcaactgatcttcagtaaacatgacaaagcaattccagatggaaaggatagccagtgcagtggctcacacctgtaatcccatcactttgggaggccgaggcaggcagatcacgaggtcaggagtttgagaccagcctggctaacacagtgaaaccccatctctactaaaaatacaaaaaattagccgggtgtggtggcgggcgcctgtaatcctagctatttgggagcctgaggcagaagaatggcatgaacctgggaagcagaggttgcagcaagccgagatcgcaccactgcacaccagcccaggtgacagtgccagactccgtctcaaaaaaaaaaaaaaaaatggaaaggatagtctttccaccaaattgtgctagattaattggatagacacacacacacacacaaaattaacaatgggtaaaatttatgatatgtaaattatacttcaataaaaagaaatagccgggcgccgtggctcacacctgtaatcccagcactttgggaggccgaggtgggcggatcatgaggtcaagagttcgaaaccatcctggcgaacatggtgaaacccccgcctctactaaaaatacaaaaattagctgggcgtggtggctcacccctgtagtcccagctactcgggaggctgaggcaggagaatcacttgaacccgggaggcggaagttgcagtaagtggagatctgccactgcacgccagcccgggcaacagagcgagattccctctcaaaaaataaataaataaataaaaataaaaataaataacaactaaaaaacatttttaaaatgctggaacagttaggacaattttaacactagatgcttgatacttataaacattgttgattttttaaattgtaatagtggtactgtgcttatgctttgaaaaaagtctttaggccaggtgcagtggctcacgcctgtaatcccaacactttgggaggctgaggcaggcagatcacgaggtcaggagttcgagaccagcctggccaacatggtgaaaccctgtctctaataaaatacaaaaattagccaggggtggtgactggcacctgtaatcccagctactcgggaggctgaggcaggagaattgcttggacccaggagacagaggttgcagtgagctgagatcatgccactgcactccagcctgggtaacagagtgagactccaactcaaaaaaaaaaaaaataaggctttatttttagatatatgtactaaaatattttaggataaaatatgacttggagaatttgcttcaaaataactgagggggacagggagtgggtggggctatacat

SEQ ID NO: 96460 - DNA, 13129 bp, Homo sapiens
cgcgccactgcactccagcctgtttcaaaaaacaaaaacaaaaatgaaaacaaacatcatgcctgtaatcccaacattttgggaggccaaggtgggtggatcacctgaggtcaggtgtttgagaccagcctgaccaatacggtgaaaccccgtctctactaaaaatccaaaaaaactagccaggtgtggtggcatgcgcctgtagtctcagcaactcgggaggctgagacaggagaattgcttgaacctgggagccagaggctgcagtgtgccgagatcctgccactgcgctccagcctgggcaacagaggaggactgtatcttaaaaaaaaaaaaagaaagaaagaaaagaaaagaaaacaaacaacaacaacaacaaaagaaaagagaaaaaaaggaaaaagcagagaatgtaaactggtaaatggaaataaagaaatataaatagccagtaagtatgtggggaacgatactcatcttctcattactgaagggtctttgcactttctgtgcctttgcctgtgaccctcctttcccaggtagcaacagtagcttgcattcaattccttcagttctgtgtcactcaaaaatctaagggctattacggccgggagtggtggctcacgaaaatcaaactttgtgtgtgtgtgtgtctgggtgtgtgtgtgtgtttgagatggagtctcactctgttgcccaggctggagtgcaggagtgcactggcgtgatcttgactcactgcaacctctgcctcctgagttcaagtgactctccttcctcagcctccggagtagctgggattacaggtgcccgctaccacgcctggctgatttttttgtatttttagtagagacggggtttcaccatgttggtcaggctggtcacgaacccctggcctcaagtaatccacctgcctcggcctcccaacgtgctgggattacaggcgtgagccatggtgcccagtggacttctaggcttcttgcttgtggatctagattgatggttttgctagtcactgaaatagggacaccaaaagaggattgggtatggaggaccctgaaggcaagcttgtcctcctgatgagccccaggggccttggaaacatctaggcgaggttgtggagcaggaagttagatgtatggaattgactccaaggtgaggtttgggctgtgtataattgcgggactcattggtgtagagatggtaaccaaggctgggcgcagtggctcacgcatgtaatcccagcactttgggaggcctaggcgggcggatcatgaggtcaggagattgagaccatcctggctaacacggtgaaaccccgtctctactaaaaatacaaaaaattagccaggtgtggtggcacgcgcctgtagtcccagctacccgcgaggctgaggcaggagaattgcttgaccccgagaggcagaggttgcagtgagccgagattgcaccactgtacttcagcctggggtacagagctagactctgtctcaaaaaaaaaagaaaagatggtaaccaaagtccaaggtgtagctgggtcagtgcctcacacttgtaatcccagtactttgggaggccgaggctggaggattgcttgaggccaggagtttgagaccagcctgggcaagatggtgaaaccccatctctattgaaacaaaccaaaaacaaagtcaaagtgagtgggatcaatgagggtcagtgtggggtgagacaaaaagagggcctaggactcgcctccaggaaccctgatatctaattgccatgtaggaggatgagcctgtaaaggggatggaggaagggaagccagaatcatcgcagaagtcacaggattcagctttgcatgaaggaggaagagtcaatgatcctgaacactccttcggaggccaagatagataaagacttaaaaacaaaagtccactggatttaactttgatgtcagagaaaatgctaatccagggtttctttgtttctttactttgtcactgttgacatttgggctggatgattctgggtcataggcggctgtccagtgtgttagcagccttcctggattttatacactagatgctagtagcaccccatccctaggttgtttttttttctttgacagagtctcactttgtcacccaggctggagtgcagtgcagttcagtggtacagtcttggctcactgcaacctctgcctcctgggttcaagcgattctcctgcctcagcctcctgagtagttgggattacgggcacatgccaccatacccagctaatttttgtatttttagtagagacaggttttctccatgttggtcaggctggtctcaaactgctgacctttggtgatccgctcccctcggcttcccaaactgttgggattacgggcatgagccactgcgcctggccccatccctagttgtaaacattgcttccagatgttgcctaacatctcttgttgggaaaatcgccctggttgtgaacccctgctttggcattgtgtcttgggtcggcatccaaatgtggcattacatagttctttctttttctgaggcagggtcttgctgcacccaggctggagtgcagtggtgcaatcatggctcactgcagcctcaacttcctgggctcaagtgatcctctcacctgaagcctcctgattagctgggactaattttttgtatttttatattttttgcagagacgaggttttaccatgttacccaggctggtctgaaactcctgggctcaagcgatttgcctacttcggcctcccgaagtgctgggattacaggggagagtcaccatgcccagtttctccttgcttttttcacttaacggtatatcctagagctcttttcattacaatacatagaagccttcttcattattttatggcaacaaaatattctgttttgtggatttaccatagtttatttcatcacttccctattgatgattctgatgattccctaggctgtttccagtcttctaaaaagaaagtcaacagtaccaagccacacacacacacacagacacacacagacacacatacacacacacacacacacacaattttcattcatgtcaagtagctctatagcataaattcccaggagtgttcagaaaaaataaataaaggaaagaaaaaagaaaatctgagctatctgatcaggaaaaaacatccccagaaatgagactgctgagtcaaaggataaatgcatttgcaattttgctagataatgccaaattgtcaatcacaggagtggtagcaatctgcacaagccattagaaatgtactcaagagcttatgtctccttcacctcaatagagtcaaaaggaaaatgacaaactaggacaaaatatttgcaactcatatcacaaatgaatggctattctgtctaatataagaattattggctgggcgcagtggctcatccctataatcccagcactttgggaggcggaagtgggcagatcgcttgagtccaggagtttgagaccagcctgggcaacataggaacataggcagacccccatctctacaagtaagtaaataaataaaatattaatgagatggattcaattgaaagtgattgaaatacagaagtgagaagttcctgagaaggtggaagtgggtgagattcaaggccaggtgtaagtgtaggtgtttgccccagtttcttttcttgctttctttctttcttttttttttttgagacagagtctcgctctgtcgccaggctggagtacagtggcaggatctcagctcactgcaaccttcgactccctggttcaggtgattctcctgcctcagcctcccgagtagctaggattaaaggcatgcgccaccacgcccagctaatttttgcatttttaagtagagatgggatttcagcatgttggccaggatggtctcgatctcctgacctcatgatcctcccacttcggcctcccaaagtgctgggattacaggcgtgagccaccgcgtctggcccccagtttcttttgtttttgttgtgtttttgtttttttgagatagagtctcactctgtctcccaggctggagtgcattgacatgatctcagttcactgcaacctccgcctcccaggttcaagcgattctcctgcctcagcctcctgagtagctgggattacaagtgtccaccaccacacccagctaatttttgtatttttagtagagacggggtttcgccatattggccaggctggtctcaaactcctgacctcgagtgatctgcctgcctcggcctccaaaactgctggaattacatgtgtgagccaccgtgcccgaccctgcctcagtttctccattcataaaatgggggttctcgagctaaccatgaaaggcacctagcactgttctttgctaaatgtaactcatccctttgctgagatccagggcagactgggcttgggaccactgggcagaggccagccctgggaacaggccttgtgcacaggtcctccgagtgcagcctggaggatggtcggtgttcagtggagggcctgagccactcctggagcctcaccataggagaggaagggagacctttagcaaagccggaggaggggaacctgcgggcctggagccatctctttgtgagtccacccacagccttcttcaaagctccaccaagcccacgatggggacagattggccctaaatttagctaaacatcaggcccagatggagcttttaagaagcacagtgcacaacaagagtcatgagcactgtcagtggaagcccctggtttacaaaagaggaaacaggcgagaaagggcagggggctatttccagagctacactgcaggataggcctgactcctgctaacaagtgtgtattatgggctggaatgtgtccccctccaaatgcatatgttgaagtcctgactcccagtgcctcagaatgtgaccgtatctggagatagcaactttaaagaggtaattaagtgaaaatgaagtcattgcggtgggtggcggggggggggggtccgaatccaatgtgactggtgtccctataagaagaggagattagggctgggtacagtggctcatgcctataatcccagcactttgggaggctgaggtgggtggattacctgaggtcaggagttcaagaccagcctgatcaatatggtgaaaccctgtctctactaaaaatacaaaaattagctgggcatggtggcctgtgcctgtagtcccagctactcaggaggctgagacaggacaattgcttgaaccggggaggtggtagtttcagtgagctgagatcacacacctgcactccagcctggatgacagagcgagacactgtctcaagaaaaaaattagctgggcatggtggtgagtgcctgtaatcccagctacttgggaggctgaggcaggagaattgcttgaatccaggaggtggaggttgcagtgagctgagatcgtgccactgcactccagcctgggtgacagagcaaggctcagtctcaaaaaaaagaaaaaaaagaagaggagattaggacacagacatacagagggaagaccatgtgaagatacaggaagaagatgaccatttaaggcccactctggtggcttaaacctataatcccaacactttgggagaccaaggcaggaggattgcttgaggccaggagtgtgaggccagcctgagcaacacagtgagagcccatctgtcttttttttttttttctcactctgttgcccaggctggagtgcagtggtgcgatctcagctcactgcaacctccacctcccgggttcaagcgattcttctgcatcagcctcccggctagctgggactacaggcgtgagccaccacrcttggctaattttttgtatttttagtagagacagggtttcaccatgttgtccaggctggccttgaactcctgacctcaggtgatccgcccgcctcggtctcccaaagtgctgggattataggtgtgagccatcacgcctggcggagcctgtttcttaaacaaaattggctctctgctcctcccattcgacagacagccgcatcttttctcacatccctgagagcatggtgaaggtcggaacaaatggatttggtcgtattgggcgcctggtctccagggctgcttttaactctggtaaagtggatattgtcgccatcaatgacccttcattgaccttgactacatggtctacatgttccagtatgattgcatccgtagcaaattccatggcactgtcaaggctgagaacggggaaatcccatcatcatcttccagaagcaagatccctccaaaatcaaatgaggagatgctggtgctgaatacgtcgtagagtccaccagcatcttcaccaccatggagaaggctgggacgcacttgcagcggggagccaaaagggtcatcatctctgccccctctgctgacgccccatgttcgtgatgggcgtgagccatgagaagtatgacaacggcctcaagatcgtcagcaatgcctcctgcaccaccaactgcttagcacccctgtccaaggtcatccatgacaactctggtattgtagaaggactcatgaccacagtccatgccatcactgccacccagaagactgtggatggcccctccaggaaactgtgatgtgacagccacggggctctccagaacatcatccctgcctctactggtgctgccaaggctgcgggtaaggtcatccctgagctgaatgggaagctcacttgcatggccttcagtgtccccgctgccaacgtgtcggtcgtggacctgacctgccgcctggaaaaacctgtcgaatatgacgacatcaagaaggtggtgaagtgggcatctgacgccccctcaagggcatctggggctacactgaacaccaggttgtctcctccgacttcaaccgtgacactcattcttccaccttcgacgctggggctggcattgccctcaacgaccactttgtcaagctcgtttcctggtatgagaatgaatttggctacagcaacagggtggcggacctcatggcccacatggcctccaaggagtaagacccccggaccaccagccccagcaagagcatgagaagaagagagaggccctcactgctggggaatccctgccacactcagtcccccacccaccacactgagaatctcccttcctcacagtttccatgcagaccccctgaagagggaggggcctagggagccccgccttgttgtgtaccattaataaagtccccagcactcagccaatcaatcaatcaatcagttttaaaaagatgatcatctacaagccaaggagagaggcctcagaagaaaccaacccggccgacaccttgatcttggacaatctccaagtctccacaattgtgagaaaataaatttttcttgtttaaacctcctagtctgaggcacagttgtcccttggtgtccctggggattggttccaggacttcccacatatcaaaattggcagatgttcaagtcttcatataaaatgttgtattatttgaaaataatctatgcagtatactttaaaacatctctaggttacttagaatacttaatacaatgcaaatgctatgtaaatagtggttatactgtattttttattgtattttattgtattgtatttcactttttttagagacagggtctctctctgttgcccaagctggagtgcagtggggcaaccagagctcactgcagacttgaactcctgggctcagttgatcgtcccacctctgcctccagagtagctgggagtacaggtatgtgctaccatgcccagccaatttttataaatttttctgaagagatggtggtctcatttcgttgctcaagctggtctcaaactcctggcctcaagtgatttgcctgccttggcctcccaaagtgctgggattataggtgtgagctactgaactcagcctagtattgctcttttgtttctttttttgagatggagtctcactctgtcgcccaggctggagtgctgcaggacaatcttggctcactgcaacctctgccatctgggttcaagtgattctcgtgccccagcttcccgagtagctgggattacaggcacacgccaccatacccaactaatttttgtatttttagtagagatggggtttcaccatattggccaggctggcttcaaactcctgacctcaggccatctccagcctcggcctcccaaagtgctgggattacaggcatgagccactgcacccagcctattacagttttttttttttccagatatttttgacctgtggttggttgaatctgtggttgcagaacctgaggatgtggagagctggctgttttttgccatggcagccctcacatactaatgcagtgcatttcccattcatgtcaaatacatctgaaggcaagtggtccaagatgctatggccacaacacagagtctcacgctccactttctcatccaccttctatttgcaaggtcacttcttgggccaacatggctgctggaactgccttactccaagcaacaaggaagtggggagaaagcttgtgttccttccttttaaggcaacttcctacaagtcccatagagccattttgcttacatcttattggccaccgcttagtcacatgatgacacctagctgcaagggaggctgggaaatgtacccagctagaagtaaaagtttattcctaaggagaagggggagaatggatgctgggagaggtacccagtggtctctgccacaaactatgatctcagaccacatactgaagaaggcatgaagaactttcttactttttccataaatcagcatactttctcttcctttcctttccattcctttttcttttttttttctttttttttttttgagacagagtctcactctgttgcccaggctggagtgcagtgatataatctcagctcactgcagcctctgcctccctggttcaagcgattctcccacctcagcctcctgagtagctgcgattacaggtgcacaccaccatgcctggctaatttttatatttttagtagagatgaggtttcaccatgttggccaggctggtctcaaactcctgacctcaggcgatgcacctgccttggcctcccaaagtgctgggattacaggcatgagccaccatgcttggccactcagcataatttctattgcaagctaagatggcattttcacctatgtgaatgtgtatatttcttggtaacttttgaagtgccaaactatggtgggcagtgtctgtactgaagtcctctgtccatgcaggtgtgcctgagacatcacccctcagccattgaccccctggctttcagcttacacaggctgcttgtttctgtctgtgcagctccttccgcctctcaggaccatgctcaaggctcagagaatgttccactactctcatgcccactgagaactagggcattgtgtgaagcattctcccctctgctctttttttttctttttgagacaggatcttgctctatccctcaagctggagtgcagtggtgtatcatggctcactgcagcctcaacctcctggactccagcaatcctcttatctcagcctcctgagtagctgggactacaggtgtgcaccaccatgtctagcttacctttgtatttttttgcagagatggggttttgccatgttgcccaggctggtctccaactcctgcactcaagtgatcccctgtcttggcctcccaaagtgttgggattactgacgtgagccaccatgcctggtcccatctgctctgggctttctcaagcatctctctggagtctcatcgcttttccccaaagaagtggagttcagagcttttccctctgagatttcccaaactctctctttttttccattacttcccctctgcctttctcttttctccctaccccaggggcatctgaaagtgacaagtcctatttttggcctttatctttctccaataaggacttaagctattgggatacaaaagcccgaaactcatggattttacctgctttccaccctctcccatttctctactgaatatgagacaaagacaggttttggattaacattagggaagaaagaagaaaataaaatatcaggctagacatggtggctcacacctgtaatctcagcactttgggaggctgaggtgggaggattgcttgagcccagaagtttgagaccagtctggggaacatagtaagactccgtctctacagataataataataataataatagtaaaggttttttaaaatcaagaaattaaataaaacatcaatctgtgtctcaaaaaatattcttctgccatatttacaataaagtgtcctgtggttggcactttttggcattcctcacttccctctctcttgctactgccactatttacagtctagaaaagctacattttctcagcctctcttgaagcttagggaggtggtatttcccagtcctggtcaataagatagggacagaaggctgttcaaggtttacaggaaagctttgaaaaaagagggtccaggtgtggctgacatcatttctttccctctgcttcctacttataatgtgaacatggctgggtgcaatggctcacacctttaatcccagcactttgggaggccgaggtgggtgaatcacctgaggtcaggagttcgagatcagcctggctaacatggtgaaactctgtttctactaaaaatacaaaaaattagctggaggtggtggtgcatatctgtaatcccagctacttgggaggctgaggcaggagaattgcttgaacctgggaggtggaggttacagtgagctgagatcatgccattgcactccagcttgggcaataagagtgaaactccatctcaaaaaaaaaaacaaaaaaaaaaaaggtgaacgtgaacacaatgcctggagctgcagcagtcatcttgcaaccatgaggaaaaggctaagaaaatcatacagatgccatggcatcataagcagctgtatctatatagtatcatttatttactattaagaaagaaaaataaaccccgtttttaagtaaacataatccccaggacatggtaggagcccctggatcaggctatgcctgaaagccacctacatctagacttttagacttttgttacttgctgctgaaagcattcctaatgtatatatgttattaaattaacacacatgcttttctctttattgtcacagactatgcccagatagtaacagagtgacaggcatcttgaatttttttttttttttagatggagtctcactctgttacccaggctggagtgcaatggcacgatcttggctcactgcaacctctgccttctgggttcaagctattcttctgcctcagcctcccatcttgaactctgaaccacacagatgcaagaccatttctaaccatccttctatcatgctcagcccaggtcctgccaccaattctgtcctgagggttcccatgccagactctaattttcagagtgagtcaggtatgtaaggtaatgttcagggcatactgagtggaaactcttgatggagatagacaggctgtagaatggagatagtcctccattattgtcaaccttaggacgcaccaccttaccttggtccccctttctcagcagcagagctcataaactgagtgtttggaggaagtccagacccgtctactggaagtcttctacaggatatgtcattgctacggtctgaatgcttgtgtccctccaaaattcacatgttaaaacctaacccctaccatgatggcattgagaggctggagcctttgggaggtcattaggtcgtgagggttctgacctagtgaatggaatttatgtccttataaaagaggtttgggccggtgtggtggctcacacctgtaatcacagcactttgggaggctgaggtagtggactgcttgagcccaggagttcaaggtcagcctgggcaacatagcaaaaccctacaaaaaatacaaaaattagtgggatgtggtggtgcatgcctgtagtcccagtgactcaggaggctgaggtgggaggatcacctgagcctggaaggtcaagactgcagtgtggccgggtgcagtggctcacacctgtaatctcagcactttgggaggctgatgcgggtggatcatttgaggtcaagagttcaagaccagcctggcccacattgggaaaaccccttttttcttaaaattccagaaattaaccaggccgtaatgggccccccctgtgattccaacttccttcgaaggccaaggaagaaaattatttgaaccttagaaggaaaagcttccatgaacccaaaatgagcccctgtgcttcaacccgggtgaacgaaatagacaccttgcaaaaaaaaaaaaaaaaaaaaaaagcccgcacggtgggtcaggcttgtattccaaccactttgggaggctgatgcgggtggatcatttgaggtcaagagttcaagaccagcctggccaacatggtgaaaccccatctctactaaaaatacaagaaattagcagggcagtaatggcacgcacctgtaatcccagctactcaggaggccgaggcaggagaatcatttgagcctaggaggtagaggctgcagtgagcccagattgagccactgcactccagcctgggtgacagagtaagaccttgtcaaaaaaaaaaaaaaaaaaaaaaaagccagcacggtggctcaggcctgtaatcccagcactttgggaggctgaggcgggttgatcatttgaggtcaggagttcgagaccagcctgaccaacatagagaaaccccatctctactaaaaatacaaaattagctaggtgcggtggcacatgcctgtaatcccagctactcaggaggctgaggcaggagaatcacttgaacccgggaggcggaggttgtggtgagccgagatcatgccatcgcactccagcctgggcaataagagcaaagctccatctcaaaaaaaaaaaaaaaaaaggtggctgggcgctgtggctcaagcctgttatcccagcactttgggaggctgaggcaggcagactacaaggtcaggagatcgagaccattctggctaacacagtgaaaccccatctctactaaaaatacaaaaaaattagcgggg

SEQ ID NO: 96461 - DNA, 13542 bp, Homo sapiens
actaactcctattactgctcttaggagattaagtcctatagtagtttccaagtgtcctagaaattaattccaagatccttaccttacctctgtttccaggtctttaataaggtgccccagattacccctcctcccttatcttcttcatcatcctccctctgcctgttttaaatgcccttcacctgacagctttgtttccagtcagggacttcttccatgctgcctacatggctagaatgcctccttgccctcagggcaaccgactggtcatcttcctctcaccatttaaacttcactctccaagaagtcttgtcagatactctgttaggagatactacttttactaaaataatggatcacaaccctggctataccctggaatcactaatgtgtgacaagttaagcttcatcagtatgttaggtgccttaaagtaaaatactgatacctagactacataccagacagaatctctaggcaaaggaaccagatattggctgtggtgggttgcttttttttttttttttttttttggtctgtttttttccacagccccacaggtgatctattgagcagccagagttataaaccaccacaggctgagcattctttaatccaaaatgctccaaaatctgaaactttttgagcaccaacatgacaccatagtggaaaattccacacacgaccctgtgatgggttgcggtcaaaatgcgggcataaggccgggtgtagtggctcacacctataatcccaacactttgggaggctgaggcaggtggatcacttgaggtcaggagtttaagaccagcctggccaacatggtgaaaccctgtctctactaaaaatacaaaaattagctggggatggtggcacgtgcctataatctcagctactggggaggctgaggcaggagaatcacttgaacccaggaggcggaggttgcagcgagccaagatcgtgccactgcactacagcctgggtgacagagtgagactccatcttaaaaaaaaaaaaaaaaaaaaaacagttcattctcagcacagtatagacactcagcaaattttaccacaagtttgttccctgctgatcttgtccttcctttaggtaaaatgtggtcaaaattaatgccaaaacctacaaaaacctggagaaaaagtcttcaaaagtaaataaaacatagcccagggaggaacctgattcttacagttcccgggccataatgtgtaaggagtttatatccaaattacacataaccaccagtagctgcatccactgctgtttcccatgctctgcttccttggtctctgtttgtttgttttgagacagtgacttgttctgtcacccaggctggagtacagtggcatgatcatagctcactgcagcctccaactcctgggctcaaccagtcctcccacttcatcctcctgagtagctggggctacagtcacatgctaccaggcctggctaattttattttttgtagaaatagagcctcatcatgttgcccaggctggtatccaactcctggcttcaagcaatcctcctgcctaggcctcccaaagtgctgggattacaggcatgagacaccacaccgagccagtctctatttacaagtacccaaacccaggatatctagagagaaacctgctgtcaggtgctggtctgccaaaaactttaaattgaataaatttgaccaggtatggtggctcacacctgtaatcccagtactttgggaggccaaagagggagaattgcttgaggccaggagttcaagaccagcctagtcaacatagcaagaccccatctctacaaacaatacaaaaattagctaggcatggttgtgcatacctgtagtcctagctacttgggaagttaaggtgagaggattgcttgagtccaggacttggaggctgcagtgagctatgatcatgccactgcactccagcctgggtgacagagcaaaaccctaaaaaaaaattccttttgataccaaaacaatttaaaagttataaacttataactcaaataggtactagagtataggaaataggctaataatgacaatgccaatttcaattggcagactagggctattagggctgataatgctgtattaagaactctgaggctggccgggcgcagtggctcaagcctgtaatcccagcactttgggaggctgaggtgggtggaccacgagctcaggagttcaagaccagcctggccaacatggtgaaaccccatctctactaaaaatacaaaaaaattagccgggcatgttggcgcatgcctataatcccagctacttaggaggctgaggcaggagaatcgcttgaacccaagaggcagaggttgcagtgagccgagatcacgccactgcactccagcctgagcaacaagagcgagactccctctcaaaaaaaactctgaggctaaattcatcaggaatgctatgagggatcacggatattggtcatagaggaggagagatggcatatatgacatgtattttccatccaaaaggtccataacttcaagagtctaacaaaaaagcctaatcttcaaaaggaaggtagtaataatgtacacacaaaatggcatatttctatcagtactaatcacactatagatgaatcacttatttacttgtttgtgagggcaggaactatttttgctttattcattttttgtatctccaacacctatcagaatgcctgatatatagcaggctgttaatagaagtatattcaatgaaatctgcaataaaaaaaaaagaaacataagaccacattattttgatatgtcataatcacttaaggtctatactccaaaatatcacacaccctagtgaatgaccatctgaacttcgtgttttattgtagtgggtaatgatatcatagtgcactataacctcaaactcataggctcaagcaattctcctgctttggcctccaaagtgctggaattacaggcatgaactaccatgctcagcctagaagcatgacttttaaaaggaacacttccctcactcatattactcttgggagatagtttaatatggtgaaattctaatgtctcttttcacttagcactataaaaccactaatattgctttatctaaaagagctggaagacaacttaacctgtatttgttctacaactgaaccagaagaataaaaattagttttatccaaggtttaaaacttgtatctattcttaagaatcgtaatctcaaaacaaacaaacaaataaacaaacaccttaaaattattttaggttacaaaacagatgtgttaaaattaaagcagatggctgaatccaagaattaaactttgcaaaagattaatgtcatattaatcacaactatacttctgactagaaagaacggggtctagatgatctctcagggaatcttgttctggattttccacactcttgccccttgtcttatttgagcagacacagatttaactggctctttgctgttttctctagcattttaacaatcatgacacataaaacaagttgacacatagcctttccccagagtttcaaaatctttgtcataagaatcaagtggctaggcaatgaatacagattcctggctttctgtggtacttttggaagcaataagtgcctattttaagtttttttgagcttctttggtagtagtggaaagaattttactacaggggtttgtatgtctcagaaagaaatactaaagtatacaacttcacaccataatcagcaaacatctgtcagcagcacttagagagctgggagtgaagggattcgggctttggcccaggctatgctccttattaaccatgtgatcttggcaaataatccaacctcagattcttcacctataaaccaataatctgccacctttctaccctgcttacctcatagagttcctgtgaagatccaattagctaacatgtcttgaagcacttggaaaactattaagccctaacaaatccatatacagaaacattatcgtcctagtcctcagggaaaagggaactattaggtcacaaatgcccctattccatcccacccccataatcaatcacataattgtacctaaagaacaactgtattgccacatggttcatctttattacttaaatttacacatgctattctccagaagcctatatagtgacgtgtaaagatgaactagcagaagaaaaatgtggcaaagcatataaagaattaggccatttaaaatcttttctaaagattttctttgcctgccctgaactccaaaattcctgatgggtcctttgaaatcttcaattgcctcttgatttcagatgttaaaaggaactctttacaccaacacttaactaagaaacaagaatactttcctcccacaattttaggtttggtgaacttgtagtaacatagcacttcttaccagggatcattctaatcaagctctgtaacactgctcgctggtgcctttctccgaagtaagaagcaatttcctacatcttgactgggctgtaaaaagcggtatacggttccaaaataacagagaattcctcctttactgtcatagttcttgatagtctgatttctatgctaagcatgtcaggttcctggctgccattgacaagttgtatgaatctagataagtcacttatggtgatctgggactcaagtttccacatttataaaaatgaaaactagtttatctccaaaaacctttctggtggaaatattctaagattctcttcagattacatgtatcaatacagtcacagtactgtgactaagagacccgcccccaaagaacaatcccatattagctgcagcttccaaatgttcaacatttcccatttcttccccagtccccaaagggtagtcacagctactacagaactgttaacagcacagctaaaagaaaaaaaaaaccaaactagctacacgacagaaagattgtaggtttttttaagagtcagtgggttttaaaaagggaaaggaattgaatcagaaaaataggaagacacatgtaagaaaacacaccagtccaatttcataccaggttatctcctgtggcagagaataatcttagcagtccaagcctaacccctgtcactgataaccttagaaaaccagaaaagtcagattaaccttagcagatcactcaatttcaattaacgctgtagttcctgactaacaggccagcgggaagtagagggccagagtagggaggtagcagtacagaggagcatagatggaaggtttcacttccagctaagatgtcattctaatgattaattaaaatgtttgaaaacaaaaaatccaataatgtatgatttattcaaaaacgatgtgcaaggaattttgctagacatcccagtagtgggggtgggaatgggggtaatgacacagatgcattcagggaatttaagagtcattagaggctgggcacagtggttcacacctgtaatcccagtactttgggaggctgaggtgggtggatcacttgaggccaggagttcgagaccagcctggccaacgtggcaaaaacctgtcactactaaaaatacaaaaattagccgggcatggtggcacacacctgtagtcccagctacttgggaggctgaggcataagaatcgcttgaacctgggaggcagaggttgtagtgagcggagatcgcaccactgacagagcgagactctgtctcaaaaaaaaaaaaaaaaagaattattagttattagtaagtcccattaccccatgcagtttaaaaacatagtattaagaatatgtacccataggtatgagctgagaggagtggaaaaaaaaaagttacagacccaaacattaatacttaaggaaatatgctgtctcatgaataatacagaatgatttaggaattcagatgctgactggccatctggttttagtaatcagtgaagactcattaggatagttttcatcatggtcttgaaagataggaataagctcattttagtgtacctgtttgcccttgggatatgtttattagtgtaagagtatcactgatgggaaaagygtggtctgaaatagggacatggatcgccatcagcaagccaaaagaaaaacatcaagtcaccagttaataatggtctgaagcagcccttctttactcatgtcatttctactgtctcagatattagtgttcctccaactgcaaagtttatttttgttataataaccactagtgttttatccaatatagacgttatggaagtgagaggaagcaaacaagcttctttaaagtgaaaaagggaaagcttgaggggcattctcccagacatcaatttctattgtgaaacactactgtccaatgcaaatgatccttctgttctttcgaagttctctactaatctcctgccttccaccaactccatcatgcatctgaggcacataaaaagatacatgaccataggttaggataataacacactgtgatgacttccctaatttcttataggcaaaccgcttttgaaatgtggctttaggttagtagcacttatgtaagaacacaaagctcttktatgtctgggaacttctggtataggctgaaggtgaaggctgaaaagaacgaaaattgcttcaagttcaataaatttaaataaaatatgctccgtagaaattaaaatgtataaatcaaatatcatatactttttctgatacgatttcaaagttaacacctatactcatacttatgagtgtaaagaatttacacattttattgcaccctaattttttaaaaaataaatttcattgtgcaactgaggtttacaacatgatgctatggaatatagacagcaaaatggtgaagcagattaatatagctatcatttcacataattactttaacaagagctgctaaaatccacttatttaacaaaaatctctaatacaattttactaacattggtccccctgtatctctaaacttgttcatcctacatatctgctattttgtatccttgacctatatctccccatttcctctccttccccaccaccagtagtaaccactgtttcgttctgtgtattttagctccttaaaaaaatattctacatatgagtgagattatgcaatattttccttggtgtctggcttatctcatttaacataacgtccttcaggtccatctrtgttgtggtaaacagtaggatctccttttttaaggctgaataatgttccattgtacattgtctatacacacacataaacgtatacacacacacataatttctttagccattcctcacccatcgatggacatttaggttgcttccctatcttggctactgtgaataatgctgcaatgaacgcgagagtgcagatatcttcacaaggtggtgatttcctctcccttgggtgtataccagggacaggtgttgctktgcacccagaatcttcaaaataatatgtaaatcctacttttgctggtatactgtgaactcgtatttacctaaaaaaatgacattaacagcactctttcaagaaagtaatctgaagagaaaatataaaagaaacctcaacccaagtaaagaaggtatctctttcccattagtgttattggtaatttctaaagctctaagcggtataatttatcttttcatatacaggataacgatggtttcagttgttaccacaaattacttcaaatataacggaggaaaaaatcattagctatatagggtcttccaatatatcatacacacaacatgaaaatcaatctagcttcacgtaacttggtcaaacctggcagaatccaaggggcacgtggacgtgacagccaagttactactgactaggctaggctaaaggttaataaataaggcactcataaaaggaatcgaggccaggcgcgatggctcacgcctgtaatcccagcacattgggaggccgaggcaggtggatcacttgaggtcaggagttcgagaccagccttgtcaacatggtgaaaccccgtctctactaaaaatacaaaaaattagctgggtgtggtgacaacgcctgtaatcccagctactcaggaggctgaggcacaagaatagcttcaacacgggaggcggaggttgcagtgggccgagatcgcaccactgcactccagcctgggtgaaaatccgtctcaaaaaaaaaaaaaaaggaatcggtatgagagatggagtcaggaacactgctcaactcgagattatcacacatctctcgttctttcaatattggtaccgaaagaaaataattttacttatctccctccgtgcatttattcctttacaatatgaattatttccagtctggctggcgtatctcactccacaccccaagctagtgtcataaaccattttccccaagagaaacctagagaaagatacataagcctaaggctcttaaaaaaaaaaatgaagcatgtgtcttcacctcgccttacacttttctcagttacctctcccgagggtgtgaaaatatcaacatccggtcgcccacccccactctctcagcagtgcctcgcattgactctgcccatcccctatcattccctttacagtctcatcaccttggagaagcccatcgaatatttcttcccattgctcccccacccttattcatggctcagcgcgatattctccacatttttctcccaaggaagtggcaaaaaagaaagcagcatggtcgacgacgaaaccggggaggcctgacaaccagacggcagtttaaggcgacggaactggctctttccccccatctcggcctccgaccagcagtcggttctctaaatgtgaaatcgctggtcttcccgctcccccacccccatccccatccccgtcagaggccaagccggtaaaatgcaaagaccaaggggaagcgcgaggcagggtcatccctaacgaagcccgctccctcccgggctggtgtccccgggggggggctggagattgcggggggaggagcgagcggccctcgcccagagacccccggagacgcgaccctcgacacccgggccctttccccacccggcttccctcccccgcggcccgatccggagaactgcagcagcgcccgggcggaccccaagccggcctcactggcacacacgccacacacaaaagcgccgcggccgccgccttcccacccccacagcccggcgaagcaatcaatgaggcggccggcgcccgcgtcccctccgtgcacacccgaacacggggccgagcgggccagcggggctggcagcgcggctcaccatcgctgcgcttgatctccacgtaaatcccgatctggatcttgccgaagttggccgttgccatcacctcatctggagcagcagcagcgggccgagggagggggaccggagggcggaaaaggcggggagggggcggggtaggtgtgggagggggagcggttgcccgcggccgcgccggcccgggcgacagcgtgaacgcaagcggggccgcaaggagcagctgtggggaagcaggcggaggccccgggcctgcaggccggcaggaggacgcgcacgccgggtagtcggggtgaagctagggccggggccgtgagacggcgcggggtagagtgggagggcccgcaccgcccgccggggagccgacgctggggaggcggggcgccgcgcgcctgcgcagagcgcgcctccggcgtctcttcttccttttcggctggcctctccccgctgcctccaggcggccccgcccagctctgcagcggggtgggcggcggccgcggcttacccagccgctggagcgttgagcgctcggcccggcccacagctagccggcgtcgcgtttgatttcagcgcgcggcctagaagacgcgggaagcgtcgcgccgagctttcttgccctctcgcttccgggaattggcgctgttgccggaatgggttaaaggccacgtggtttcaggggctttctagcgggctgagggatgtgaattcaagggccctccgttgacagtacgggatccgggttttcatcggaaggtggcaccccctatttccacttacaggtagctgacccaagcagccctcccaagcacacttggtgtaggtttcccatccagttacgctggaagggaagaaacacccttgaggtgtcacctaccctaaatcgaaatgaagatccacccctttacagtcttgccttatagtttatcacactcagaaagaagctctgtggtggggcgtccttaactgttcaggttatgaggcatccgatgctggtgccctgtttctgctgagggttcaagacttacttgccttggcctgtaaagccaacaactgtgactcaagggaagaaggcagacacataaggttgactagggaatgtgtctttttgcaataatttaattagtctgaccacatcagcaatgtggaaagcaagactctccatcctggcagagcaggaaggccacgtgtaccggggccctggaaactgtatttatagcaccgtgtgaaaacctccaaacgtctaactcctgcttgtagtactggcaattgataggttggaaacaacacttttcatggcctactttccctagtcattgttttttgttgttgttgttttgttttgtttgtttttgagggggagtcttgctctgtcgctcaggctggagtgcagtggcgcgatctccgctcactgcaatctctgcctcctgtgttcaagcgattctcacgcctcagccttccgagtaggtgggattacaggcccgcgccaccacgcctggctaatttttgtatttttagtagagatggggtttcaccatgttggccaggctggtctcaaactcctgacctcaggtaatccacccgcctccaccacccagagtgctgagattacaggcatgagccactgcgcccggccttccctagtcattgataatctccctgtaacaataactacaaatatacaatttaaaattttaaaattggaaactggatatatacatcaatgcttatgtggatatatgtgtgcctagagttttctatctaatgtaagtaatcatgtaggtccttaaaaaactgttaaaagactggcttcatctgtagcttgaacatattgaaggtatacctgtcaaaagaacaattctattgaatccattctaaagtgcatataatttctatggaaaaaaaaccacactggatagacaatgtggaaaataacttcttttacattccagaaatgacacacttgagtacccctgtttcaagtgaaatttgaccaaatcagggtttagtttttattttttctataattttgggagttttatctgaactcttcaagctcctgtctagaattcattttctgatgtctctgcaactgaggtataaaacatctatttatattttatttatactttataaagaatgcaaagaaatcaagctatacagctcaaagttaacattgtttcataaaatattattattattattattagagacgaagtctaactctgtcgtgcctaggctagagtgcagtggcatgatctcagctcactgccacctccacctcccaggttcaagttattctcctgcctcagcctcccaagtagttgggactacaggcgtgtgccactacgcccagctaattttttgtatttttaaaatagagacgaggtttcaccgtgttagccaggatggtctcgatctcctgacctcatgatcctcccgcctcagcctcccaaagtgttgagattacgtgagccaacacgtccagccaataaaatattattttgtatcgtggttgctgacacataccttacactctgtggtttatatggttaatcttaacctttaatccatataaaaggtatttttaaaatatgtacattgttttgctccataaaaatgtatgacataacacttaacaaacacaaaacctttcctttataagacatacccaaaaggcttactttttttggtacacatcagcatatgtatttaccaagactttcattatgggctttgtatgctagtggcttcctaaagagcagccataaatacatgcaatgtggctatgtttccatcaacatcctggatcaaatattctaactctggctgagacattaacaagatatataatcctaactagaactactactaataagatcctgaattagtaactactaattaatcactaagatatataccctactaagaactactgtttttattaggattatatagtctgcactcagacatttgttcaatgagttaacttcttaaactgctcagtatctcagttacctctttgatcaacctggaataataacttacattctctcaatcacagaaagtttttgtgaggacaaatgaaataaaatgtgatagtgccttgatatttataattttttttttttgagatggaatctcactctgtcgcccaggctggagtgcaatggtgcaatctcggctcactgcaacctctgcctcccgggttcaagcaattctcctgcctcagcctcccgagtagctgggattacaggcacctgccactacacccggctaatttctgtatttttagtagagatggggtttcaccatgttggtcaggctggtctcaaacttccgaccccagatgatccacccgcctcagccccccagagcactgggattacaggcgtgagccaacgcgcctggcctgtaatttgttttataaaagtaaaccatcctataaaatataacccaggccaggtgctgtggctcatgcctgtaatcccagcattttgggaggcctagataggaagatccgttgagctcaggagtttcaaaccagacatttgtattcacattcagctaagtgaaaataccaggtgaaaggctgctgatcacttagatcatgcaaaagagataatatcatttttttcttaatacctatcgctggcttcccagaataaaatctgaattctttacaaaactgtacgcgatctagctctggcttcctcggcagcctcgtctggtgctgctctcctctcactctgctccattttcgcagaactcctttctgtcccttaaatcagtcaagatctctgatcaggatggctgctcttgctcatcttttcatgtgactgattcatcttccaggtctcagtcaaaaatcactcctggaaaaagcctttccttgtccctcaccttacccccacttttctcaatctgtctttcctccccaactctaaagtaacctcctcaagggtagaaatcttgcctaaaattcttcactctatctttggcacatagaagggtacctggaacacagctgctcagcaaatatttgttgaatgaatgaaggaaaagtttaataatttgttatatgttgccaaatttatagccttaggtagtcttttctctctgtttgtttgttttttttctttttttgagatggagcctcactgtcgcccaggctggagtgcggtggcatgatctcggctcactgcaacctctgccttctaggtttaagcaattcacaagaatcgagattctcacgcctcagccatctgagtagctgggattgcaggcatgtgccacca

SEQ ID NO: 96462 - DNA, 13955 bp, Homo sapiens
taatgtcttttgcagcaccttggatggagctggaggccagttttctaagtgaagtaactcaggaatggaaaagcaaaaaccgtatgtcctcccttgtaagtggaagctaaggacaaaaagacatacagagtgatataatgaactctgaggactcgatgaggggaggttgggagggagatgaaggataaaagactacatattgggtacagtgtacactgctcaggtgatgggtgcactaaaaatctcagaattcaccactaaagaactcatctgtgtaacaaaaaattcacctgtacccccaaactgttgaaattttaagaagcagaaaacatacagactatactccccaataacaatagagcaaaacagcaatcagcaataaaaagataactaaatgaaaaaattttaaaaagaaccacttggaaatttttttagtattacttttctacagatcttagacaaatgaaaaaaatgaataaagatgaaaatagaaattaattagaaactttgaaaaattagacttgataaagagaagtaaatgtaaacaaaaaccaataaaataataaattttaaataaaaatattatgagatccaggtcacaaccataaatttaataaagtaactagacactcagatatatattgaagtgtaagatttatatgagaagcaaaaaactttgctaaaagatgcaaaaaaaatgaataaaactatctagataaatactgtatgatctcacttataagtggaatctaaaaaagtcaaactactagaagcagagagtagaaataagatgtcagtcaaagggtaaaagttttcagttacaagatgaagttatgaggacctaatgtacagcatggtaaatatggctgataatactgtactgtgtacttgaaattagctaagggagtagatcttaagtgttctcccaaccaaaagaaaaaaaaattaactatgtaaggtgattgtaacaatcatttcataacgtatatcaaatcatcatgttgcacaccttaaatatgtaccatttttatttgttgattatacttcaataaagctaggggtaggggtaggggttggggaaatagacctagagtttgggaaaatgtcaatcgttcccaaattaatatataaacttaaaacaattctcattaaaatcccagtataaatttggtttggttttttttttttggataattctaaagttcaatgggaagaaaaatgtataagaataaccctaagactttttttgaaagaaaagtagtgatatggcttgtgtccccacccaaatctcatcttgaatcgtagttcccataatccccatgtgccatgggagagacccagtgggaggtaattgaatcatgggggaggttctcatcatagtgagttctcacgagatctgatggttttgtaaagggctttcccccactttgctctcactcattctccttcctgccaccatgtgaagaaggacatgtttgcttccccttctgccatgactgtaatttcctgaggcctccccagccaggctcaactgagtcagttaaacttctttcctttataaattatccagtctcaggtatgtcctgatggcagcatgagaacaaactaatacagtaaattggtactggaagtggggtgctgccataaggatacctgaaaatgtggaagcaactttggaactggttaacaggcagaggttagaacagtttagagggctcagaagaagacaggaaaatgtcggaaagtttggaactttctagagacttgggggctcagaagacaggaagaggtgggaaagtttggaactccctaaagacttgttgaatggcttttaccaaaatggtgacagtgataaggacaatgaagtccaagctgaggtgttctcggaaggagatgacaaacttcttgggaactggagaaaaggtcactcttgttatactttagcaaaaagactggcagcattttgcccctgccctagaggttggtggaattttaaacttgagaaagatagtttggaatgggaacttgtgtttaaaagggaagcagagcataaaagtttgaaaaatttgtagcccgacaatacaatagaaaagaaaaacccattcctgaggagaaattcaagcaggctgcagaaatttgcataagtaatgaggatccaaatgttaatcaccaagacaatggggaaaatgtcaccagtgcatgtcagagatcttcatggcagcctctcccatcacaggcccggaggcctaggaggaaataatggttttgtgggcccagggccttgcagctttgtgcagtcttgggacttgatgctctgtgtcccagccatggctaaaaggggtcaacatatagcttaggccattgcttcagagggtgcaagccccaagccttggtggcttacatgtgatgttgggcctgtgggtgcatagaaatcaagaactgaggttgaggaacctctgcctagatttctgaggatgtatggagatgcctggatgtccaagcagaagtttgctgcaggggcagaaccctaatggagaacctttgctagggcagtgtggaagggaaatgtggggtacaagcccccacacagagtccccactagggcactgtggagctgtgagaagagggccattgttctcctgaacccagaatagtacatccaccgacagcttgcaccatgcaccgggaaaagccacagacactcaacatcagccatgaaggaggcctggaggaaggctgtaccctgcaaagccacagggggggagctgctcaaggctctgggagctcacctcttgcatgagtgtgacatggacgtgagacatggagtcaaaagagatcattttggaactttaaggtttaatgactgcccccattgagttttggacttacagggggcctgtagcccctttgttttggtcaatttctcccatttggaaaaggtgtatttaccccatgcctgtactcacattgtatataggaagtaactaacttgcttttgattctacaggctcataggtggaagggacttgccttgtctgagatgatactttggacttgaacatttgagttaatgctaaaataagttaagactctgggggactgttggaaggacatgattgtattttgaaatgtgaggacatgagatttgggaggagacaggtaaaatgatatggtttggccatgtccccaccgaaatctcatcttgaattgtacttcagataatccccatgtgttgtgggagggacctggtggtaggtaattgaatcatgggggtggttcatgatagtgatagtgctgttctcatgctgttctcatgatagtgagttctcacaagaactgatggttttataaggggctctcccccaactttgctctcactcattctccttcttgccactatgtgaagaagaatgtgtttgcttccccttcctccaccactgtgtttcctgaggcctcctcaggcatgctgaagagtgagtcaattaaacctctttttttaataaattaccagtctcaggttatttccttacagcagtgtgagaatggagtaatacaagtactttggcagaaactgtctctactaagcattaaaatggacagaaattgacaaataagtcagtgaaacagaagaaaagccataaaaggaggcaagtatttctgactagttaacatggtaaaaacagcatctcgaattagtaggaagttgatgaattagttaataaattgtgttaaaacaattgcatatccatttgcaataaaataaggataggtttccaccttagatttcacacttacacacatgcacacaaatgtgatatttagattaagatatttagatttagattaaaatctagtagaatgttttacaagcttaagattggaaagatctttcaaaggagaatatgaaacagaagctaaaaaggcaaaggttaagagatatgattatataaatatttgcaaaatataaacacaggatatgataaacttttgtaaaacaatagaaaaagtttaaagatacaattaaaaagtcagcaaaaattgtgaatagttaatttacaaagcaagctctacttgactgatacacattgaaaatgctcaacttttctcaattttaagaggtatgaattaaagccatgatataccatttttcatttatcagaagaacaaaagtcaaagacactgatcatattatgataataagtgtatgtgtagataggcactgattatcatagataggactgaacctgaaaaccaatttttagagtaatttggcaattgtgacccacatgtataaggatgcttagtggagcactgttcttacagcaaaaatatcagaaataaccttaaaaatgttcactgatcaggcaattattaaatagagcctagtggagtcttcagtgtaatattatgtaaccattaagaacatgctatagactgggtgcggtggctcatgcctgtaatcccagcacggaaagccgaggtggtgggattgcttgagcccacaaattcgagaccagcctaggcaacatagtgagatccccatctctacaaagaaatagaaaaagtagctggacatggtggcacatgtctgtagtcccagttatttggggaggctaaggcagcagcaggatcaattgagcccagatggtggaggcagcagtgagccatgatggcacagcctaggtgataggctgagaccctctctcaaaaaaagaaaaaaaaaaaaaaaaaagagaaaatgaagaaaaaaaacaagctagagctatatatacctgaaaactataaatgacttggaaagatatagatattatataatatataattaaactacaaaggttgcagatatgcattttataaaaatgagatcacaatataaaattacaaataaataaaattcccaattagcttgtgtgtatgtgtgtgttgactgagcacagaaagtctgaaagaagtctcagacctgaaatggacgattagaagcagctgtggtctgtggagcttatggagagaaatgaaaaggggcaagtgaattcagaaccttcaactgagatacccaggttcttgcactgggactgactggacaaacagcttgacccaaagagaacgaagaaaagtacgagggagtggagggggcgacggcccacctggaaggggcacggagccaaagaaaccgtcacctcccgccaagagaagcagtgagtaattgtgctaccctacctgggaaaccacacttctcccatggatctttgcatagatctttccatggatcaggagatctcctcatgagcccacaccaccagggccttgggtctgatacacagagctgtgtagagtctcggcagagcagccactcaggcacacacagagaaccatgagttttacatactacagctgggatcgctggcaaggcaggaaatctgtctgtatatatccctaagaagggggctgattccagggagccaagcagcattgttttgtgggccccacttccacggcacctcacaagttaagacccactggcttggaatcccagccagccaatggtggcagattggaatctccctgagatgggtccaagttcccaggggcggaggggtggctaccatctttgtggttcggtagactcaggcactccagcctgctggctgtggagaatagacagtttacgaggaaggttccccaacaatgaagaacagctgccttgtcagattgtgaccagactgcttcttggggtgggaccctgataccattcctcctcactgggtgggacctcccaacaggggtctccagccacctcctacaggtacatgtgggccagcaacaggtcagtactccaccagaatgcagcttccagaggaaggggctggctgccatctttgctgttttgtggccttcactggtgatacctccaggtacaggagaaactgaggcaactggggtctggagcagatccccagtaaactgcagcaaccctatggtagagtggccagactgttaaaagaaaaccagaacccaggatgtagagctggcagtgcctgacggcgcgtctgacgcggagttgggtggggtagagagtagggggcggtagtcgggggtggtgggagaaggaggaggcggcaaatcacttataaatggcgcggaagcaggacccgaagcctaaattccaggagggtgagcgagtgctgtgctttcatgggcctcttctttatgaagcaaagtgtgtaaaggttgccataaaggacaaacaagtgaaatacttcatacattacagtggttggaataaaaattgggatgagtgggttccggagagcagagtactcaaatacgtggacaccaatttgcagaaacagcgagaacttcaaaaagccaatcaggagcagtatgcagaggggaagatgagaggggctgccccaggaaagaagacatctggtctgcaacagaaaaatgttgaagtgaaaacgaaaaagaacaarcagaaaacacctggaaatggagatggtggcagtaccagtgagacccctcagcctccttggaagaaragrgcccgggtagatcctactgttgaaaatgaggaaacattcatgaacagagttgaagttaaagtaaagattcctgaatagctaaaaccgtggcttgttgatgactgggacttaattaccaggcaaaaacagctcttttatcttcctgcmaagaagaatgtggattccattcttgaggattatgcaaattacaagaaatctcgtggaaacacagataataaggagtatgcggttaatgaagttgtggcagggataaaagaatacttcaacgtaatgttgggtacccagctactctataaatttgagagaccacagtatgccgaaattcttgcagatcatcccgatgcacccatgtcccaggtgtatggagcgccacatctcctgagattatttgtacgaattggagcaatgttggcctatacacctctggatgagaagagccttgctttattactcaattatcttcacgatttcctaaagtacctggcaaagaattctgcaactttgtttagtgccagcgattatgaagtggctcctcctgagtaccatcggaaagctgtgtgagaggcactctcactcacttatgtttggatctccgtaaacacatttttgttcttagtctatctcttgtacaaacratgtgctttgaagatgttagtgtataacaattgatgtttgttttctgtttgattttaaacagagaaaataaaaggggtaatagctccttttttcttttctttttttttttcatttcaaagttgctgccagtgttttcaatgatggacaacagagggatatgctgtagagtgttttattgcctagttgacaaagctgcttttgaatgctggtggttctattcctttgacactatgcacttttataatacatgttaatgctatatgacaaaatgctctgattcctagtgccaaaggttcaattcagtgtatataactgaacacactcatccatttgtgcttttttttttttttttatggtgcttaaagtaaagagcccatcctttgcaaggcatccatgttgttacttaggcattttatcttggctcaaattgttgaagaatggtggcttgtttcatggtttttgtatttgtgtctaatgcacgttttaacatgatagatgcaatrcaytgtgtagctagttttctggaaaagtcaatcttttaggaattgtttttcagatcttcaataaattttttctttaaatttcaaagaaaaaaaaaagaaaaccagaaaacaacaacaacaacatgaacaaaaaagaccccacaaaaacctcattcagaggtcagcaacctcaaagactgaagatagatagcccccaaagatgagaaagaatcaatacaaaagcactgaaaactcaaaaagtcagagttcctcttctctaaatgactgcaacacccctccagcaagggcacagaaccaggctgaggtggagatggctgaattgacagaagtcggcttcagaaggtggataacaacaaactttggtgagctaaaggagcatgttgtaacccaatgcaaagaagctaagaatcatgatcaaacaatacaggagctgatagccacaacagccagtttagagaggaaggtaactgacctgatggagctgaaaaatacaacatgagaagatcacaatacaatcacaagtatcaatagcagaacagaccaagtggaggaaagaatctcagaccttgaagactatctttctgaaataagacagtcagacaagaatagagggaaagaaaatgaaaaggaatgaacaaaacctctggaaaatatgagatcacataaagagaccaaatctatgactgattggggtacctgaaagagatggagagaacagaaccaagttggaaaacagttcaggatatcatccaggagaacttccccaatctagcaagacaggccaacattcaaactcaggaaatgcaaagagcctcaggaagatactcctcaagaagatcaaccccaagacacataatcatcagattctccaaggtcaaaatgaaagaaaaaatgttaaggacagccagagagaaaggccaggtcacctacaaaaggaaacccattagactaacagcaaatctctcaactgggggtcaatgttcaacattcttaaagaaaagaatttccaggccagaatttcatacctggctaagctaagcttcatagatgaaggagaaataagatccttttccgataggcaaatgctgaagaaatttgttaccaccaggcctgccttgcaagagctcctgacggaagcactaaatatgaaaataaaaaaccattaccaacaactacgaaaacacagtgaagtacacagaccagtaatactatgaagcaaccatataaacaagtctgcaaaataaccagctagcatcatgatgacaggatcaaatccacacataacaatactaaccttaaatgtaaatgggctaaatgccccaattaaaagacatagaatgtcaagctggataaagacgcaaaaccttcaaggacccacctcacatgcaaagacacataggctcaaaataaaaggatggaggaaaatttaccaagcaaatggaaaacagaataaaagcaggggttgcaatcctagtttctgacaaaacagacttacaaaacagactttatgccaacaaagatttaaaaagacaaagaagggcattacataatggtaaagggttcaattcaaaaagaagagttaactatcttaaatatatatgcacccaatacaggagcagtgagattcacaaagcaagtgcttagagacctacaaagagacttagactcccacacaataatagtgggagattttaacaccaactgacaacattagatcatggagacagaaaattaacaaagatattcaggacctgaactcagctctaaaacaagtggacttgatagatatctacagaaatctccacccaaattcaactgcatatgcatttttctcaccaccacatgacacttactctaaaattgatcacataatcagaagtaaaacactcctcagcaaatgcaaaagaactgaaataacagtctctcagaccacagaacaatcgaattagaattcaagattaagaaattcactcaaaaggctgggcgtcgtggctcatgcctgtaatcccagcattttgggaggctgaggtgggcggatcacgaggtcaggagatcaagaccatcctggctaacatggtgaaaccatgtctctactaaaaatacaaaaaattagccgggcgtggtggcacgtgcctgtagtcccagctacttgggaggctgaggcaggagactcacttgaacctgggaggcggaggttgcagtgagtgaagatcatgccactgcacttcagcctgggtgacagagcaagactccatctcaaaaaaaaacaaaacaaaaaaaaacaaaaagaaagaaagaaattcactcaaaaccacacaaccagaaggaaattgaacaacctgctcctgaatgacttttgggtaaacaatgaaattaaagcagacatcaaaaagatctttgaatctaatgagaacaaagagacactgtaccagaatctctgagatgcagctaaaacagtgttaagagggaaacttacagcactaaatgctcacatcaaaaagctagaaggatctcgacttaacaacctaacatctcaagtaaaaagaactagagaaccaagagtaaataaaccccaaagcttgcagaagacaagaaataaccaagatcagagctgaactgaaggagatagaggcacaaaaagcccttcaaaaaaaatcaatgcattcaggagctggttttttaaaaaaattaataaaatagatagaactctagctagactaataaagaagaaaagaaagaagaatcaaataaacacaatatgaaatgataaggggaatatcaccactgaccccacagaaatacaaacaaccctcagagaatactataaacacctctgtgtttataaacacagagaaataaggtagaaaatctataaaaaatggataaattcctagacacatacatcttcccaagactcaaccaggaagaaactgaatctctgaacagaccagtaatgaattctgaaattgtaataaataccctaccaaccaaaaagaaagcccaggacaagatggattcacagtggaattcttccagaggtacaaagaagagctggtaccatttctactgaaactattccaaaaaattgaaaaggagggactcctccctcattctatgagaccagcatcatcttgataccaaaacccggcagagatacaacaaaagaaaaaaacttcaggccaatattcctgatgaacatcagtgtaaaaattctcaataaaatattggcaaattgaatccagcatcacctcaaaatgcttatctaccacaatcaaggtggcttcatccccaggatgcaaggttggttcaacatattcaaatcaataaatgtgatttatcacataaacagaactaaagacaaaaaaccacatgaatacctcaatagatgcagaaaaggcctttgataaaattcaacatcccttcatgttaaaaactctcaataaactaggtattaaaggaacatacctcaaaatagtaagagccttgtatgacaaacccacagccaatatcatactgaatgggcaaaagctggaagcatttcccttgaaaaccagcacaagacaaggatgccctctctcaccactcttattcaacatagtattggaagttctggctagggcaatcaggcaagagaaagaaatagagggttctcaaacaggaagagaggagtcaaattgtctctgtttgcagaggatatgatcctatatctagaaaaccccatcatctcagcccaaagacttcttaagctgataagcaacttcagcaaagtctcaggatacaaaatcaatgtgcaaaaaatcacaagcattcctatacactacgacagaaaggcagccaaattatgaatgaactcccattcatgactgctacaaaaagaataaaatatctaggaacacagctaacaaaggaagtgaaggacctcttcaaggagaactacaaaccattgctcaaaatcagagaggacacaaataaatggaaaaacattccatgctcatggataggaagaatcaatattgtgaaaatggtcatactgcccaaagtaatttatggattcaatgctattcccattaaactaccactgacattcttcacagaattagaaaaaaaaattattttaaaattcatatggaaccaaataagagcccaaatagccaagacaattctaagcaaaaagaacatagctggaggcatcacactaccttatttcaaactatactgcaagctatagtaaccaaaacagtatggtactggtagaagaacagacacatacaccaatggaacagaacagagaactcagaaataaggcccttacctacaatcatgtgatctttgacaaatttgacaaaaacaagtaatgggggaaggactccttatttaataaatttaataaatttaataaatgggactactgcctagccatatgcagatcatcgaaactggaccccttccttacaacatatacaaaatttaacccaagatggattaaagacttaaaggtaaaacccaaaactataaaaaccctagaagaaaatctagcaataccattcaggacataggcatgggcaaagatttcatgatgaaaatgccaaaagcaattgcaacaaaagcaaaaattgacaaatgtgatctaattaaacaaaagagcttctgcacagcaaaagaaactattgtcagagtgaactgataatctacaggagaaaatttttgcaatctatccatctgacaaaagtctaattatccagagtctacaaggaacttaaacaaatttacaagaaaaaacaagcaaccacattataaactgggcaaaggatatgaacagacacttctcaaaagaagacatacatgcagccaaaaaacatattgaaaaaaagctcaatatcactaatcattacagaaatgcaaatcaaaaccacaatgagataccatcttatgccagtcagaatgactattgttaaaaggtcaaaaaacaacagattctgacaaggttgcagagaaaaaggaatgcttttacactgttggtgggagtgtaaattagttcaaccactgtggaagacagtgtggtgattcctcaaagacgtagaggcagaaataccttttggcccagcaatcccattactgggtatatacccaaaggaatataaataattcttttataaagatacatgcccacatatgttcactgcagcactattcacaatacaatagtaaagacacaaaatcaacgtaaatgcccatcaatgatagactggataaggaaaaatgtggtatatatacaccatggaatactatgcagccataaaaagaaacaagattacgtcctttgcagggacatggatggagttggaggccattattctcagcaaactaatgcgggaacagaaaaacagacaccacatgttctgacttataagtgggagctgaatgatgagaacacatggacacataggggaggacaaaacacactggggcctgttggggtggtggggggagggagaacatcaggaagaatagctaatggatgctgggcttaatacctgggtgatggggtgatctgtgcagcaaaccaccatggcacacatttacatatataacaaacctgcacatcctacacatgcatccctgaacttaaaagttgaagaagaagaagaaaaaagtcttactaaggcaatacttccaatagaactttctgtaatcatggaagtattctgtatctgtgctgctcaatatggtagccactagcaacatatggcttgaacacttcaaatgtagccactgtgactgaggaactgaattttttaaaatttaattactattgatttaaacttaaatgtaaatagccatatgtagctagtggctaccatgttagacagcacagtactgaggttttaacgtctgaaaggtagagtatgagtagccaggtggtggtttttatgtctgattttacatactttaaaaaaaagggggggcaatgtggtaagtaatgtctactctcttgacctgatgagattctctcttctggggaacttaaatgtgagatttagactcacattgtacaaagaaaagtaatctatgttcaagggaccatttctggtctcttttttaaaggcaagatatggtcacagcagatacctaggagtttcaagaattcttctctatgaggaaggttcaacaacttactcttcattcaaggtctcaatagtcccaaattgtattaagcatagtactcattcaaaaatacttgtcatacttccaggactgtcactgtgtatactat

SEQ ID NO: 96463 - DNA, 57352 bp, Homo sapiens
  misc_feature (1)...(57352): n = A,T,C or G
gtatcaaaaagattttgtacagaagaatctttcctattaggtatgtaaaaatagaaatcatttatggaaacccagtatatgtcaggtactttgtacatattaccttagttaattttacagcaactctacgtatttttatcatcattttataagtaggaaatagttttaaaatgttaaatgtacttgcctcaggtccatatagctagagtggctttcaatctaccacaccacaaaacctatattctctgtattaccttccattgtcttgggttaaaaaaacaaaacaaaaatatttgagaagagagtgacagcaatgctaatatgtatatatatactgttttaccacactgagaacttgagactagaaaaggtgctaatatttggtcagaattatcctattttacatgaaatataaatattttatttagatttatatatgaaattaaatttgtcttcaagacatcaagaatagactgatctaaaaaagtgtaaagtaatccacctacttcccatactcactgctagtatcatccaagccaccatatctcatccagatttctataccagcttcctaacttatctccctgtatccattcttgccctgtttgaatccattcatctcaccacagccagggtggtcctttaataaaaataaatctgatgatgttactctcctgctcacaggttcaaaacccgtacaagaaataaaaagtcttctaggatttagcccttgccttttaaatagcagcctaatatgctatctaacctctctaaacttcagttttgtcatctctaaaatgaagagcatgtactaactcacaagattatccttatgataaataagaaaatttatgaaaaagccttaacttgatagataaaaaaagaaaaagccttagcatagtacctgggacatactataagctcaacaaacagtagaatattactacagtttgagtatcccttatccaaaatgtatcggaccagaagtgttttggagtttcaatttctcagattttagaatatttacattatacttgctggttgaacatccctaatcagaaaatctcaaatgctccaaagagcattttttgagtatcatgtcagcactcaaaaactattggattttggagcattttatatttggggtgctcaacttgtactattattatccttctccacgaacctactcatctgttttgaaggtcctttgctattcctagggtatgttagcccacattttctccactagtgccaaagaggccaggtaccagttactcatatcttaactaatgtaccctcttcttcagggaagctcagacgctacctggttcactcccctcttggcatttatctccaaagacatacatataaactcaggggttctatcttagagaatgcattatttgtacgatataggaaagaacatgtaggcctttatttcagaacttaagaaattaaaaatctacaaaatcttaaaattatctctataaatctacctcaaaattgaagcttttttttttttttaaataaactcagaacaaagtaaaaaagatgtgatagacttacttggtgcataccacatgggtgataacatctctatgcatgtaactgcgctcatacatggatgcactggggagattatcaagatagactctttcaaactctaagactgaagaaaaaaaagtaaagtataagatctatttttaacaaataaaccaaatactattttgtattttctttatttaaaattgtctacactctacttggtattttctcctggattttagtttttctcaattcacaattaaaaaatccagtatgttatctcagttttaacgtctattatttcagagcactgaatagcgtcattatttagtcagttacaacaggttcccaggtactatatacatgctaactgtccccaggacttaagaaatgagtgcttctggcttaatgtgaatgttctattaaaaaaaaagaaaagaaaaaagaaagaaaaaggaaaaaaaattaaaaagttccatgaaaatatcacaaccatcttcctaacattgtagacataatttagtgctaacttaaaagagtccagtggccatctgtaagatgtctcagttaatatttaaagcactgattctctttcaagttattgacactgtgtttgaaacatttaaacatggtaaaattcttagatttttacgcctgagaacatcctagggagtatccagttgaatgtatctcaaattttttccaacggcaaaacctggaaaaaatccacctgaaagagtagtaatctgaggaatgtcaggaaatactgatttattatatgaggtatgaacaattttactagcaaaaaaaaaaaaagaaagaaagggatggagagaatgagggagggaagtaaggaaggaaagaagggagggaaagaaagacgaagggagggagggagagaagaaggaagagaaagaagggaaggaaggagggaacgaggggaggggagaattatatgtatcccaaataaaataactgaacgatgaccaaacgtgcctaaaaaaagttgctaaattaaacatgacgagctgtttcaggcttgtgtctgataaactacttttcccttcatttttaggaacagaacccccatttatatatgggcatactgatgtccagatataacatgacctttctcactttcccctggagtgaggtttaaccatatgctaatgagtaaaagtggaaatgttttgtcacaggaagtcttgaaaaagtgtacccttcttcctttcctcaatcctatagcttggaactgggatataactgctgtaatcttaataatcattcagagaaatgaagatgagggctgtaccttagttatgttgggcagaaagctggagagagcctaggaacttctggagcctccacaccaatcctggactgcctgcctgtcttggtacttctacacataaaagtacagctctatctcttcaacatcgttattttgggtttttctgtagtatgtagataaacttaatcctatctgatccagattcctttttctgtgtgatagttcacttgtggacaaatacttattaagaacaaaatacgttctaggtcacatgggcataaagaagagtaaaacacagttcctgtcctgaagagatatagtgctatataatcatgtctttctgaaaatatatacaacagtccaatgtccaaagaacatgttaaagggggtgactccatttctagaaagctgaaattgttaaatacttgtccatttagacaaaattttaaatatttttgtaacattctatgtatgttttttagtttcaatttttttcttcaaactgaataaactattggcttttttttttttttttttgagacggagtcttgctctgttgcccatgctgaagtacagtggcacaatctcagctcactgcaacctctgcctcctgggttcaagtgattctcctgcctcagcctcctgaatagctgagattataggtgtgcgccaccacgcccggctaatttttttgtatttttagtagagactggcggggtttcaccatgttggtcaggctggtctagaactcctgacctgatgatctgcccgcctcagcctcccaaagtgccaggattacaggcatcagccaccacacccggccaactattggctgtcttaaaacaataaataactgattaagaggaaagattttcacacctactaatttatatctgtctccgttatattaagtttataagacacttgtccggtaacactaatatcagcatttcgatatttctggatttttacatttctccttactcgtttaattaaaaaagaacttgcaaaaatattcatatgcaacaaaatagctaaagaccagcataaaagctttaatatgcagtcattaaatacttaggcaaagcactgtacaccaagcaatgaaacaaaaaaggcgtgattctggttcttacttgtttacagtcttagcagtggagagaaacattcatcaatcacatgaataaatatataattagaaactgcggcaagtgccataaataaaatggttactatggaaacatttaataagaggaccaggaagtaaaaatgataatgcactgtaagggtgtcaatatacaacgttcaaaaaaacagcttcttcaaaatttggatacataaaatttgaaggctacctgtaaattcagtattgatatataactacctcagagttatgatcaaagtgcttcagaaatccagtccagactggagaagtcacaggcttcccagagaagatgatagctaagtgctaaaggttgaccaaaagtcagttcagtggaagagttgagggaaattattcccggtagaaacaccatatctgggtaggaatccagaggaaaaaaaagtacaagaccgattctcgagtgattttagaatgggtggagtacaaagtaaggggttgggagaggaaggtaatggaagatgcactaagaaggtaaggagagatcacatcataaagggctttatatgccatgtgagggagtttgggctttaatgaaaataatgagctgggcgccgtggctcatgcctgtaatcccagcacttttgagaggccgaggcaggcagattacgaggtcaagaaatcaagaccatcctggccaacatggtgaaaccccgtccctactaaaaatacaaaaattagctgggcgtgcgcctgtagccccagctactcgggaggctgaggcaggagaatcgcttgaaccccggagacggaggttgcggtgagccgagatagcgccactgcatgcgctccagcctgggcgacagagcgagactccgtctcaaaaaaaaaaaaaaaagagagagaaaataatgacaaatcattgaagttttttaagggaaagtgctaaagtacgatttgagcttagaccacatttaaaatgtcttaaatacttaaggaaaacatttcacagaaaaacaagataacaaaacaacaaagacaagaaaacttaatctaccccttttcccaccccttttatttgataataatttgtgattattcctcgttagtgacaaaatgcctcagcccatcgtatcaagagcgtgatttcaaaaccagacttcgggttttggatgaaaacaaatctgtgatctaggaagcttacgtcattttccctagatgcgaaaatttattagtggaagtgtcagagttgaaattatctttacctaccatgattcgaaataagcaccgccttcctctcgcgccccaacacattaatacattaacaccactcctgaactaaagccttaaagagaactggtacccttttgcatacctaaataagagttcgaaattccaacttcatgtggctgctgtggggagtaaatgagaggagccaaacacataagaataggaaaatgttagttttagcatctgtcataacaaatcaatgatcaaaagtgttagatattatcaaaaagacgttgtactacgcttaaatcactatttcgttaagacatgcaagtatggagtagccagaagtgagaggacggccctctgttctgagggcacaaaactccacacatcatccctcttcggatctggcttgaaccctcctactcagcggacgcagcactccaattcgtcccggtactatgtctgcagctacctttcctcttcttggccagtgttgcctccacaggtaaaggtccaacccagcgctcttcgttctcctcatcgttctcctgggacaccgccactgctactgccagctctctttcgctgagttctgttttttccggttcctccgggtcccggcgccttctacgtctctgctgaaaatcgctaccactttccgccgccatgttgttcgcatcgtcagaaaaggcgcgacacaaaactcagctaccaatcccaaagcagcggcgcagtcttctgtcagcgtccgagcgagtttcgggattggctggggtggcaatgagcacatccaatgggcatgcagcgcgcgcagaagtccggggctggcaagcgcttcctgcgcagcgcckaggcgacctggagtytgtgacgctgtgatggtaagacctgggccggggaggttratataacggttkaatcttgtggagctccagtcctgaaggtgaaacccttatcgccggccaactagatacctgacttcccagccgggytttgagtcccgttcttctcggcttcccgcgcgccaacgcaagctccataacctcaccaatatttagagaaagatggaagggtggggacagaaggaagtggttaactcgcgggtttcctttcagatgsactaaacatgttttctctcctgacctttattctctcacacactctctgaagaaggtggtgagtgcttgttactgtttctgggggtggggtggagaagcagctacttcaaataaccaaaagacctagggcagaacgggtcactcttctttcttctctctggtataggatttcatctcctagcagtcatctgaactctttctcctcctcctcatctgtcttcttcatttttaaaaaattaggtaaaaagcacataacataaaatgtattatcttaatctcttttttaaaaaatcaaatacagcttgtcaaaatgacctccgtaaaacacttcttttttctctgcaattacttttgcaccaacctaataaaatcctcgtcgtaaatctcttctctacttttgccttgagataggcaccacgtacagggaaggaactgcccccccatagtaggcactttattttatttcaaaggttcccattatttgaccattctacctagcaagtctcatttcttctctgccctctgctctcatcagactactttcttttgtgtctcacaaatttcccttgttcgttcttgcctcctactcttatgtttttatgcttgaaagcatctccacagcgatttagccttcatgtttacagcttctcatctttcagagaccaatgcaataatgaggatgaagatgataatgataatgataataataatgtagctagttaacatttattaagcattattatggactaattccttccgggttggtttttctaagcttccctatcctgaattccgatagtacttgcaggcagtgttgtatactttaccatttcatagcacttctgactacctgaaatcatatcatgtatttagttatccattcatttatattgtctgcatgagaatggaagctctacaagtacaaagactttttcatctacacagctaaagccagtgtctgaccaatggcacacattaacatatttgttgaataaatgaatgtattttagaattatgtgggtattttttgcttatttcatgtatattaatcttttcccaattaatagtacgagtttcttttagtattatccctaaataaagagatactgtttttcttcaataaatgattaagtattgtagtcctaactggggacctcaaaaagttgacttgttccctttccaggaagataggtttaaggatacaaaatgtgggaacgggaaaagttcaactcttaagtgtgtgtgtgtgtgtgttttaattaaacaactgaaatttatttctcacaggtctagaggctggagattcaagatctgggtgccatcattttctggttctgttgatgaccctcttccaggttacatacagcttacatcttgcatcctcaagcggtagagagcaaactcttaaatgtttctatatgtttttattctactgccacattaaatcgccaagccagataatttgttgaatatttatccctcaccctccgcccccaccacatgtgcagagttttgcattacttttgcatattgataatgtattttggtggtcagtaaagaaatatttatgtttgactttttcgcttaaaaatattctaaaattcatgatgactgaytttggctttgtgaacttaaactgtatcttatgggtatagcaggtgagattttcagccttctactagttgacattcaaattgttaatagctaacactgataaagctctttatatgctagctacagtacttatatatatatatttatatactcatttaattgtcataaccctagggagtatttaatattatcttcattttataggaaaggaaactgaggcatagaaagtttaagtgacttgcccaagtctcatagcttttaaatatcaaaacagatttaaacctgtatagtctggttgcagagttcatacctttaaagtttttttttctctaagtaatgtgccagtaaacataattgtatagacttatgcagacatatctatctttaggattattcctaagaatagaacttctggatcacaagaaatgcatgtaaaattttgatggatattatcatacaaagtgattgttccaccaacagtgcaagcctcttatttcacatgcttgccagtattatctcttaccaattttacattattgccattctgaatgaaaattaatgcttgtttaattyggattttcataaattatatatgagcttatgaatgtactttttctgtatttaaaaggtatttgttttttctttgaattcctcatttgtgttctttgccagtttctattgaattgtttttgttgtttacctttttattgtaaaaatgcagacacaaaataaacgtaaagtttactaattattatgaggtgaacacccttaccatcatgctagtcaaaaaataaaactttgataattacctcagaaatctctccatttggcccatcccagccacaacccttttcccccttycactcttcctccaaagtaattggtaacctgacttttttggtaatcttttttaaattttttttaatggtgagttgtttggtttcttcttatgaatttgtaggcacttgttatatattaaggaaattaggtcttgggttgccatatatattacaagtatttctcctaggtttgggggttttaaattttaactttgttgatgagatgtttgtccatgcagaattaaaaaamaaattttggtgtaaagattttacttagttttgcttagaaaggtgtttcctaatctaagattttaaaagtttctgtgttttcatcctatttttttgtgatttctattttgggttttttgagggagtgaggaatgacataaagattcaggtatgaatttagacttatttttttctccgcaaatactataaatgttaaaaaaaaatgaggaagatttatatggaccmaaatatacatttaaaaaacagtattatatwtaaaatatrtatctatttggattatttttttctccttgatttgccttgtcatctctgtcatgtgtcatgtgtccatatgtatgtgaatatagaaagtcaagaaaggctttgtattgtgttccattgctcaatttgcctatttatgtgccagttctacattgccataatagtgtagggtatgtcctcccatcttatttttcatgaggatcttaggctagttttggccctttgtgcttccatgtaaattttttttttttttttttttgagacggagtctcgctctgtcgcccaggctggagtgcagtggcgggatctcggctcactgcaagctccgcctcccgggttcacgccattctcctgcctcagcctcccaagtagctgggactacaggcgcccgccactacgcccggctaattttttgtatttttagtagagacggggtttcaccsttttagccgggatggtctcgatctcctgacctcgtgatccgcccgcctcggcctcccaaagtgctgggattacaggcgtgagccaccgcgcccggcccttccatgtaaattttacaatttgcttgtcaagtcccataaagagaaacaaaaactttcaggattttggttaagattcagtagctcaacttgggggagaattaacgtctttacaatgtgggtctttcagtccatgaatatgaagtatctttccatttatttaggtctgccttagaacttctctgttaataagttattgattaagcagtataaaatgcagaakttccatatgaataaagatattgaggaggggtattctgatttgcgtttgatgtggggtagacatcctcatcattctttattgcactgtctacctccttaaaattgcccagttttgaatcttatgccaccagactctaatcctcttccattctttgcaggaatcatctagcaagattgttttactcaccctcattccttgaagatttttagctcctggctcattgccctttgcagtactrmtatcataattcttagtgattttaatatccttatagatgatccaataacttggcctctctttttcttgaccttctttcccctagtgattaygttctctcttgtcttagctacttattcctatggccattctttcactttgtccctgtctgtacctgtggtgctacaccatagaagaaaacatacaaccatgctctggttttactttaaactcatgatactaatctcaggtgagcctgtaatgctactactgaataatcctgtaactttatcctctcccatttttttatatatctgttttatacatctcttttcctgtgctcttaaactcgcagtactttcttcccatcctttcatagctgataaccgtagttaccattttacggagaaaagagaaacaatccacatagaatttctacaagttcctagcaacacgtctacttacctacctgcatctacactcttgatattctgatgaccctcccattaaaatggatgaactgcatgtccatttatcttaagccaacacctctacttatgtactagatcccattctttcttctcccctttctctcttgtattagcaacatttccttcttttactgtaccgtataaagatgctatattttctcccatctttaaaaaagaaaaagtctcttttaaccctatatctccctccagctactaactgtatttctctcttgtgctttaaagaaaaaaaaatgtgtgtgtgtgtgttttctttttgtttgttttgtttgtttgtttttggtatggtcttaacggtcttgctttgtcacccagggtggagtgcagttgtgtgattgtggctcactgcagcctcagtctcctgggttcaccgggctcaagtgatcctctcacctcagctcctgaataccttggaatacaggcatgtgctgccatgcctggctagagaaaacgttcttgaaaacgtttcatatacttaatatttttaattccttgccttccattctttcttgaatccactccaatcagatttttattcttgccattcttctaaaactactcctatgaaggttatctgtggccttcatttttgtatgtttactccaagaaaattgttgtgataaattaccccagaatgtagaggtgtaaaacaactatttattacgctcatgagttttgtgcattagaaattcagacaagacacagcaggagcagcttctctgttccacagtatctggagccttggctagaagatcaaagcctaggggcttaattgtcagaaatgatcgtgtgtatgtctgggagttgataccagcgtttgtctgggaacctcagttcctttcctcatggactttatgttgatctcttccttttgtgctactttgggctttcgcataacatggtgcctgggttgcaagggtgagtgttccaagacacagaaagccagaagttagctatattgccttttatgacttagtcttgaaagtcatgtggtgtcattttcattgtattctctttataaagacagccacaaagtcacactcagtttcagggggagaggaaaaagactctgtctcttgatggggaatgatgaaatattgctgtgagtatttttagaaaaaacagtttgctcctctatattactaaataaattgtcaattctctgtaatttacttgacctgtctccagtgtttgacagttatcattccttccttgaatacattcttggatttcrgggtatcatgctcttgattttcctcttaacttactgagtgctccttctcagactattcagttggttcttacctcaatagctcctggcctgaagatcttctcatttctagctgcacactcttccttttcttatttcacctatcctcacaactgtaagtacagtcatgtgtcacttaacaacggggatatgtgttgagaaatgcattgttagatgatttcatcatgtgagcacaaacctagatggtataacctactacatacctaggctgaataccgtaggtaattgtaacagaatggtatttttgtatttaaacatttctaaacatagaaacggtacagtaaaaaaaatggtatgaaagacaaaaagtggaacacctgtctagggcttttaccatgaatgtagcttataggactagaagttgctctagatgagtcagtgagttgtgagaagatatgaaggcctaggacattactgtaccctactgtagactttgtaaatactgtacacttaggctatactaaatttatttttttaattattcaataataaattaaccttagcttgctgtaagttttttgctttatctttttaattttttaacatatcaactctttcataaaaacagcttaaaacataaacatgttgtataactgtgcaacaatattttctttctttttttattttctaatttagagacagagtttgtctctgtcacccaggctgaaatgcagtggtgtgatcatagcttactataaccttgaactcctggactcaagygatcttcctgcccctgcctcctgagcagctygggctacaggactgggccacctcacccagctaatttttaaaatttttttatagagataggggtcttactttgttgccaggctgttctggaactcctgaactcaagtgatcctacgaccttggcctcccaaagtgttgtgattacaggtgtgagtcactgcacctggcatattttatgtctttttttctagctaatttatttatttttattttttacttttttaatttctttgttaagaacgaagacacaaacacattagcctaggcctaaggcaaggtcaggatcatcaagacatcagtaggcaataggaatttttcagctccattggaaccactgttatatgtgcagtctgtgattgaccaaaatgtcattatgtagtgtgtaagtcttatctgtgtgatgatggctgtcaaattcatattgctagctcaaaactttgctttcaactkcagacatgtatatctaattgcttaatcagcagctccaataattgacacctcaaatgtagcatatcctaaacwgagtttttaatcagcacttctcccatgtttgccaaatctgtttcttttaccatctttctcacctcagtaactggcaacgtaataattcacttctctctgacagtccatatacatgctgttaagaaattctgttggctccatcttgaaaatatatccagaatgggacattctgtgctgcttctatcaatattatcctggtctacatcttgcttgggtcattgcagtagctttctaattggttttcctgcttctrtccttactgcctgtagttaaccagagttgtattgttaaaatgtaattcaaatgattcattcctctgtttaaaactaattgcttatcatctcaaagtccttaaaatagcctaccaaacccacatgatctcatccctattgtctctctgacctcatattctactctgtcttacttaatctgctgtaatcacaccagctccttcactactgtggaaacatggcagtcatattcctgcatcaaggcctttgcacttgcagttccctctgyctgaaccctctgcccctcttcatccttgacctcatttctttatcttcttcatgtcttcttactcagttgtcaatttctcagtaaccttatatgaccaccttatttaaaattatattgtccttgccctagcatttcctatgtttcttccttgtcttttctccatggcacttataaatcatttgatatactacagtatatatatgttttattttttattttattgtctgttttccttacttagaataaggttcacggtaggagggatttttgtctattttgttcattgctatattcttaccccctagatgagtatctggcaggtaataagtgttcaaccaatactgctgaatgaataaatattttttgctttagtttttcttataaggctaaaaattcacaaagcatatatcaatgaatcaggaggatctagatccggatagtactacagatgtgggagatgttacaaatactgaagaagaacttattagagaatgtgaagaaatgtggaaagatatggaagaagtaagtttcaaaagatagaagtgatagttaatataagatttaaatcaacttcaataataaatagactcaggaaagaaatgattgtgctagtttccaaaagccattatgtatgataaatatttatatagcttttagacctatcagcattcattcaagaaactttacactagatgagctatagaaagaaaaattttgacaatccatgctcccaaggagattacaatcttatggaaacaacagccattatattatgttgtaatacaatattagatgtattgtagaagtacaaagactatacttagcaggagtgctaaacccggtgaaggggtcaaggatagctttctgaaagaggtaattactgggccacgcctgtaatcccagcattttgggaggccgaggctgggsgatcatgaggtcaagagattgagaccatcctggccracatggtgaaaccccatctctactaaaaatacacaaattagctgggcayggtggtgtgcacctttagtctcagctactcgggtggctaagacaggctgagacaggagaattgcttgaacccaggaggcggatgttgcagtgagccgagatagtgccactgcactccagcctggtgacagcagagtgagactccgtctcaaaaaaaaaaaaaaataattactggtttcatttctaaaggataattaggagttagcctgtaaaagtagaagaggtatacaaagcataaagaagaaaatgtgtaaaaacagagagttgacagaacattaaatagaatgttatggataatgtaaattaggagaaggacttctggggtaagactggagaagtaatcagggaccagaacataaaggattttgttgagtgtgtactatggggagccattaaaagattttaagtatggaagtgacatgatcagatatgcrgtttgggaaaattactctggtgtttttgaagaaaatagaatgcagaagagtaagactacagatagaaagcatttaggaagctctagtaatagtcctggtaaaaagtaaggaagccctaagtattgccactgcaaatagaagagtggattcaaagataagtaggtaggattagaagttaatttatgtgcaatgggagggaaatatggttagtttcaggttcctggtttgggccgttgggtggttgatgggattatttccccaaatagagaatatagaagtgggaagaacacataattatgagtgaaaacattaattaatttagaaaatgttgtttgaaatatatgtactttttctaagttggtgagatagaactgcctttggtacactagagtatgttggtgaaaatttgttctacttaaggcaagcttgtccaanctgcggcccaggatggctttgaatgcagcccgacacaaactttcttaaagcattatggatttcgatttcttttttttttttggctgatcagctattgttaatgtattttatgtgtggcccaagataattcttcttcttccagtgtagttcagggaagccaaaagatagggcacagatatttttagcatcctattcttcccagtaaagtttcagaactggtcaaattagtgaggtttttctcttttcttacaattatttttaacataaatacttggtactttatattattaatgtattttcaggataatttttataatccccccacctttttattttttgcttcaggtattttttcagtatagaagtttggattttaaaatgacttaaaatttgtatagagaaatgctgcattacaaatgagcagaaatagaatttactcgtatttttatctcatataatcatcatgaacagttttggacttttttaatggcacagaaacaatgtctcctgaaggctttatttattttcttaggatttcttaggatctgaactatcttcttacttgttatttttctatagtgctttccctcttatttttttatctcccactttccaattatctgacttataattcattctagctattagtttttgggtttttttttttcctcttcattctagtgtctctttttacttgtgatgtattcaccttgggacttgtttggctgccttaatcgtcttacatagtgaggaatttcaataaactcttctccatcagatgtttgtgctttagaagagtgttatattggcctggtagaaaaggrgaggggaagggaattttctgtgaattatcrtgtgtgacttgcctttttttactttttaaatcaagtgtcagaataaattatcacttattggaactgaaacactcaccgattcaaatgctcaggtatgaatctttttcttcctaaaaaatacaaggtaagtggaattaattgtattttggaaaataaatatgtgtgtctgtatttttctcaagtttaatacctttgttaatacctgtatgcttaatcatttggaaaacttcttactcttcctgctttaagaattgaaagaatattctaaaaactttctagaacaagctattataaataagagagtattttctttattatttgtcttttagcaactatacatatatttaacaactgagtaaattgcttgttagttgctattacgctgccttgttaaaattagaacaaagaccagcctggcctacatggcaaaaccccgtcgctaccaaagtacaaaaaaattagctggtcttggtgatgtggtcatatgatcccagctactcaggaggctgaggcgtgagaatcacttgaacccagtagatggaggccgcagtgagctgagattgtgccattatactccagcctgggcgaaagagtaagactgtctcaaaaaaaaaaaaaaaaaaatagaacaaaggcggctaactttgtgttaggtataatagtcacagatattttactatctgtgtcgaatctgaattgattttactcttggcctaaaaaaaggactgacaytcattataataatcagaattatggaattgctgtaggaatagatcagtggatcagtgaaacagattaagaattaaaataaagttgcctctggwgcagcgtgagagttagggatgccacccccctgcaaagttttaaartattaagaatgtttatattttcatctatgaataggtatgaatagtccacagaaaatgactttgttttcttcttttgtagctatcattgttaattatgcaagtaaaatgtttaaccgctgaactcagtcaatggcagaaaaaaacacctgaaagtaagattcttattttaaatttgaattttttgtaaacctattaatagcaaattaayttaataattgtaggaaaaattacaagatccatttggcctttttgaaattgcccaaatttcattgataccgagaagccactttttttctgtgaattattttgtacttcttttattattattgataaacatatcttacattagattataataagcttgattatggagacgttattatagctattatgttatcctcatagacactgccttatgctcgctagaaatggtaaattgttcctttttttttttttttttttttttgagacagggtctcatcgtgttgtccaggctggagtacagtggcacaatcatggctcattgcagccccgatctcccgggttcaagtgatcctcctacctcagcctcctgagtagctaggactacaagtgtgtgccaccatgcttggttagtggttggtttttgtatttttttgtagagacggggtttcaccatgttacccaggctggtcttgaactcctgggctcaagggatcctcctgccttggcctctcaaagtgcctggattactggcgtgccagtgatttgtttcttaatgaatgcaatttacctagtggaagagaaaagttataatttattttagatacttacacaaaagggacacatagtttgtatgtcttctgtcttgtccagctggtgccaactatgtttttgtcttcagttaggaagtagaagacagcataaaaatttataattgtgatactccactagtacatcttttttttttaaatgtgagagcttaagtttctctatgcaatatacatctatacaggcacatctcattttattgtgcttcactttattgcactttgcagacactctatgtttaacaaattcagtttgtggcgagcctgtgtcacattttggtaatctcacagtattttagacttttaagtcattattacatctggttgggggatctgtgatcagtggtctttgatcttactattttaattgttttgaggaaccacaagctgcacctgtgtaagacagtaaatttaaccaataaatgttgtgtgtattctgactgctctgctgaccagttgttcccccatctctctccctctccttggccctccctttttcttaaaacacaagaatattgaatttaggccaattaataaccctccaattgtttctaagtttttaagtgaaaagaagagttgcacatcgataactttaaattaaaagctagaaatgattaagtttcatgaggaaggcatgtcagaagccaagataggccaaaagctaggcctccggcaccagttagccaagttgtgaatggaaaggaaaatttttttttttttttttaagatggagtcttgctctgttgcactgccctcaggctggagtgcagtggtgtgatctcggctcagtgcagtctctgcctcctgggttcaagtgattctcctatgtcagcatcccaagtagctggggttgcaggtgcatgctaccacacccagctaatttttgtatttttttattagagacaggtttcaccatgttggccaggatggtcttgatctcctaacctcgtggtccacctgcttcagtctcccaaagtgcaggaaaaatttttaaaggaaattaaaggtgttgctctagtgaacacacaaattatgagaaaacagaatagccttattgctgttatagagaaagttttactagtctacttagatgatcaaaccagccatcattccctaagccaaagcgtaatccacaacaaagccctagctcttttcaattctacaaaggctgagagagatgaggaagctgcagaagaaaagtgtgaagctagcagaggttggttcatgaggtttaaggaaagaagccatctccataacataaaaatgcaaggggaagcagcaagtactgaggcagaagcgtcaacaagttatccagaagatctagctaagatacttgaaggtggctatgataaacagcaaattttcaatgtagacagaacagccctctattggaagaagatgccatctaggactcttatagttagagagaagttgatgcctggctccaaagcttcaaaaggacaggttgactctcttgataaggactagtgcagctggtgactctgagttaaaaccaacactcatttatcattccagcaatcctagggcccttaagaattataccaaatctactctgcctgtgcattgtaaatggaacagtaaagcctggatgacagtacacctgtttatagcatggtttactgaatagtttaagcccactgttgagacctaccactcaggaaaaaaaaaaagattcctttcaaaatattactgctccccatctcttcactcaacagctctgatggtgatgtacaaggaatttaatgttctcatgtctgttgatgcaacatctgttctgccgcccagggaccaagaagccacctcaactgaagtcttattatttaagaaatacacttcgtaaggctatagctgtcataagtcctctgatggtctgggccaaagtacattgaaaccttctggaaagtatcccccattctagatgccattaagaacatgtgtgatttatggaaggaggtcaaaataacaacattaacaggagtgtgcaagaggttggttctaaccctcatggatgactctgaggggttcaagtaactacaaatgtggtagaagtatctaactagaattagaagtggagtctgaaaatgtggctgaatgactgcaatctcatgataaaacttgaacagatgaggagttgcttcccatggatgagcaaaaaagtggtttcttgagatggaatctactcccagtgaagatgctttgaacacggttgaaatgacaacaaaagatttagaatattacataaactttgttggtaaggcagcgtcagggtttgagaggagtgactaattttgaaagaagttctgctgtgggtaaaatgctatcaaacagcatctcatgccaccgagaaatgtttttgtgaaacgaagagtcaatcggtgtggcaaacttcattgctgtcttattttaagaaacggccacagccaccccaaccttcagtagccactaacctgatcagtcatcagccattaacactgagataaggccttccaccagcaaaacattacaactcaccgaaggctcagattaggcatctcagttagcaatttttagcaataaggttttttttaaaataaggtatgtacatttttagaaataatgctaatacataatttaatagactacagtataatgtaaacaacttttatatgcactgggaaaacaaaaaatttgtgtgacttgttttgttgtgatatttgctttagtgtggtggtctagaaccaaacttggactatctccaaagtatccctgcatatgatattctatttggattgtaccctctttttctgtatgtcttcctgcttctttcttctcccactctgttttctttcctttaattgttctccaccccatgcttcccttcttagtcttctttgtaggcttatcatttctctttcccaattattgaaattccccaggctgggcgctgtggctcatgcctgtaatcccagcactttgggagactgaggcgggtggatcatgaggtcaggagatcgagaccatcctggctaacacggtgaaaccccatctctactaaaaatataaaaaatttgccaggtgttgtggtgggcgcctgcagtcccagctacttgggatgctgaggcaggagaatggcatgaaccaaggaggcagggcttgctgtgagccgagatcatgccactgcactcctgcctgggcaacagggcgagactccatttcaaaaaaaaaaagaaattccccaaggagcaatcttcagctgttttctcctcattctcttcctatacaattttatctatattcttgctttaatgactgtcttcatgccaatgtcagccatttttccacatcgttgttactacctgttagtcattaatttgagcatttctaataggtgtgtagtattacaattgtgattttaatttgtcttcaaccgtatgtcttattgcctttttagtagtatatttagcatctcaaaaactgctcatactcaaaattttttttttttttttttttgagacagtcttactctgtcgcccaggctggagtgcagtggtgcaatctcggctcactgcaagctctgtcttccaggttcaagcagttcttgtgcctcagtctcccgagtagctgggattacaggtgcctgccatcatgcctggctaatttttgtatttgtagtagagacggggttttgccatgttggccaggttgatctcaaactcttgacctcaggtgatcctcctgcgtcagcctcccaaagttttgggattacaggtatgagccaccacgcccagcctcaaatattaaaatgttcaagttctccagaggaccctataagctataccagcattatatcttcttctcctgtttttatgtgttatatctgtaataataacttccatatgttcrtattctccagaggacactatatactataccagcattatatcttcttctgtttttatgtgttatatctataataataacttccatattagtatactagagctatcataacaaactactatggactaggtggcttaaacaacagaaattaattttctcacaattctggaagatacaagttaaagatcaaggtgtcaataacgttggtttcttctgaggcctctccccttggcttgcagatgtccatcttcttcctgtgtcttcacatggtcttccttctgtgtcctaatcgcctactcttattaggacaccagtcttattggattagggtcaactctaataacctaattttaacttaattatctcttgaaatacccaattccaaatacagtcatattcaaaggtattggggattaggatttcaacataggaatttgggggtggggacacatcaaccaataacaatttacaaatctatatatttaaagcagacttctctgcaatatcaaactcaagtatctttgtacctcctaggcaccttttccaaaatatttcatagacacctcagattcatgaactgaccttttctgtttcctcactcattgaatggagcatatttgatcagctcccaatttaagagtcctcctagattcttcctttttcattttgcacatayagcatatttgttaaaattagaacagccgggtgtggtggctcacgtctgtaatcccagcactttgggaggccagggctggtggatcacctgaggggggggcmggggagaatagaacaaaaacattagaactagaacatataactagttactaaatatcgagtcctactgtcacagatttacttcgggttttcatcaccagtccattagattattataacakactttttaatctcttggcctcaatgggtttcccccaccctggcaatgatagaagttttcaaacttaaagaaaagttaaaaaatacatatatagagagttaactgtagtaaactcagagaccagattctacagttatcaacattttctcaatcttgttttaggcttttttggagtggctttatataacatacatttattatctcacaatttctgtagttcaggggtctgaggacatttattatttcccagtttctgcagataggagtctggacacagcttaactgggtcctctgcttagggatttcatggctgcaatgatagattctcctcaaaggcttgaggagggatccatctccaagcttactgaagttgttggcagaatttatttccttgtgactgtaggatttatggtagctttagtccatgtttttgttctttctattgttcttccttcctgatcttctaaaattccttttattgtttctgtttcaagaacttccttgagccgttcttttagagttggtctgctggtgacaaattgtcgtagtttttctttatctgagaatttcttgatttctctttcattcctgaaggatattttcactggatgtgcaattcagggttgttttcttttagcacttaaaaatgtgccacttacctctgcctcccttggtactgatgagaaatgtgctgtcattctgatcggttttgctttatagagaaggcgtgtgtgtgtgtgtgtgtgtgtgtgtgtgtgtgtgtgcgctttgaggactttttctttgtcttcagcctttagaagaataattatgttgtaccttaacctggatttctttggctttatcttacttaggagtcactcagattcctgaatgtgtggatttatgtcttttgcagaatttgagaactttttagctatcatttgatgtattttttcagcaactccccccacctttctcctttcctggaattccgataacatgaatgttagaccttttgttacggttacccaagtccctcaggttttgtttagtttaaagaaaattttttaattgtggtaaaatataaaatttacaattttaaccatttttaagtgtatagttcacagtagtgttaagtacattcacatttttatgcagtgtatcttcagaactttttcatcttgcaaatctgaaactctatacacattaaacaacaactctccttttccatcatcccccagccctggcaacctcaattctactttctattaatttgattagtttagatacctcatataatggaatcatatagtatttgtgtttttgtgggtggcttattttagttagtgtaatgtcctcaaagttcttccatgttgtagcacgttagaatttccttccttttttaaggctgaatagtatttcattgtatgtatataccacagtttgcttatccattcatctgtcaacggaaacttcggttgcttcataatttcattactgtgaatgtgagtgctgcyatgaacatggatgtgcagttctctttgaggccctgcgttcaattcttttggatgtctaccagaaatagtggatcatatgatagttctattttaagttttttgaggaaccacctatactattttccataatggtcrcaccatatttcaatcccaccgacagtgcacatggtttcagtttctcaacatccttgttaacacttgttactttctgtttttttgatagtagctgtctgctgtggcctaaatatatcccccaaaattcatgttaaaacttaatcaccattatgatagtgttaaaaagtgaggtctttaggatgtgattagtgagcttcttatagaggttgaaggtagtatctagtctttttttccccttttgccttccactatgtgaggacacagcaagaagacaccatcttggaagcagagagcaaacccttccaaggcactgaatattctaatacaaacctatctatgaagcacatgtagaaagttcttccctgttagaaggctttctagaatagcagatacctttgaaagttttcagtagcctactatttgagaagtttcaaatagctcttcattagtaaaggaaaatttctagcataaggattgaacgcattaaaatttgctatacaaaattacacatttgtttctactcatcaggctggcaaaaattttagaagagtttgtaatatttcttgctgttttttcttcatagctcatggaaatgtctttagaaaggaagctgacattctctattcagattcaaagtacacatttcattctctgaaatttcatttctgagaatctgttctatagaaatgagagcaccagtacataaaaacgtgtataaaagtctgcttactgcatccttgtttgttatgactagaaactagacacaaagttaatctaaaagtgttcaatcaagagggcaatcactcagtatattatggtatattcattttggaatatcatgcagccattaaaagttatgaattagacctatataggtctaggtttccctgggggttttattgagtgaaagtaagatgaatataatatgtrtgatatgaccccattcttgtaaaaccaatgatgataaaaataacccttttaagtgtatgtaaatgtatgttacatatgtgtacataggatatatgactacagggaaagtatttgaggaacacactatagattattagcttcccttttgagggtttgaagaacaaaagaagaaaagaaaaaggcactaaacagtacataaataggatcaaatttatctaaaattatatatagttggctatatgtgcaaagatgttaaaaataaataaaatgaaaactgcacacatttcataaaaagttgtgtattgtcaaggcaggtggatcacttgaggtcaggagttcaagactggcttggccaacatgatgaaatcccatctctactaaaaacacaaaaattagccaggcatgttggtggatgcctgtaatcccagctactcaggaggctgaagcacgagaattgtttgaaccagggaggtggaggttgcagtgagccaaatagcgccattgcactgcagcctgggtgacaagagggaaactctgccttggaggggagaaaaagttgtatattatataaatggagatggaaagaagtatcttagaaaaccgcaaaattaaattcttgatttttgagaattaactaaatatatgtgtaactttgttttgttttgtttttgtagcaattcccttgactgaagacgttctcataacattaggaaaagaagaggtaagccactcaatgaatttgtagtgaccccaaataatttctaactagatctattttagataagttcatggcataagaaataggataaaaccactctaaaaccatattaaattttctgcttttatttatgttttattgaacataatatttgattttttttttttggaaacggagtctcgctctgttgcccagtctggaatgcagtggcacaatcctggctcactgtaacctctgcctcccagggtcaggtgagtctcctgcctcagcctcccgagtagctaggattacaggcatgcaccaccatgcccggctaatttttgtatttttagtagagacgggatttcagtatgctagccaggctggtcttgaactcctgacttcgtgatctgcccgcctcagtctcccaaagtgctgggattacaggcgtaagccaccacacctggcctaaagatttgaattttgaactcggtttttgcatcagaactattactgaagttagtggttatatgtaaaccttaatctcatatctagtttttagttaaacttcacaataaaagcaaaatattaaacatcgcttaatgaccccatacatacatctctccttctgctgtggactaaatatttgtgtctcccaaaatccatacgttgaaatctattccccagtgtgatgatattaggaggtgagacctttgggaggtgattaggtgctgagtgtagggccttcataaatgaaattaatgcccttataaaygtctgaagagaccagtgtcctccccttccatcttgtgaggacacaactagaaggtactgtctgtgaagaggtgagccctcagtagacattgaatcttggacttcctagctgccagaattgtgagaaataaatttttataagatctccagtctgtagtattttgttataggagactgaatggactatgacagaaagttggcactgagaagtggaggtggtactatataacaaataccaaaaaattctgaagcacctttgaaactgggtgatcagtagtagaaggaagaattttgaaatgagtgcaaaggcctacattgctgtgagcagacctttaaaggcgattctggtgggaactgaggttataagagagctgtagagaaagcctcagttttcttagataataccagaatagtcctgaaaagaatgttggtagaaatatgcacagtattggccattttgataggtctcacctggaaagaaagaacatgtgtctaaggatagagaggaaaaaaacaaagtgtttttcctagtctccgtcaccactcaatacaacgtagcacctctggttaccaaaatgtgtggggaattctcaccagcaaccaattctttggcagattctgcagatgatgattctctcctacaaaccagttgggtgtcctcttaattcacttcagttctgacataatctacttggaggtaacatcagatcccacaggttgagcgctcagtcccacatgcctgaccccggtttcagataccagttgccagtaatrgattgtcgcctgtattctgactggctataaatcaggggtttccatgatcccctcctcctcaggtttaattaatttgccagagcagctcacagaactgagagataaacttactttcatttactcaggtgtcataagagatattacaaaggatacatggctgggcatggtggctcacacctgtaatcccagcactttgggaatctgaagaggatggatcacttgagcctaagtgttcaagaccagcctgggcaatatggcaaaagcctgtccctacaaaaaaaataaaaaatcttctgtgtgtggtggtgtgtgtgtgatggtgtgtgcctgtagtcccagatacttggaaggctgaggtgggaggattgcttgagcctgggaggttgaggctgcagtgagccatgatcgcgtcactgccttccagcctgggcagcagagtgaaaccctgtctcaaaaaaaaaaaaaaaaaggatacagttgaacagccaaatggaaaagatgtgtagggcaagtcatggtggaagggacatggagtttccatgccatctctggacatggtactctccagaaacttgcctgtgttcagctatctagaagctccccaaacccagttcttttggggttttatggaagcttcattatgtaggtacgattgattaagtcatttgccattgatgaccagcttaactctcagttcttctcccttcccagagttttcaggggtggtgctgaaagtcctaatgttctagtcaggttttggtctttttttatgaccagcccccatcctgatgttactgaggggctcccagccatcagtcaactcatgcatatgaaaagataccacaatarggataaagaccaaatatatattttacaatatcacaatgttattgcacagtggagtaaatatcattcttattataaagaggcagagagctgaattgcattcctgccctagtgttttgtgaaagatagaacttataggaatgaagttgaatctttgaggaaatatttaagaaaagtattgaaggtatggcttggcttctcttgactgtatagtaaaatgtgggaagttaaaaatgacttaaattgctaataaaaaatgaagctgaatttaaatgtttgaaaaattgtcagcctatccctactgtaaagaatgagaaaggctgtttgggaaagaacttaaagggtgtggccaaatgaccatctgataaggagattagtcagccatctcaactgaagccaggtgctgttgttcaagacaatggaagaatgcaatgtaagggctacaggagtctgtgggaccttgggccatactgcctagcatgaactcattctctgcttcctatacttagactgtgttcatcagttgccccaggtgcagcttcagtgtgtctaggtgtggcagagactgcagtgatcacccttctggagggtcatatctcctccagggtgcagaaagtgcaagccaggggaaatggctggttccacctgggttttaaaggaaggagcctcctggcagagccttgagcttatgacctcagtccaggagagccatggtgcccaggcacagcgatactgtgagtgaagcacagacrgagagctgctagagggccattttgccaagctgtgggaacaaggatgctcagagctgtgggtccccaaacacctgctcagcaaagctgcaggggcagagccacctgcaccctagtgggccttgaagacagcattgaaccaaagattattcttgggccttaagatttaatgtttaccctattgtgttgggagttaattgggacatgttaccccttctttcctatttcgttcttttggaataggaatgtctatcctatgtcgctcccaccattgtatttttgaagcccataacatgtttgatttcacaagttcacagttggagatcaatttgcttcaaaatctattgtactgtgaattttattcatttaatttaaatcatatttagatgagatgttagacttcaaacctttgagttgctggtagaataagttaagacttttgtggctattgggatggaatgaatgtatttttgcatgtgaggaagacctgaattttcgagttttaaatatgaatgtccagacaaggatcatagacactttctcaaaacttaaatgtcaataatgtcatgtttttaaagtgtcagttcataaggttaaaatatagaagagaagatggaagcaaacagaaacttttacmagttgtagagcatggaaagaggtaagtatgtgcctagagacagaaatcatgatgaaaagagtttgcccccacaaaattgaagaaagtcttgggatttgaaggaacctgttactgcaaaactcagagttcaagtgtggagctaaaatcaaggctatttctttaaagtcagaatatagatggttaaatcttcttagcttactgttgctaacttcttacctatatatctgagaaccggaagtatatgatatggagacattaaactagtgaggctcttgactcagggataccaggttgggtggttaataggggtggtgtgcaggtcgaaagtcagaaagatcaagttaacatttttattctgcatggtgtactgctagttccctccatcgctctgtctgcagaggtccctagttttttattttatttatgaaaaataaaacttacgaggaatgaagttgaatctttcgctgagaaaatatttaaacgaagtgttgaaggtatggcttggcttctcttgaatgtatagtaaaagtgagaagagaaaaatgacttaaagaaattgctaatcaaaaaagaacatagccttagacaggagataaaatattttgaaaagaaaatatttctaagtaataatatatggagtccccagtgaaaaagtagggtggccacacatcataaagccttattcataaacatagcattcatagtaagtttttgagttttaaataggaatgtccagacaaggatcatacacatctgtgaaatgtctccaagttgaaagacagaagttcaaaacaactgaacaaagatgagcctcaaggagagacacttcagggaaccaacgagaatttaaagaaataataccatccacaggataagaaaaaattttgatcccacaaaataacaatgccattttttttaaaaaggaccactttacaccgtctaggatggctataatcaacagacaataacatgggttggtaaagaagtacaaaaattggaatagcaatacattgctagtggcaatgtaaaatggtatactattttagaaagcagtgtggaaatttctcaaaaggtaaaagagtaactctatgtcgcagcagtttcattcctggatatatacccaggaggaatgaaaacatgtatgtatccaaacgaaaagttacacatgaatgttcatagcatcatttttcttacaggcaaaaagggaaaacaacctcaaatatccatcaattaatgaatgaataaaatgcaatatatcctaacagtgacacattattggacaataaaaagaaatgaagtggagatacatgctaaaatatggatataccttgaaaacatgctaaatgaaaaaagcccgccacaaaaaactgctgtcttagtctgttttcttctgctattgcagagcatcacagactggataatttatttttaaaaagtttattcaccggccgggcgtggtggctcacacctgtaattctagcactttgggaagccaaggtgggcagatcacgaggtcaggagagaccatcctggctagcacggcgaaaccccgtctctactaaaatacaaaaaaattagctgggcgtggtggcgggttcctgtagtcccacctacttgggaggctgaggcaggagaatggcgtgaacccgggaggaggaccttgcagtgagccgagatcgccctactggactccagcctggatgacagagcgagactccgtctcaaaaaaaaacaagtttattcacctatagctgagaaagtttatttaaaaagtttgttcatacatagttgtagggagaattgagcacatctatgcaactctactaggaaagaactcctgtaagcttctcccatgtgcctttttctttgtctgtattaatgtttcctctcactttaactccaacagaacaaagttccaactttttttaactgcagaacttaaaaagattgggaatctaagagcatggtgctgtttttggtgagggaaggccatcttactgtattatagcacagcaaaaggatagaaggtggaagtgaatacaagagacaggaaacggcagggctgaactcccatgacaactaacctattctggcaattatggcattaatcacttcatgagggtggagcccccacgacccaattgcttcccaaagaccctacctcttaacactgccacaatggcaaccaagtttctatagtcatggaaatgtaaataatgggtcaggaatgggaaaaaaggacagttggaataatagaagaaataaagctaaagtcgaattatgaaattttaccattataagttgcagaatattaaaatatcgaaggcaagaaataataaaataaataatacatggacattttctcagaataaaagataattattctccccccccaatccctacatatatatattttttttctttgaaacaggttattactctgttgccccggttggagtgtagtaagattatagctgtctcatctcaaactgctggggtcaaatgatcttcctgccttagcttcccaagtagctaggagtacaggtgtgtgccaccatgcctggctaatttttttattttttatttttggttttttgtagagatgggatctcactatgttgttaaggctggtgttgaattcctggtctcaagcagtccttccaccttggcctcccaaagtgctgagattacaggcgtgagccactgtgcttggctaagataacgattctttacattgaaaaagatccaccaaatttccaacacaatgaatttagaatgacccatggcagatgatccagcaaaatttttccctttcatagcaactcttagcaaccccaaactagcaactgtagcttagagtggccagaatccaaacttgatgcagtgccagcatctgtcccaaaaactttcattttagctatttttcattacagttaaaaataagaaggggattgtatatttagcttgtttctcattttacattttgttgtatattcagtgagccagctctacaggagctggttctatcattgtatattttactggtaacttctacctacagtaacttatcgcagtgcacctgttgttttataccatcggtgactcagtaaccatctgacatcaaactttacccgccctgtaatccttccttttctcaaacagtgctttccttatgtttcagctagcaggagttataggaaatctcatttgtaatgctagttgtgtcagagttttctctaagactgccctcaggtgcaatgatttgtgggatagactcactggactcagaagaactgctgttctcttggttgcagcttattaaagtgagagagaacattacaatgaacaaaggaaaaagcacatgggataagcttacaagagttctttcccagtagagttgtgtggatgcgcttaattctccctgcaactatgtgtgacgtggcgagttggcagccagagaatctcacttgagccttgtttagggtttttattgggagtcagtcaggtattgtgtaactgaccttaactatgtatactccatccgcatagagtaaaaatgcatttaacacaaatcacatagttagcataaactctctaatcaagctggtgccatgtgacccaaggttctagacatagaaaaatgctcatcaagtagagtattccaagggctcagagctttttttcagggaactgaccaagggcagttctgaagacaggctttagtaatgtccaaggtttttgcagtctaggtctgctgagttaactctttcctgcacaactgtcttttcacctccctccctccctcccttccatcctcgacagggttttgttctgtcactcaggctgcactgcagtggcatcatctcagttcgttgtaaccttgacctcaggcttaagggattctcctacttaagggattctcctacttcagcctcctgagtagctgggactatgggtgtgcaccaccatgtctggctaagttttgtatttttttgtagagatgggatttgcaatgttgcccaggcttgtatgcactcctgggctcaagtgatctgcctgcttcagcctcccaaagtgctggaastacaggcatgagccatggtgcccaacttcttttcattttctctgtggtgttttggagaacttaagttcataatttgattaactccatttaatcaagttttctattaaggtctgagctcaaatctaagaactgtttgcccaactcagaatcacaaagatattctcctgtattttctgttaaaagtttttaagttttaggtttcagtatttaggttcatgatccattttgagttaatgtttatgtatatatagtatgagttagtgatatcgggtcatttgttttcatttggatactgactgttccagcggtatttgttgaagaaactatcttttcttttttgaatttcctttacacttttgttgaaaattaatgaccatgtatatgtgtatctatttctgaactctgtttttctctattctgtgctttggatatttctgtttttttgttctgtgtttctgtctttaagccaataccrcattatgttttttaccaaagctttaaaataagtcttgaaatcaagtattatgaattctctaactttgttgttcttttcaaaattgtttcatatttccatgtaacttttagaattggtttgtcattctgccccataaaaagctggaactttgattgaaatttccctgaatcataggttaatttgtggaagattgctatctttaacatacttagtctgaatgcagatccattagcactgtatcatctttgtatttatttaggtccccatttatttgatatttaaacattttgtctcaccagtgttttgtagttttcagcatacaggtcttgcacatcttttgtcaagttcatccctttattatttcataattttgactattaaatggtattcttttaaatttcaatttttttctttttccttttttttttttttttttttttgttgagacggtgtctcgctctgtcacccaggctagagtgcagtggtgccatctsagctcactgcaagctccacctcccgggttcacgccattctcctgcctcagcctcccaggtagctgggactacaggcatccgccactagtgcgcctggctaattttgttttgtatttttagtagagatggggtttcaccattttagccaggatggtctcgatctcctgacctcatgatctgcccaccttggcctcccaaagtgatgggatttcaggcttgaggcactgcacccggccttaaatttcaatttttatttattactaataaatacaaatacaattaatatgtatatattgattttgtatccagtgaacttgagaaacttttattctacatccttattatctgagatcaaacacagttttacatatcttttcccttctgtataatttttatctctttttggggggttattttgctgtcctagaacttgtacttcagtaaaatattgaatagaaacggtaagaatggacatctttgccttgttcctgatgttatcggaaagcatttgccccttcaccattaagtgtgatgttagcagtaggtttttcgtagacacttttaagcagattgcggaaattttcttctgttacagtttatgaagtcttattttattttgttattttatttatttatttatttattttgatacagggtcttactctgtcacccaggctggagtgcaatggcacgatctcagttcactgcaatctctgcctcctgggttcaagcaattctcctgcctcagcctcccagtagcttggattacaggcacctgtcaccgctttgggctaatttatgtatttttagtagagacgggggtttcaccattttggccaggctggtcttgaactcttaacctcaggtcctcggcctcccaaagtgctgagattacaggcatgagccaccgcccctggcctaagtcttttattttaaaatcacaaattaatattgaattttgtcacttactcttcctgaatttattgaggttattaaatgtttttctccttttttaaatctattgatatggtgaattacattgattgatttttaaaattgatttttttttttttttttttttttttttggagatggagtttcgctcttgttgtccaggctggagtgcaatggcgtgatctcagctcactgcaatctccacctcctgggttcaagcaattctcctgcctcagcctcccaagtagctgggattacaggcatgctccaccatgcctggctaattttgtatttttagtagagacggggtttctccatgttggtcaggctggtctcaaactccctacctcaggtgatccgcccgcctcagcctccgaaagtcctgggattacaggcaagacccaccaccatcccatctctactaaaaatacaaaaattgattttatctgtctgcttaactgcatattcctatgataaaccccactttgccatactatattaatctttcttatttattgctgaatttaaattgctgaaattttatgagatttttgcttctgtgttcatgaggaatattggtctgtggttttcttttttgtgatgtctttgttaggctttgatataaggttaataccagcctcagaacaaattaggaagtattctctcctcttcaaaagagtttgtatagaatagtaattttttattcctgaagtatttgtttgaagtcacagaagaaaccatctgggcctaaaattttctcataaactgaataaaaatttagagatgaaaaaaattttcatctgtgaaaatttgtaattacaaattctatttctctggagccagtcatatttcttatttgtctaaatgagctttggtagtttatgtctctcaaagaatttattcatctgatttgtcaaatttagtgacaagattgtcgataacatttctccattatcattttaatgtttgtagtgatgtcacctctctcattcctgatattggtgatttatgtccttctctccaccccataattaatctaattttattgaccttctcaaaaaaccaattttcattgcttttcccttatttttatttttttattttgtactgatttaacttctttgttgttattattatttcctcaacttactgtgggttttatttgctctttttcatatttcttatgatagaagctgaggttattaatttgagagctttcttttcttttaaaataggcttttaggccgggcgcagtggctcacgcctgtaatcccagcactttgggaggctgaggcgggcagatcacgaggtcaggagatcgagaccatcctggccaacatggtgaaaccccatctctactaaaaatacaaaaattagttgggtatggtggcatgcacctgtagtcccagctactcgggaggctgaagcaggagaatcacttgaacccgggaggcagaggttgcagtgagccgagatagtgccactgcactccagcctaacgacagagcgagattccgtctcaaaaaaaaaaaaaaatagatttttagtgctctgaattctcatctgattactgcttttgcttcatcccagmaatcttgatgttgcatgtcaattgtttgggggatgaaaaaaaaaaaaagacaaattttgatgttaatgtttttatttctattcagttataataatttcctattttcatattggttgcttctttgacccattgattatttagatgtatgtttttggtatccaaatagttgcaaagatttctacatacctttctatttttcaatttaatgccattgttagaccatatttaatataatcaatatgattgcattgaaagctatgttattgatttatatttttctgggggagggagggttgggagcagaggatcttgctccgttgcccaggctgggtgcagtgttgatatcatagctcactgcagccttgaactcctggcctcaaacaaccctttcaccttagcctcctaaagtggtagaattacaggaatgagtcaccaggcttggccttgatttatctttcttttcatcctgtttttctgttcctgttttcttcttttcccactttcttggattgtgtgtgttgttgttgttgtctttgttgttgttgaggcagggtcttgccttgttacccaggctggcatgcagtggtatgatctcagcttactgcagcctccgcctcctggcctcaagtgatcctcctgcctcagccttccaagtagctgggactacaggcgtgtggcaccatgcctggctaatttttgtatttatttatagagacagggtttcaccatgttgcccaggctggtctctaattatcagtattggcttattagttatttattttctttgttttcatagttactttagggtttgtaatatacatgtttaacttatcactgatttatatttagaaaaagctaatagaaacccttgtgatcaggagaatggaacactagtgcttattgtaattctctttagtcttctttgttgttcctgaaatccctcaagcatacttctgccccttggcctttgtacttactattccctttccctggaacattcttttgctagagaataacataatgttttcctttgtcttctttctctgttatttaaatgttacctgatcagagaagtctttccatatcatactacctaaaacatctatttcttgctcttcatacctttacttttattttgattttttttttctttatgacacttgaccattgctggagtaaacgtctggattcccctctttgttctgttcagctttacatctatccctccttcagcagtgcctaatagtcaatgattgatcaacaaatttgattgaataattgattgaataaatattgaatgagtgagtcatttgtgtccgttttgtacagtctcctcagtaaaggtacctggggccgggcgtggtggctcacacctgtaatcctagcactttgggaggctgaggcgggtggatcatgaagtcaggaggtctagaccagcctggccaatatggtgaaaccccgtctctactaaaaatacaaaaattagctgggcgtggtggcacgtgcctgtattcccagctactcgggaggctgaggcaggagaatcacttgaacccgggaggcagaggttgcagtgagccgagttcatgccactgcactccagcctgggcgacaaagcaagactctgtctcaaaaaataaaaataaaaaataaaagaaaaggtacctgggccgggcacggtggctcacgcctgtaatcccagcactttgggaggccgaggcgggtggatcacaaggtcaggagatcgagaccatcctggctaacatggtgaaaccctatctctactaaaaacacaaaaaattagcctggcatggtggcgggcacctgtagtcccagctactcaggggctggggcaggagaatggcgtgaacccgggaggcggagcttgcagtgagctgagatggcaccactgccctccagcctgggtgacagagtgagactgtctcaaaaaaaaaaaagaaagaaagaaaaggtacctactctcttattactgaaaacacaccattattttgcctttcaatatgatattaaaatttactgctcaaaacctcttgtattttttaatttaaccatagaatattaccacaaatttagcgcctactgtatatttaccttttcaaatgctttctgctaggctttttcactactgatgtctgaatggaagtatcctggaccactrtgtaaatttgactatcgttcagaaataaaactgggattaaagaccaagcaattaatttgaattattttattctagttccaaaagctgagacaagatcttgaaatggtactgtccactaaggagtcaaagaatgaaaagttaaaggaagacttagaaaggtttgtttatgttacaattactattaatcattcatatatattaagtgacatttaaagttttatttagatattgcttgtattgtttttccatgtcgaaagggaacaacggtggttggatgaacagcaacagataatggaatctcttaatgtactacacagtgaattgaaaaataaggttgaaacattttctgaatcaaggtattaattttatgttctaggtttttaaaataggaaaagtattttattttttgtgttacatgaaacatagatgaagttaaatgttaccaggaatcaggagtcttgccctaacttttgttaactattagctattatatgatcttttatgggtgacttgacttgactgtacctttggtttctctacttgttatatagacaatatgattttcaaaaagrtagttatttggtttgagcaaatgaagttttaacaaagtttttgatcaacttcatgaataactagttacatgtgtgtatgtgttttatcagttaaatgtttctcttaatttttttaatctattagaatctttaatgaactgaaaactaaaatgcttaatataaaagaatataaggagaaactcttgagtaccttgggcgagtttctagaagaccattttcctctgcctgatagaagtgttaaaaagaaaaaggtaagttttagagaagacatttatgtaaattatcatatttgaaattattttaggtgggtttagaagcatattttcttatttagttcaaaggtatgcacatgtatggaaatatgccattatcacattatacttattgaaagactagaagcaacctaattattcaataaaatgggattaagtatatgtatatttttgggggcaggggggcggggggacagagtctctctctgtcacccaggctgtagttcagtggcgtgatctcagctcacttcaacctctgcctcctgggttcaagtgattcttgtgccttagccttcagagtagctgggactacaggtgtgtgccaccatgcccagctgattttttgtatttgtagtagagaggggatgtcaccaagttgcccaggctggtcttgaactcctgagctcaggcaatctgcccacctcggcctcccaagtgggacgattagatgctaggattacaggtgtgagccactgcgcccagccagagtatatttcttatgttatatccatatgatgggagtaagttagcttttcatataatgtattgaacaccttcaaagaagttaatgaaatacaacttattgttgaatgaataaaacactgatgattaaattgtttgaatctaatttatgtttaaaaattgatagtgcttatgtctgacagctaggattgtgggtggttttttgcttttcacaattttttcaattttctgtgatgagtatgtacaactttttaaatcaaaagaatgatgtttaaaatttgtyacagattaatgtaagttattgactattttaatagtagctataatgaaataaaccttttctgaaaaagcaaataaatattttattgagtggcagaagattgtgaacagttcatatatatatatatatatatatatatatatatatatatatatggtgttaataagacttttgaaattgcagtaatcattgaataataatatgtttaatcattttcagcataaaatctttcatgtctccctagggaatgaagtctgtaaactccttagaaatctcttcattaggatttatactatggacttctatctcttcagcctcatctccaagcattcatccatcttttacatgaatccattcagctatgtcaccaattgacctctcacttttttgtgccttatacattctattttttctgcctaggttaaaacccttccgatctggtgagggtagcagattcctacttaagacagttcaagcatcttttgagtgaaacatattatgaaatttaggtgttcttttattgatttatttttattttttatttatttttatttttggggaccgagttttgctctgtcacccaggctggagtgcaatggcatgatctccgctcactgcaacctctgcctcccaggttcaagtgatagattctcctgtcccagcctcctgagtagatgggactacaaacgcgtgccaccacacccagttaatttttttgtatttctagtagacagggtttcaccgtgttggccaggctggtctcgaactcctgacctcaattgatccgcccacctcagcctcccaaagtgctgggattacaggtgtgaaccaccacacctgacctattgattgagttttttagagacgaggtcttgctatgttgcccaggttagacttgaactcctgggttgaagctatcctcccgcctcagcctccacacagctgggactacagatgtgagctactgaatctggctctaggtgtccttttagtaacacttttcaaatgattttgttagtgttatttatgtctatctctccctttatccccatgccctgtgagctactcggtgtgtttaattcatctttgtatctcttctatcttgcatatcttttatatagaaccttctcagttcatatttattgaatggatgtgaatatactaggaaaaggagaaaaagttctgtttgtttttgtttttactatctgtgttctttttattcttcccttatttataattgtctataggctttacatttgttatgggctgtgtcttccattctattattgttttttacctcttatttatttgtaaaagtatgacagcctcctgttggccatttcattaaagtcatgattccttgcctctttatgaccttaatcttgcaacaactcactgatttattttctggtcccagtctcctccatttttttcaacacattttttgttgctgttgctccactaatagaaccagaggtttgaggcatcctgaaaaggaagcttgattaccatgagccattatcgggtcattaagtcagatttgataacctcacttctttttttatgatgtataaggactattgatacatgttacaaagtaattcttgtctctctgtttctttctctgtgtgtttctttctctctccccaacaatactgtatttattagtctacttgggctgtgataacaaaataccacagactgggtggtttaaacaaaagtttcacagtgtagaggctagaagttcaagacgaaaggaaggtactgtcgggttggtttctggtctctcttcctggcttgtaggtgaccacttgctcactgtgttctcacattgggctctttgtgtacacaaggaaagaaagaattctcaagtgtcttttcctctttttatgaggaaaccattcatattggattagggcccgrttcttatgacctcgtttatcctttattacgttatttaagactttatttttaaaaacatagtcacattagggcttccacatataaattttggggagacatcgttcagtccacaacactggactttataactcaaagatgtatacaaagaagaaagctaaaaacaacaaaactccctccatcagatcattaccattaagtgaacatcacaattaatgttaggtgaatgtcatttgagacatcttgctaagcacatatacatatagaaccataaatagatggattgatggatggctggatcaatgtaattttgtaaatgctaataataaaataaatgtaattttacttttttttttttgagatggaatcttgttctgttacccaggctggagtacagtagctgagatttcagctcactacaacctccacctcctgggttcaagtgattctcctgcctcagcytcctgagtagctgggattacatgtgcgcactgctatgctggctaagttttctatctttgttttttagtagagatggaattttaccatattggccaggctggtctcgatctcctgacctcaggtgatccacccacctcagcctcccaaagtgctgggattacaggtgkgcaccactatgcctggcctaattttacttaattttgagagaagaaaaagaatgagtgaagttgaacagttgaactcggataaatatttctttgcatcaaatgattttagttctggagagatcctttcaatataaaggaaacaagtgaatcatgaaaaacatggaaaatttaattacagtttgtttaacttcatatctcaattctaggcagttattgactctgctgtaaaagataagaaaattaacattctttttcctatacccttatttctattttgtgttatttttactttggcaggttatattttattcagaacttctattttatttatattttattcagaaaacgccatttatatttagccttcattctacattgtattggagtcagtgctcattatctttttttttttttgagatggagtctccctgtgtcacccaggctggaatgcagtggcatgatctcgtctcactgcaacctctgcctcctgggttcaagcgattctcctgcctcagcctcctgagtagcttgggactacaggtgtgttccaccatgcccagttaatttgtttttttgtgtggggggktttttttttttttggtatttttagtagagacggggtttcactgtgttagccaggatggtctcgacctcctgaccttatgatccgcccgactcagcctcccagagtttttgtttgttttttttttgagttggagtctcgctttgttgcccacgctggagtgcagtggcgtgatcctggctcactgtaagctccacctcccgggttcacacgattctgctgcctcagcctcccgagtagctgggagtacaggcgcctgcaaccatgcctggctaatttttttttttttgtatgcttttagtagagacggggtttcaccgtgtaagccaggatggtctcgatctcctgagctggtgatctgcccgccttggcctcgcaaagtgctaggattacaggcatgagccaccgtgcccgggccaagcctccaagagttgttaagtttaatccttcgcttggtttgatgagtttctttgacaagtaatttgttcaagaattcctgggtgtttagtctttggattcttggatggtgtaaatactttgtctttacactaaaaggatattttaagcactttttttttaaaatctcaagttctgttaggtattgctccctgtcttttaagatggaatgtggtatagagaattctgaggccagtctatggatgacttgttgcttctgactatatctggagagttctttatatttgaaccaataacataagaatatttcacaatgttggttattcaatatcagttttcctttgaaaaagatatgttatttttctgggcagttttaattcacatttgtttcatagaaattttcttttatatttttcttctgcatttcgtttgtctcaagtctttataatttaacctgtatcttgcttctcatttattaatcaatactataattgtgctgtcttcaccactaatcgtatgctcatttataccactctttttcctttactaaggtattagattttcagagcctgctcggctctcttkatttaggaatcatacatatttttgttagtgttattttactatttstttaatatatttgtatttctgcaaggctttataagaattccatggtaatctctgactggtatcaggaaagtaatagttgtcaccgtagtaggcaactttataattaattgaatgtctgaattcaaaaccttctgattaggattagtatgatcttggaactttctagcagtttcctttagagtctgtcctgttgaacatttttaacaataacttaaagagatagaatatgtggctatcaaagtttacaaatgatgtgaaagtaagagggctagatagtaaatatgttggatgacagattgaagactatttcttagctagttaggaactaagacaaataaaataggatgatgtttaaatagaaatacatagaatatgtatttacatatgtacagaatacattacatacatacagaatacattacattacagaataaggaagacatttttagctagatatatgaaaaatactttggcattttagatgatagtattctcagaagtccacaaggaaaaaatagctgtctaaaagctaataccatcttaaatttaatgaatagaattccagtctccgtaattatgaaagtgggtgttctttttttgtctttggtagtcaaatcacacctagatcattgtgggagactggatgaaggaaaacaaaagacaaattagagcacattcggagaataatcatggtattgagaagcctcaaatttatgccatatgaaaagtaattgaggtggggtrtggtggctcacacctgtaatcccgcactttaggagactgaggtgggaggatcacttgaagccaaaaatttgagaccagcttggacaacgtagcaagaccctgcctctacaaaacaaacaaataaacaaaaacattactgtggcatgtgcttatagtcccagctactcgggaggctgaggtgggaagatagtttgagcccaggaagttgaggctgcagtgggctatgatggcaccactgcactccagcctgggtgacagagtgagaccctgtctccaaaaaaaagaaaaagaaaaataattgaagaaacaaatggtgattagtattttgaaaaagagaagatttgrgccttataatagcagtcttcaaatatttgaggaactcttgggtagaattggaatgagatttattctcgtcgttccaaggaagwaacaactaatgagttgagctaacatgacaaactgtcaagagctatagaaagatgattaagtctctcataagagcaagtttcctatactgaaactrcataaatgtactctggaatgtcatttggggagtttttattgggggatttaaatactaatttttttatgtgattatatataatgtgtatatctattatatgcttatggatagttttaattgtatcttccagttactataagagttttcactgtcttagaagatatttcaactgcatttttatgaatctgacttaaatacaacgtttactttcagaattttttgtcacttaattacaaatatttgattttagttactttgtaccattacaactaagaaatattaattttaaaagtcttggccaaacgcggtggctcactcctgtaatcaaagcactttgggaggccgatgtgggcagatcacctgagggtcaggagctcgagaccagcctggccaacagggtgaaacctcatatctactaaaaatacaaaaattagccaggcrtggtggtgggagcctgtaatcacagctactsgggaggctgaggcaagagaaccacttgaatccgggaggcggaggttgcagtgaaccgagattgcgccattgcactccagcctgggcgccaagaatgaaactctgtctcagaaataaaagtcttataaaaacagtccaatatttcaccattggcagaagtgaagtggtaattgtttgttattcacatttctcttgaagaaaaacattcaagaatcatctgtaaacctgataacactgcatgaaatgttagaggtaagtgttttgtgtagtttgttttgtcttgaagctgtcttagtcatttgtgaacaattatactcagacttgaaaaacaaaaaatactgctttaattcttaaagtatgcatcaatctttattaaatatatttgtaataatatatctttggtataaaattagtttctgttccctgtacagtactgagaggaatattgttatttttaaaataatgtgaatttaaggtctatctcttaatcatgttcccaagatttattacaggtaaaatttttatctaggcatgagctgacagggtgaaaaaatttttttaatgatgttatctagtatttacagagtaaaattctatgctgttacattgactgtttaattggtagctctgtactctatataaaatacgtaatgaacttaaagattctttccacaaagttgtagaaattgtacaatttttaaaaaataacatcagtctcttttcttacartgtaagtactgagttttccaactttctctgatttgacatataccttgttttataaatacctttgaccttttcaaaaatgtttttgaacctcaaccatattatcagttacattaaatactttggaagatcttgatatgacaattcatggtaaattgggcagaaaggaaaatgaaataatktatgaagaacagggtatttaccaattagtgtacccccttttaaaatcattggtatattttgaagaaagagtgatttcagaaaacgcgtttcatttaacttaatgaactaggtgttaaagtctctttttgcccagctgacaagttttggttcctcaggatttaatacagagtattattgctttgaaaagcaaaatacaaatatttattagattcgtaattagaatattttaacatatttctagctactctagtttatgctgaaactaagatgactrtagtttctcatggatgacttaacctttttttttaataaaaattgtcagtcatggaaatactgaaaggtattacatgtataattttttaatagtgtaacatagtatgtaccatctgtgttaggccattcttgtgttgctgtaaagaaatacctaagactgtataatttataaggaaaaggagtttaattggctcatggtttgcaggctgtataaacatgacactagcatctgctcagcttctagggaggcctaagggagcttttactcatagcagaaggtgaagcagcagcagacactttacatggccagagtgggagcaagagggagggggaaaggtaccacacacacttttaagcagccggatcttgcgagaactcactatcatgaggacagcaccaaggggatttgctaaagcattcatgagaaattcaccctgatgatccaatcacctcccaccaggctccacctccracattggggattacatttcaatatgagatttggtaggggacacacctaaactatatcagcatataaaacttagcattagaatcctaagtttgtctccaaggctcatattgtcagtgataaaggaactaatcttaaaactgcagttaggttaaaaataaaacaatatgattaaaattagaaatgcaaaataggaaagatttgtactaaaataagctgtttgtactaaaataagccattgctctaaaatacaaataatatttaattctatattatgatactcaaaagaaatgaggccaaagcttttttcctgcagaatgtgggacttgaaataattaatgatagttgaaaatgttatttcaagaactaaggtattattataaaatttaattgagattagagcttgatggattaatttgatttatttctatggcactttgtaattgtataaattatgcattctcttttccatgttccttaaaataatagcatctttcagttaaaaatttggcctgacaattcagagatacggagtctaatccaagatccacccctgattatgtgcccctgaggaatctcttaactcttctgagttctasttttgtaatttgtgaaggcaccggaagatagctgaggaggcaaaataataattgatctacatttagcgtttttccactgtatttcataacattagtattcaaacaattgtaactatttgtttcttgaaaaaacttttataatagcagtgcatttgggaaagacagctgattctcaatccacattagctagctttcccaagcttgtttgatcacagaaccttgtttttcaggaactaagaacatctttaggagactaattctatggaatgcagtttggaaaatgctagcctatataatttaatacaaatactcaaaactcaatttgtggttttaattccacaatatccttaacgaagatcagggatactcaggatgaagctgaaggaagtgatgatgataaaattgactcttgcaaagatttatcagaagaataggtgttttgtgggggacaggaccagttatttttccttcaaatattaagacacacttgctcactttctttttaactttttgtgttttttgtgaaatattaattttttaagatttttgtctttatcctaaagaagatattaatctcaaaagaagtgggaggattgtaaattctttctaaccaatttttaggaaatgtttttctaaattaaagatgcaaaaattcactttaaagcttttttcattagctaatacccatagtcctttcaaaaaggaaattcamatttgtagattaaaagtattaaacagttgttgaaaaagaaaagaggtcaatattctytgacaaaaaactttcttatagctatattgactttttcccaagtaaagtatattttgaatgatattttctcctagattcttataaatagattatttgatgttccacatgatccatatgtcaaaattagtgattccttttggccaccttatgttgagctgctgctgcgtaatggaattgccttgagacatccagaagatccaacccgaataagattagaagctttccatcartaaaaggatgttttcttttttcacacagtaaaaattcttatcattcaaggatattggaaccacaggactatttggataaaaaacattatttgcaaattaatgcgcataggccatcttacttttattgcamaatggcatgtgctgccatctattattcatttttaaatggtcatttcttattcagtgagtgctttagtgttttaaactatatggataagaatgcaggtagataatattctaggcataaaacatttaatgtaccttacctcatgcaatattctttggattctttgttgatttatgatattgctaatataatattttcttaaaatatataacaatatcttttatgcattttgagttccagctggtgcttctttatatttagaaattataatgggaaggtcatttaatttacagatggttttaaaattgaggtaatatctgaggtggcataatttaaaaatatttagcaaatttgtttcatatatactgtcttatttctagatttgtttaaaattggaatatgaaaaactaatggataaagctagcataaaattgatattttagtttgtattattaatatatcatgttaccttatatattaatctactcttgattctgctaattattaccaacaaaattgtattcatgacattttattaatcctctgtgaattttctgtaaataaaattatttctgaaaatctctagctattagtgatgtgggatatttttataagtagcaaatgttttttaaaggccgataaactaagatataggactcatttagtattacataacaagctaaactagagaatcctaaatccatttagtatcattagttttctaagataaatttgtttatttttttacttgaaagcgctttctactgtatattatccaagtctctggcttaccttaattacttcatattttctaaagtaaacaaatatttgaagtataccaaatccctctgtagaaaatacaaatactattatattttaggaaacgtaactcttttaggggaagataatatataaagtacctcctagaatactgcagttggatattgaagaagtgagcaactttttactctttgaagttactggagagggaagaaatggcagtgtaggtctgacaagaattcttcagagcaggtagtactgttgtccgtgaagtactagcaaaacacttttggtgtttgctaattaaaacattaaaaatatgtaattgagccagacacggtggctcatgcctataattctagcactttgggaggccgaggtgggcggatcacttgaggtcaggagttcgagaccagccaggccaacatggtgaaaccctgtctttactaaaaataccaaaaattagctgggtgtggtggtgcacacctgtaatcccagctacttgaaggctgaggcaggggaatcgcttgaacctgggaggtagaagttgcagtgagccaagattgcgccactgcactccagcctgggtgacgagcaaaactccgtctcaaaagaaaaaaaaaaagtaatccttatgcttgcaatgcctaccaatagactgtattcttctaaaagtttatatggggtatgtcaatatgcttccagttgctaaatggagtgtatcaaatactttattgcattttatgacatgttgactcaaaaattagtaagtgaaaagttgctaatagcttatttttaatattcttaatactttccctagtttattgtttatcctacaactttgttttgatggaatcttgcttttttttttagcatgtagagatgtaaaatttttaacttatttttgattatacaaaaaatgcagatactacagataaaactgaaatttcctttgatatttcctatccaggtcctctctgccttggggtaaccactatttgatacatgctattatttttcatgttacgttatgattattctcttccatcatttgactgtgtccagaagatcatccattttaatgaatcttgttttgcaataatcagagagccaattcacatgatggtggattgttcgtatctgtttaatcctggtaagagagcagagacaatggaattgtacaagatgctggattaaacttagagaaggcagaaaagtggaagacaagaacaaaagatcgattaatagaaaacattaacaaatatagtaatttatatcaatcagtttaaatgtgagttgtctaaatacacagatactgccacagtgcattaaaaaacgactaaacaagaaatccactttaaatacagagatggagaaagatacatcatttgttatggactgaatgttcatgttcccctcttccccagatttatatgttgaagccctaacccccagtgcgatagtgtttggagacaggatcttggaagatattaaggttaggtggcaccctgactaacataaggttagtgcccttataagaagggacacagaaagcttgctctctttgccatgtgaagatacaactagaaggtagctgtctacaaatgagagagccttccccagaaattgactatgctgacaccctgatcccagacttcgtcttcagaaatttgagaaaatgaaaatttctgttgcttaagtcacctagtgtatggtgttttgttagggtagcctagatagactaacatatgaaactatactcatcaaaagaaagctggagtagctatattaatttcatacaaagctgacttcagaacaaggaaaatgagaggcaatatatggtgataaaagggtaattaacttattcttttcaaaaaagacaccatagaagctatgtctttgactacaaaggaattaaactagaaataagtaatgaaaatacctggaaaatcccaaaatacttgtagattaaggaacacacttctaaacacataggtcaaagaagtctcgagaaaatatattttgaactaaataaatgaaactacaagttatcaaaatttgtgagatgcggctggaagcggtggttcatgcctgtaatcccagcacttgttgggaggccgagtcgggtggatcacgaggtcaggagatcgagaccatcctggctaacgtggtgaaaccccgtctctactaaaatataaaaaattagccgggcgtgatggcaggcacctgtagtcccagctacttgggaggctgaggcggaggatggcctgaacccgggaggcggagcttgcagtgagctgagattgtgccactgcactccagcttgggcgacagagcaagactccgtctcaaaaaaaaaaaaaaaaaaaaaaaaaaattttttttgagatgcagcaaaagcagtggctagagggtaatttatagtattgagtgcatatattggaaaatgttaaagatctaaaatcaataagcatctactttaggaaattagaaaaagcaaattaaatccaaagtaagcagaagaaatagagtagaaatcaataaaattgaaacaaaaacaatagagaaattcagtgaaacaaatgaaattcaatgaaaagttaaaatttataaaactttttgccataacaaaagaaaaaacaaaaattactaaaatcagaaatgaaaagaggtgccattattactcttcttgtgaacattaggacattagaaggataataaaggaatgttatgagcaactcttgagtgtacaaatttgataacagatgaaatggaccaattttgtgaaagacgcaacctaccaaaactcacacaaggagaaataactgccttgcataaacttataaaataaattgaatcaattatgagcttccaaaacaaagcactggtctcagatggcttcactagtgaattctaccattcaaagagaaagtgatgccaattttgtcaagtgatgccaattttgtacagtctgttctagaaaatagaagcagaggaaatgctttaacacactctgtgaggctgagcacgatggctcacgcctgtaatcccagcactttgggaggctgaggtgggcggatcacgaggccaggagtttgagactagcctgaccaatatggtgaaaccccgtctctactaaaaatactaaaaaattagccaggcgtggtggcacgcgcctgtaatcccagctactcgggaggctgaggcaaaagaatcacttgaaccctgggatggggaggttgcagtgagctgagactgcaccactgcactccagcctgggtgacaaagtgagactacgtctcaaaaaaaactaaaaaaaaaaaaaaaaaaaaaaaagattatgtgaggccagcattaccctgataacaaaattaggtaaagatgttacaagaaaggacaactacagattagtatctctcatgaacatagctgtaaaaattctcaacagaatattagcaaatctaatataacaatatataacaaaaaactatacaccacagtcaggtggcatttatttcaggtatgcaaggctggttcaacaaatcagttcatacagtccattacattatcacactaaaggagtaaggtcatgatcatatcaatacatgcagaaaagccgtttgacaaaaaaagccaacatctatttgtgattaaaaacaaacctctcagccagctaggaatataagaaaaccctcaacttcataaagaatatctacaaaaaacctacagctaacaacatacttaatggtgggacatcagatgctttcccttgaagaacagaaacaaggcaagtagatcgcatcattcctatttaatgttgcactggaagttcttgctaatgcaataagacaaaattcctatgtctcaacaaaaaataatttgaaactaaaacctgaatatagcaagtttacagagaatgtatggttcatacacattgaattactttcttagatataccagggatgaacatttggaattagaaatttaaaacatttacattagcaccaaaagagagtagagagagagagaagaaagaaggaaggaaacaaaattaacgttgtacaagatctatatggaaaactacaaaagtctcatgaaagaaattgaagatagaaataagtagaataatattccatattcatgggtaggaagactaaatatttttaaggtgttacgtcttcctaactttacggattcattgaaatctcaataaaaatcccagcaaggtacttgtggatattgacaaaattttatagttaatgagggaacgacccagaatagctgctaagatatttaagaagaacaaagttagaggactgacactgactttggcgatgactttttagctacaacaccaaaagcatgattcatgaaagaaaaaaattagttggactttattaaaattaaaaaccgctctgtgaaggacactgttaaaatgaaaaaatatgccacaatctgggataaaaactttgcaaaatatatctgataaaggatttgtatccaaaatatacaatgaactctttaaaagtcaacaataagaaaaaccaattaaaaagtaggtaaaagatctgagcaggcacctcacaaaagaagatatatagatagcaaataagcatgaaaaagttgttcaacatcgtatgtcattagagaattccaaatttaaataatgagatatcactatgtgcctaccacaatggctaaaattaaaatataataccaaaggctgatgaggatgtggagcaacaggaacatagccacttagtgttacggtttgacggttttttacaaagctaaatatagccctaatacaggcataccttgaagatactgtgggtttggttccagacaactgcaataaaacaaatactacaagtgagtcacacaaattgtttgatttccccgtacatgtaaaagttttgtttatactatactgtagtctagtaactatacatagcattatttctaaaaatgtgcatacattatttaaaacaaaccttattgctaaaaagtgctgagatgcctaatcagccttcacctagtaattttttgctggtggaaggtcttgtcagtgttaatggctgctgactgattggggtagtggttgttggaggttcgggtggctgtggccatttcttaaaataagtcagtgaagtttgccacatcgattgactcttactttcacaaaaagatttctcagtagcatggtaagatgctgtttgataggtttctacccacagtagaactttcaaaataagagtcactcctctcaaaccctgccactgccatatcaacaatgtttatgtaatattctaaatcttttcttgtcatttcaaccatgttcactgtatcttcactggaagtagattccatctcaagaaaccattttttgctcatccatgggaattaactcctcatctgttcaagttgtatcatgagattgtagcaattcagtcacatcttcagggtccacctctagttctcttgatatttctaccacatgtgtggttacttgaacccctcagagtcatccatgaagtttagaaccaacctcttgcacactcctgttaatgttgatattttgacctcctcccatgaattgcacatgttcttaatggcatctagagtggcgaataatttccagaaggttttcaatgtacttgaaaatccaaatccatcagagcagccatctctgatctttttgtcaccagggaccagttttgtagaagacaatttttccatggacccagagtgcggctggggggatggttttgggatgaacctgttctacctaagatgatgaggcat

SEQ ID NO: 96464 - DNA, 19059 bp, Homo sapiens
  misc_feature (1)...(19059): n = A,T,C or G
ccagctcctgcagtgggacagtggggattacctcagcatctgggggaactgataccccttgcacagacagggccacatgtccccacaccttggagctgcacgcacctcaaactttcctgggttctgctccagaagttccttgctattagacaggtactgccaggccttggctctgagagaggaggggatccccttccggcagcgcagcttcacctaaggcaaagtggcaggagggggacagcttcaagggctggcacagcctccaacctttccccagcagtccacaaactccctggatactcctccgacatcccataggcttgattccactggacctggcctggacttctatttttaaagccattcccccgccagggcccatctatccccagtgtggtccagagggcagatattatcggcttcctgggcttccctggagcacatgctacccctcccaacttgtgcattgccctgcccaccattcagccctcaaaccttctggaatcgccgtgacagccacttatcccagttactgaacatgtccagccatttgagctcccgctgccgagccacgtccacgggaatggagctctctctgcagggtcgggggagcacggaaggggtcagtagcaatagtgcaaaacctgcattgcagggggaactgaggcaagccacctccccaagctcaaacgagaaactggatagtctgtgagctgccaaacatcaggatgtctggccacttgggcatcccaaggcacactgaaagggcttccttccctgatggatctctattcagaggtcatatttaaatctcacttctgacacatccaaatctggggagagagtatggagtattttaaagccacattttgcattagatctggatccacgtcctagctttaccatttattcattgtgtgaccttgggcaaatcacttaattttgctaagcccaatttcctcatctgtaaggtggagaaagtaacaatatctacccgaaggggtttatacgaaataacacacagcgaagtgcccattaagtaataccttactatccataaaataaaataccctagagggccaggcatggtagctcatgcctgtaatcccagcactttgggaagcagaggcaagaggatcacttgaggccaggagttcaaggccagcctgggcaacataacgagattctgtctctacaaaaaataaaaataaaataataaaataggccgggcatggtggctcccacctgtaatcccagcactttgggaggccgaggcaggcggatgacttgaggtcaggagtttgagaccagcctggacaacatggtaaaaccctgtctctactataaatacaaaaattagccaggcatggtggcacgtgcttgaaatcccagctattcgcgaagctgaggcatgagaatcgcttgaacccgggaggcggagggtgcagtgagtcaagattgtgccactgcactccagcccagatgacagagcgagactccatcaaaaaaaaaaataataataataaaataaaatacagaacaaatgtacttctgtctctttagacgcaaccatctgagttttgtcctatcaaatgtttaagatcccttgggtcacctgcaatttactctacctcctcctccctgaaatcaccccaggcaaataaaggactccctgccctatttactcactgttctgtcagaggttcatactcatggtgccccatcattcttcaaacacttacttgtaggagccagtactaggaggtgagtagaacggaagaaagcttgggtcttaagaatcaaacctacctaagttcaaatttcagttctgtctctgagacaatagggagctttgtcaagggatgacctgagtcccttcctcaattataaaaagacaccaccgggccgggcatggtggctcatgcctgtaatcccagcactttgggaggcggaggtgtcagaagtgagaagcggatcacctgaggtcgagagttcaagaccagcctggccaacatggtgaaaccctgtctctactaaaaatgcaaactcagccgggtgtggtggcacatgtcttcaatccgatactcgggaggctgaggcaggagaattgcttgaacctgggaggcggaggttgcagtgagccaagatcgcaccattgcactccagcctgggcaacaagagcaaaactccgtctcaaaaacaaaacaaaacaaaacaaaacaaaaaaaacaccaccaccacctacatcacaaagttatgagaagactattgagaaactgcatataaacatctgttaaatagaaggggctcgttaaatgttagtttcctttgttctagaagctccttaaacagagagaccatctctcattaatttctatcataagtcggttacaaactctaccaagggctgggaagagtaagataccttctggccctcaagaaggttacagcctaagaggagcgataactgtaatacagcatgggaaatgcaatgacaaagatgcaccaaagacacatctaattggagtgggggcagtgggtatcagggaagcttcctggaggaggggacatctgaggtaagccatgaagaaatgagtagaacttagcaggcaaagaaaggggagaagagcacccttggcaggtgcacagcctgaatatgaaggggaaaggactacaactagttcagcaggaccacagcgcaaagcacccggtgaggaatggtggcaaaggtgaccagagaggctatgcgcaggccaaagagcctgaacttcatcctgtggacagcagcgagccactgaacgctgcgaaagtaacatggattacagtcagtcttgcccaagaggtagagttctctggcattgaagctgatcttacagggacaaagctacaaagcaaagaaacagcacccggcatagtgcctggcacacaagagggactcccccaaactaagttcagcccgagttcctcaggacagcctgctattgaggagagagccactggtcacacagatccagattatttgagggggacaattcactcaactgcactaattgtttcttcatctataaaccgagtccttgtgcctagaaagcaccagggtcaaacctcagttgctttcccatgtaagaccctgaatgttggtacccaatcaaaggctttctgattttggttggctcatgaaccctgcctggaaaactctcccacagggcttcccccgatccctgcacacatagccaagactaaatcaatcctacttactctccacgattcagagcaggttcagctgactccctgctctaggtgcctcaggaaaccctctggagatctctaggctaaacccgaggtcttctattgaaaccaactgtttaagtacttttctttctctccagatgattggctccttgaaaggactattttatccttagcacctggggcctgacacctgggggcccaggagatgctgtaggctgactggcccagcaggtcaaaggggcacaggaacaacgggcaggatccagagagggggaaggaagaagtcagaggcaatcaccccctacctcgggagtgactcaggccccggagagaactaggaaagagtcagcccggctggggagatgaggaaatggggaagaggcctctcccaccctttacttcagtgcagatacaagactgccctgtttcacagcgggatcctgactgcacagtctcccttccatcagccagacttccccacctctctactccatccctgggacctagggctatgggggaagggagatgcctgcacccctcccaggctatccaccctaagggaccaagggtctctaccagaaccctcgcccaaccaaccctccagaatatccggcctgtagctggagttccccatcaaagagcagggatgacctcaggtatcatctcattcaatccactttatagaggaaaaaactgaggcacggaaatggggaagccactagctcaagggcacacaacccatcaaaggcaaggcttaaacccagacctcttgacccctggtctgaaactccactaacatgccaatgtcacaggcacctcaggatgctcaagacacggcagctcgcgctgatcaccccgtggatcctcagaggaggctgggctgccagagtctgggcaaagtgtatcgttttcgtttcgccctcccccaacctttgcttccccgaggcggtcccgctgggtgcccactggtactcacaggctgcccgagtactggctgcccccaaggaagccatacttgtccgtcttgcgcagggccagcccgtttatctctgaatctgagcccatggagctcacatcatccgccaaggactccaaggtcccagacatgaggctcacggagtccaagtaactcagcgtgtccggggcctgccctcgaggcccagagatgccaggtcccaggctggacgtggagcccaggtcttgagagttttcagcaggctccggagctggggtcacggtcacgacagctaccggagcctcacaagtcccagaggggcctgtgccagggcctgaggggtcctcaggagcctgtcctgctgatgctgatgttgctgcggcagctccatgcccacctgtcacttgtcctgatgcactccgtgcagtcactcctgaggccactgtggttcccggcttgggggcaagcgggggtttggcggtcagggcaccaggagccgttctggaaggggtcctggtaggggtcccggtgggggtccctggtcctggggcgggtgagggtcgagcctcctctgtcttcggcgagtctgcccctgcggccagagccctcgatgtctcaactccagccactgccgcgggctctggggattccgggccggaggggagctgcggctttggggcttcgggcgaggcttccagggtcagcaccaccaccgtgctgcccgtgacagccggggctggggccggggctggggccggggccggagcagaggtctgggccgaccccgggacccaggcgggccgcgcctccccgggggccaccagggtgacgggggccgaagtggccgtagtcactggaggtcccggagccaccaccacgacgggcccggcccgggaaccccggggcggcggcgagggggccgcgggggcgccatgacggcgcggcggggccaccaggggcgccgtgcccgtctccatggccgcgggccgcccctcacatccccccgccggggaggccgcagaaggcgccgccnnnnnnnnnnnnnnnnnnnnnnnnnnnnnnnnnnnnnnnnnnnnnnnnnnnnnnnnnnnnnnnnnnnnnnnnnncctcccggcgaggccagccgagaaaggggagagggcgaagggcgcggctcggcgcgcgccgggggcggagcggccgctgggcgcgcagaggcggggcaggggtcggggggcgccgcgcgccggggtctctctcgagccctctcaccccctcgcgcgctctcgccaccgccccctccctcctgcttgggggcgagccgccgacctcgcgcctgcgcacacgccgcagagccggctccgcgccagcgtctcggcgttccacgcctgcgcgcggactggctcatcgcgctccttttttctcccgcctagtcagaggatttggacgaatagtgggagagagagaactgggcttctgccaatcgttggaatcgtgggcggggctggaggcgaaaaaggggtgggtcatctggaaagaggaaacggagaaagctagggctgtaagaccaatcagaggacgaggaaaggcagggggcgatgggacgaaagaaataaccaatagaaacgcaggggtctgaacctcctggccaatgaatatgactgaagggtgaatgaccgcggaagggcggaggaggaggcagggctgtgcgagtaagaggtggggcctggaggcttcttaaccaataggaatggtaaaaagggagccaatgaaaaggggagcaggtggaggtcaaattgacaggcagtgatgtctatttaggcggtgacagacagcatccgcagtcaatagraagagctgaagaattctttagktctcccaaaatggtcagtaaggaatgacagctgggaggaggcggggcaagctagagattaattcgccccgtcagccaatgatcgtgttctcccactttggccacaggacaggaaaatagatagctgtctcagccaatgggagcatccaaagggcaaagatgctgccagcaggcggtgccagcccagggatagtcggtgacaaccggagacaagccttatgggagggtgacagctggggacagcacggagaaggggcgggggcattagtgcagccctcaaccaatgagtgccgcgctgccccctctcgagtcctttccggtcccctattcttcgttcagctcctgagccccacactctggtggtctgtgggaccctgagccccaccacagatccagtgccctgacccagtactctcatcctttactctataattctccgatctcggcccccaactaaccccaacactccaggcccaggtggcaatagccagagcccccagatcctataagcaacccatatctctgcttcacccatttcctgcgggaatcccaacctccaagtccctctcctcagttcccatctatctgagctcctccccagaacccaggctccagttcctcagaccttatccctctgagtaccccctccatttcttctagtggggatctcaaaccccaaatccatgaatccctaataccatgaactccccatatgtgtgttactattcttttggggatccaaggccccagtcccgtcaacccctctcccctcactgccacatccctctgtgctcctcatgttccactgagaatcccgacctcaatctcatgagcgctccaggttgtccttagatcacaagcataaagacctgacgttatgagctccaaccttccaacttctaaacgccctcttctttctctgacccccatattctgatttccatatagcatccaccatcctggaattccagtgagacctagctcccgacttctcagctcctccttggtttctgagtcctctaaggtccctcactcccaactcagccccatgtcctgtcaattcccactcagtgtctgatctccttctcctcacctttcccatctcccgtttgacccaagcttcctgagctctcctcccattcccctttttggagtcctcctcctctcccagaacccagtaataagtgggctcctccctggcctggacccccgtggtaaccctataaggcgaggcagctgctgtctgaggcagggaggggctggtgtgggaggctaagggcagctgctaagtttagggtggctccttctctcttcttagagacaacaggtggctggggcctcagtgcccagaaaagaaaatgtcttagaggtatcggcatgggcctggaggaggggggacagggcagggggaggcatcttcctcaggacatcgggtcctagagggagcgggaggagaaggagatggttgtccttgccaacttggggcttcctcagccactatttttccagacttctgctgcatgggaggggactgggtcactgaggcccagagggagaagagagggtacatcaaagtcacacaatcagccaagctggctcttggccagaataaagtgagctgccactggctatcaaggcacctcacagaaagtgaccagctggctgtccttttagggtcttttcctcccctcttgagttccagcctccacaccagtacccagagaaaatattctagactcatactagatcacatccttcttctgcatgaaacctttccaaggttccccagggtctccgtcctgtgcctggcaaaggcccctcaggggctggtcaccagccccatcacaattctggccacctgaacacttctgatcttccgctctccaggcctttgctcaggccatgccctccgcccagcacatctgctcctccacctgcacctgactccctggccctcgtgaagccactcccatactcctagacagggctgctgcgccctccacttctgggctcctgaccagctctggtatgtcagtttctgcattcattcctgtctctattagttataaggcaagttctgtgggatgggaactacatctcccttttacagaggggaaaccaaggcccagcacaaaacctgagaccacaaagcatcttgcctcaaaaaatccctcttggctcggcgcggtggctcatgcctgtaatcccagcactttgagcactttgggaggtcgagacgggtggatcatctgaagtcggaattcaagaccagcctggccaacatggtgaaacgccatctctactaaaaatacaaaaaattagatgccgggcacggtggctcacgcctgtaatcccagcactttgggaggccgaggcaggcagatcacaaggtcaggagatcgagatcatcctggctaacgcggggaaaccccgtctctactaaaaatacaaaaaaattaggcgggcgtggtgacacgcgcctgtagtcccagctactcgggaggctgaagcaggagaatcacttgaacccgggaggcggaggttacagtgagccaagatcacgccactgcactccagcccggataacaaaacgagacttcatctcaaaaaaaaaaaaaaaaagtagctgggcatggtggcgggtgcctggaatcccagctactcaggaggctgaggcagaagtatcgcttgaacccagaaggcggaggttgcagtaagccgagatcgcaccattgcactcccacctgggtgacaagagcaagactccatctcaaaaaaaaaaaaaaagaaagaaaagaaaaaaaaattcccctctccttgaagggaggtaggagacccacctgatccctcagcttccacagatggctctttctcaccaccctcacacttacacacacttgactatgaactccaccatgtgggggtggagggattgtgtctgccaaagtacatccacaaagcccagcctagcacgtggcacactgtgtgtgttcaatacatgtttactgggtttattttattaatttaaaatagagacgggggccaggcgcagtggctcacacctgtaatcccagcactttgggaggcctaggtggatggatcaccaggtcagaagattgagaccactctggccgacacggtgaaaccctgtctctactaaaaatacagaaaaaaaaaattagcctggcttcatggcacacctataatcccagctactcgggaggccaagataggagaatcacttgaacaggggaggtggaggttgcagtgaaccgagatcacactactggcactctagcctgggagacagagcgagactgtctaaaaaaaaaaaaaagggagacaggggtctcactatgttgcccaggctggtcctgaactcctggcctcaagcaatcctcctgcctcagcttcccaaagtgctgggattacaggtgtgaaccactgcacccagacgtttactgggtttaaatctgagcccaccccactcaggggtacaggatctggttcatttatctcccagaaygatgccttgggttgcgtcccctctaaactctggcacattccagcccctctttgggagaaagaacatctcttcttgcccaggccctagtgagacatgcatcgcaagacatgctccccccttcctccccgctgggctccagctgctgccagccctccaagaaaggagaggccctgagttgggctattttggtatctggggtgggcacccgcagggctaaggttaccttggtatgttaagggctccctggggcaggactatataaccccagagggactgccccatgctgactccttgcttctttccagccggagccgctgccttgccccccggagactgaagacatggtgagtgagaatcctccaacccctgcccagatcccttagacctcagggcagcctcaccctttgaaagaaagtagctggttyccagtccaacaaaaagttaaaaggatgctcatctctttctcggcatcactgatggaaaacagactgtgtgatggcctaaaggatccaatcaatgataatccgcccagacattcaactcacaggggcccagtccctctcaaagcctgatccattcattcctgtactccatcttcctaaggccctctggcaccagccaggcaataactcccatcccattttacaaatgagaaagtagaggctcaggccaggtgctgtggttcacgcctgtaatcccagcactttgggaggccaaggtggttggatcacttgaagccaggagttcgagaccagcctggccaacaggcgaaaccccgtctctactaaaaatacaaaaattaactgggcgtggtggtgcatgcctgtaatcccagctactacggaggctggggcataagaatcgcttgaacccgggaggcagaggttgcggtaagccgagatcgcagcaccgcactccagcctgggtgacagagcaagactctgtctcaaaaaaaaaaaaaaaaagaaaagaaaagtagaggctcaaacagggcaaatgagtggctggggtcacacagcaagtctgaggctcagaggagctaggctcaggacactgagaagataaggaagcttccacccattgtgggggatggagagttggagacccaggagccacagacgggaatttggggaatgcaatcaaagcaagccccctcagcaaagaggtcccaaggaaggggagactcaggccaaagggctgctttaggaacagggactcgaagaattctgactcttaatccattgcccccagagaggtggagggactggtccatgggcccctttgttcaaccctcaccctccaggcacccaagagggccaagagaaggacagtagagggcggaagctccagcgtcttctccatgttcgaccagactcagatccaggagttcaaagaggtgggtgaggggacggggaaactggaaggctgaccaaaagcagccctgctggccctctccctggaatgtgcacctgcttgaaggaggggaaaggtttagaattccttcctcccctctctgcttggggtggaagaggacagttggctgagagccagcatctgatcctcctggggtagggatgctgaggctgggccatgggggacctaaccctccccaccacggccctccccaggccttcactgtgatcgaccagaaccgtgatggtattatagacaaggaggaccttcgggacaccttcgcagccatgggtgagccccctacccccaggtgggaatattcaaggctgcagagtctaggaaattcagtggccttgggttccagccctgtcagctccaccttgggcctcagtctacccagctgaaaaatgaatgggatcagctgaattagtgggaagcgcaggcccggccccaggagcctgctccagcccatgcttcccccaaccccctccaggccgcctcaatgtgaagaatgaggagttggatgccatgatgaaggaagccagcrgtcccatcaacttcaccgtcttcctgaccatgttcggggagaagctcaagggtgagtggagtgtcctgggtccaaggccccggctgccttttcccagacccttcagggacccatcagcttcatgtgccctctgacccccacaggtgccgaccctgaggatgtgatcaccggagccttcaaggtcttggaccctgagggaaagggcaccatcaagaagaagttgtaagcatcggctcccccacccttccgacccttcccccactccaccagctgctcccacactgacagcctccttaaatttctaccaaggctgggccctgtggctcaggcctataatcccagtgctttgggaggcagaggcaggaggatttacttgaggacaggagtttgagatcagcctggataacacagcatgaccctgtttctaaaaacttaactaaaaaattcgtgggctggccgggcacagtggctcatgcctgtaatcccagcactttgggaggccaaggcgggcggatcatgtgaggtcaggagtccaagaacagcctggccaacacggtgaaaccccgtctctactaaaaatacaaaaattagctgggcgtggtggcgggcgcctgtagtcccagctactagggagactgggacatgagaatcgcttgaaccctggagtcggaggttgcagtgagccaagatcacgccactgccctccaacctgggcgacaatagcaaaactccgtctccaaaaaaaagaaaaaaaaaaattcgcgggagtggtggcaaacacctatagtcccagctactccggaggctgaggcaggaagatcccttgagcccaagagttccaggttgcagtgagccgtgatcaaaccactgcattccagcctgggcgacagggtgagaccctgtctcaaaacraacaaaaacccaaaaattcctacgaagggttaggcactgccagaggtaagggagtagttaagattgtggtaatgggcggtaagattgcattttcacagcaaatgtgggcggagagggcaaaagcgagtgtctgggaggccaatgaaggaagtagagtgacctgggttttcaggggaggctggggctggcatcggggatgaggtgcgagggagtggaaaggaaccaggaacccaatcgcaactccccttgtgtcacctctctccagcctggaggagctgctgaccacgcagtgtgaccgcttctcccaggaggaggtgagtggggaccggggcggggccggagcagcaaaggggctggggccggggagactaagggcctgtgcgagacgcccctacgtctttccccagatcaagaacatgtgggcggccttcccccccgacgtgggcggcaacgtcgactacaaaaacatctgctacgtcatcacgcacggcgacgccaaggaccaggagtaggggcacccgcgggcctccgctgcccgacgcttctgttcggcccgacctccaccccggctcccaataaaatttaactgatctttgtttcttatgggcggcgccttcagagtgtctgcgcgagggcctcaggtgggagcgccccacaaatgaatggatgcggcctggaggcctgcgggggtcggccccacaatctacgcccgccgcctttttccgcaaggaaggagaaggctcgcgtggccgcgggaagctcagtttttattgaagacagagtctgggagaagaagggggactccggaagacagtgatgcggtcggagattgtgcaggccccgggccgggaagtgggcggtgtctgggtgggcgggaccagcgccggggcggggctacggactcaggctgggagaacctccccctagcccgcgcgagggcggcacccgcggaggtcccggggggcgctgggcagtgtggggcgcggggattggacaagaggccgactgaaggcggagccgaggtaaggccgggcggggcgtggcctcagagggcgtctgactgctcgccctgggcctggctctgctgcatttgggcctgcatcttctccagcatctcttgcatgcggcgcagctgtgcagggcgagattgcaggcggtgacctggcgaagccagagggggacctggggcatcggtcggggggaagcgaggtgcgtgctcacctcttcgtctttctcgcggatcagcttctcggtgtccgccagaggcagcatgggcagcgggatctctgtggcgctctggcgggaaagcttactgcgggacagtgggaaggggacaggaatcaggagcgggacctgaggttgtgggtgaggcccaggaggcagggcctggggcgaggttggggtctaggaggcggagccagttccttgaggttagggccggnnnnnnnnnnnnnnnnnnnnnnnnnnnnnnnnnnnnnnnnnnnnnnnnnnnnnnnnnnnnnnnnnnnnnnnnnnnnnnnnnnnnnnnnnnnnnnnnnnnnnnnnnnnnnnnnnnnnnnnnnnnnnnnnnnnnnnnnnnnnnnnnnnnnnnnnnnnnnnnnnnnnnnnnnnnnnnnnnnnnnnnnnnnnnnnnnnnnnnnnnnnnnnnnnnnnnnnnnnnnnnnnnnnnnnnnnnnnnnnnnnnnnnnnnnnnnnnnnnnnnnnnnnnnnnnnnnnnnnnnncccggtagccctcgtagagcagatcgtgcgtcacctctttcaggtcctgcaggtgtgtctgcaccagcatccgtcgcaggttcaggaaatcgcagtgatgtgggttctccactggagggggggcggcgcggaccagcgaacgtcagggagtttcgggtccaacccacccgtaagggtcgggtctacaggaaagtcctgctgccactctagcggagggtccgcggtctgcagcccagcgacccccctttcctcctaggatcccctgggaccaaagcccaccccaacttcacatgttgagtgcgcctgacccagaggccccgggctccctgctggccttaggacccctgcctggcctcactcaccctccacggtcccccaggagtagcggcgtcccctcaccggccggttcccgccatccctcaccacctcgcatgatcccacgactgcaaaagggatgctttcctggagggcagggggcaggggttcaccattggctcacacggcagaaactttctctttcccagcttcaatctccacacccgcctcctctgcttcctgccccttcctcttttttttttttttttttttttttttttttttgagacagggtctcactccattgcccaggctggagtgttcaagtgattctcctgcctcagcctcccgagtagctggaattacaggcgcccaccatcacacctggcaaatttgtgtatttttagtagaggtggggtctcgccatgttgcccaggctggtctggaactcctgacctcaggggatcctcccgtctcagcctcccaaagtgctgggattacagacgtgagccaccgtgcccggcctgccttccttctttgtttcccacaccttcatctctgcatcctgcctcttgaagtcttcatcttcatcagagtcacattcggggaactggtagatgtggatctcctcttccttcaactgatcccggatctcaggggaaacagatatagagacagtgtgaaacgggccacaatgacagacatttcatgaccagagacagtgagacacagagatactgggtggtcagagacagagagaaagacatgaaagacagagatggggagagatggacatacaggaagacaaaaacaaaatctcagagacatagatggtgagaaacacaagattctaagatggggcagacattaagagaccaggagaagcctgggcaatatagctagatcccatctctacaacaaatatacacatatattttgaaacaaggtttcactctatcacccaggctggagtccagtggctccatcttggttcactgcagcctcaacctctcaggctcaggtgatcctcccatctcagcctcctgagtaactgggactacaagtgcacaccaccacacctggctggtttttgtactttttgtagagatggggttttaccatgttgccgtggcttgtcttaaactcttcagctcaagcagtccactgacctcagcctcccaaagtgctgggattaacaggtgtctgccaccaagcccagccaaaaaaatattttttaagttagccaggcatggtggtgttcatctatagtccctgctactcaagaggctgaggcaggaggatcacttgcgcctacaagttcgaggctgcagtgagctctgatcttgccactgtactgcagcctgggccacagagtgagactctatctaaaaaaaaagagagagagaaagagaggccgagagagatataagcagaaacagtgggaaagggctctgaagacacggggtgggggccagagggaagtcactatgttctcatgtctatgctcctgccctcaaataggcctcagccaggcatctagcccgggggctgcatatgtagcctattttgagccttcagagacatggctatgctggcggcttaccacccgccttcctcagaagcttctcctacaatctagcctgatgcaccatgctccagaaaggccacttcaagatcaaagaagtctaagctgaaatcaggtttggcttcacatggggtcaaaggtcagaggtcatcactcacaccttctgcttgagggcctgggtttcctggggcatcagagcatccgctttgccaatgactgggatgatgttgactttctcgtgtactgcccggaggaaggccacatctaggggccggagcctgcacccagggattggtcattgcccagcctcagggggcagagaccccccagccctccctaaatgcgccagcccccaggatccccccaccagacccccggccgaagggtgagatgaagtagaggcagcagtggactcgggagtcctggatgttcttccggttcaggccactctcatccctaaggtactgctcaaattgctcctcgatgaatttcaccaccggaagccagctgggtgtggggagaggatgtgaggtcagagatcaaaggccagagggcagggggcaaggctagccaggactgtgggagtagaatgtcatttctttggctccctccaaagacattaaggggaactggtgggggcctaggtgagtcatcaagaagcacagggacccagtggccctctgaaacagacaccaccttttgagatagggagccagcacaaaccagtcctgtaactctccagggagtcgccactgtgaaaggctgagcctctgtcccctttcctcttcctcaccagtcagagcagtccactgagtccccaaagccaggtgtgtccacaagggtcagcttcactttcacacccccttcctcaatctctacgccccggcgctcaatggccagggtctgtgtcaagcgagctgtgggatgggggagaggtcagggatccggggaggctctgaggcagaattaatttcctttgtcaatatcacagttgcctgcacccatttcccaggggaggaaagtctcagaaaaaaagcagtcaactacctgagtccccagatggaaaagactagggtgtaacctggggacaggggctactgcctcaagagggtggggagggtcttaccactggcctctggcacctggcgatcctcatagaggttggtgaggaagaggctgttgatgagggtggatttccctaggcctgactcccctgtggacagaacaggcccaactggtcaggggaggggacagccagggcctcctaaggacatcccctccgcagttccctctccaaaacccccagacctgccaccattagcgtgaagtcaaaccccttcttgacagacttgcggtgcagctggttggggagggcagcaaaacccacgtactccttgtcctatggatgggggtggacaatatgaggctgctggcaatggcaggcagggtccccaggatcacttgagttcctgggctaggaagagtcagtggggtctggggaccccaggcatgggggctgggggccgagatgcccaggtttctgggtgtaaggactcaccatgactccgccagccatcactgcacctgccgtctctccccacttcctctggtggggcaggaagctgagtgcggctaacaagggggcgggcagaagaggcagctgagatgctcaaactggcccagtcccagagaggtggggaaggccaaggccaagaacacttggggttgccacctcctggacccctttgcccatcacctgtctacgtaccttcaaccctccatccttcacacatctggattccaagtcccactgtagctccatcatcgtggtgagacatggggtatgtgcagagaggaaggaagtggctccctttgttagcaggggagatgaaggttttgatgagctgattagaaaacagttcccaggacgggcaaggtggctctcgcctgtaatctcagcactttgggaggcggaggagggaggacagcttgagccaaggagttccagaccagcctgggcaacagagggacgtgcccctctaccatctctacaaaacattaaaaaattagccaggcatgttggtacaatcctgtagtcccagctactggggaggctgaggtgggaggattgcatgagcccagaagatcaagactgcagtgagctgtgatcacaccactacactccagcctgagcaacacagcaaaaccctgtttctttttctttctttctttctttttttgagacggagtctcgctctgttgcccaggctggagtgtagtggcgccatctcggctcactgcaagctccacctcccgggttcccgccattctcctgcctcagcctcccgagtagctgggactacaggcacctgctaccgcgcctggctaatttttttgtgtttttagtagagacgagatttcaccgtgttagccaggatggtttcgatctcctgacctcgtgatctgcccgcctcggcctcccaaactgctgggattacgggcgtgagccaccatgccaggccaacgctgtttcaaaaaaagaaaaagaaaaaagtggaccagaagccatgatgggattgggagtgggtgaagccatacattttccagctcagacaatggattcataaaaggactccaggtctttggacaccactgcccgagagattttccttcagaatcctggccaaagaactccactgctcaaaatccttcaggaactccccagtaactcagagtcaagtctgaattctggcctgactgccaaagcctccctcagctggcctcatcaccccatctctcactcttccaaacgtccttggctctctacccacattgagcttttcctttttctgaatcagttaaactcttcctcatccttcaagtgtttctttccaagggctctgcctctatgcaatctctccacctaccctaggcagggtcattgtccctccttcagattcccagcacctggctggcgtgg

SEQ ID NO: 96465 - DNA, 19826 bp, Homo sapiens
taaaatccttaacttgaataagcaaactcaagcatttcagccctctttaaaatattgggcagaattccagcaacttttagagagccttaacccttggacctacttcaaacagcacctcagtgtcttttgtgtaattattggaaaaatgttattatgtttctgctttttgttcacagtctgtaaaatcagctggaccaccagctggcaattgagagctgcacagcctgcaattacctttattcaactaatgcaaaaacagaaagggggagatgttggaggccaaaagaatgagggtcgtgaccaactcagtataccactggaggctatatgagcaaacagcaaactgttctcatgaatgcaggatgttggcaagctgacaactgcgtctgccaccagaaggaatgctgaggacagtcacacaccaggtgcagttgttccttgtagttatctataggaacatctggagcctgttgtataaagaaagcaattatgtgagcctgtgctaaatcaagcagctgaccaactactacctcttagtccctgttgattctacctaataaatatgaagggctgtagaagctcagggcccttattccctagaagcaaggagcccccgacactttctttaaaacagatccttttctttgtctccatttctgcgttcgtcctcctttgttcagtcccgaaccgacagccacatttgtgggtcatgcagtgtctaattctcccagagagctcacctggtccagcaccagctgcccccacacaggggacgagctctgcaagggctccgactgcagccacctcttccacctgaggagggcgctgtccacgcacatatgcggatgtgtgcacagatgtgggtgccagtttgcattcccctcccttgtggccaccaccaggcacatgcacttgggtgagcactgccaccactgcctacagtgtggcactccccttgctgactgggaaacttgctccagcaccagcttatccatgcaggagagaagccctactggtgctttgactgtgtgtggtgcgtgcaccaaagaggctcccttggccattcataggcacacgcatacaggtgagaagcctcagtcctgctctgagtgtggcatctgcttctcctgctaaaaaaaagaaaaaaagaaataaaagcttggcttttccctttttagatggagtctcactttgtcccctaggctggagtgcagtgatgtgatctcagctcactgcaacctctgcctcccatgtccaagcgattctcctgcctcagcctcccaagtagctgggattacaggcatgtgccaccacacccgcctaatttttttgtatttagtagagagggagtttcaccatgttggtcaggctggtcttgaactcctgacctcaggtgatttgccctcctcagcctcccaaagtgctgggattataggcacgaaccatcgtgcctggcctgacttttcttttcttttttgagatggagtttcactcttgttgcccaggctggagtgcaatggtgcaatctgggctcactgcaacctcagcctccccggttcaagcgattctcctgcctcagcctcctaagtagctgggattacaggcatgcaccaccactctcggctaattttttgtatttagtagagacagggtttcaccatgtgggtcaggctggtcttgaactcctgacctcaggcaatccacccgcctcagcctcctgaagtgctgggatggattacaggtgtgagccaccacgcccagctgacctgacttttcttaacagattcatgcagcccaggttttttgtttgtttgtttgtttttgttctattcatttaaacacagagtctcaatctgttgaccacgctggagcgcagtggtgtaataatcatagttaactgcagccttgaactcttgggctcaagtcatcctctcgccttagcctcccaaagggctgggactacaggcatgagccaccatgcccacacgcccagccacaattaggaggctagagctcccgccttttttttttgttgttgttgttgtttttgttttttgagacaggatctcattctttcgcccaggctggagtgcagtggtgcaatcttggctactgtagccttgacctcccaagtctcaatcgatccccccacctcagcttcccaagtagctgggactataagtgcccgacaccatgcctagttaatttttgtattttttgtagagaaagggttttgccatggtggccaggctggtcttgaactcctgggctcaagcaatccccccacctcggcctcccaaagtgctgggattataggtgtgagccaccacacctagcctgtaactgtagttttttttccaccacctctgttcaaacatctccttcctctgaatatctcactgctgcctcctcatcctcctcctccttcttctttcttctccttcctctttttttttttttttttttgagacgagtctcgctcggtcgaaagctccgcctcccgggttcacgccattctcctgcctcagcctcctgagtagctgggactacagaagcccaccaccatgcctggctaattttttatatttttagtagagacggggtttcaccgtgttagccaggatggtcttgatctcctgacctagtgatctgcccgcctcggcctcccaaagtgctgggattacaggcgtgagccaccaagcccagcctttttttttttttttttttttgagacttagtcttactctgtcacccaggctggagtgcagtggcaccatcttggatcactgcaacctccgccttccagtttcaaacaattctcttcggctgggcctggtggctcatgtctgtaatcccagcactttgggaggtcgaggcggacagatcagctgaggtcaggagttcaagaccagcctgaccaacatgaagaaaccccatctctactaaaaatacaaaattagctgggtgtagtggcgcatgcctgtaatcccagctactcgggaggctgaggcaggagaatcgtttgaatccgggaggcggaggttgtggtgagccgagattgctccattgcactcagcctggggaacaagagcaaaactccgtctcaaaacaaaacaaaacaaaacaaaacagaaaacaattctcatgcctcagcctcccaagtagcagggactataggcatgtgccaccaagcccggctaatttttgtatttttagtagagacagggttttgccatgttggccaggctggtcttgaactcctggcctcacgtgatccacccacctcggcctcccaaactgctgggattacaggtgtgagccactgctcccggcctcattgccttctaattttgtgacttttcctgccacattgtttgtctttattccttgaaagctttgaggttagtgttttgcccatagtatatgctttacaatattgattaaagggttagagagatagatgtgcatgtcactagctaagagacatggcaaatggtgtattctcctgctcgcaggacccttgggggtggcattgagctggtgaaactctgcagtataacacatacatagaagtaggggctagggcgggcgtggtggctcatgcctgtaatcccagcactttgggaggcagaggtggttggatcatgaggtcaggagtttgagaccagcctggccaagatggtgaaatcccgtctctactaaaaatacaaaaattagccgagcaaagtggcgggtgcctgtaatctcagctactcgggaggctgaggcaggagaatcacttgaacccgggaggccaaggttgcagtgagccgagtttgcaccactgcactctagcctgggcaacagagcaagactccgtctaaaaaaaaaaaaaaaaagggctgggcacagtggctcacgcctgtaatcccagcactttgggaggctgagacgggtggatcacgaggtcaggagatcaagaccatcctggctaacatggtgaaaccccgtctctactaaaaatacaaaaaattagctgggcgtggtggcgggcgcctgtagtcccagctacccgggaggctgaggcaggagaatggcgtgagcccgggaggcggagcttgcagtgagccgagatggcgccactgccctccagcctgggtgacagagcgagactccgtctcaaaaaaaaaaaaaaaaaaaaaatgtggaggctaatggggtgggtgctggcttgttccatcagcaattttcagttcagtgcctttcacatacatgcttgtatcattctgttatgattcattgtgaatttatatgctttactagactgtaagctccattcaaagcatggcctatgacttatttatgtacgctctcccaattgcctagcactatgctttgtacgttgaacaaatgtcacgtgaaaataatgtagggagattatgcagaatattgaacttgagaagaaaacaagagctcaggtggattcctggtttagcaagcaaattaggatactgtgaaggaaggatgcctatcagtggtatgaataaaggctctgtctgccccaggtttaaatctttattccccactccttactagcagtatggccctggaaactcatggaatccctctgagatcgtttcttcattagtagaaccaggatgataaccattggttcacaaaatgctagtaaagaattaataacgggctgggtgtggtggctcactcctgtaatcccagcactttgggagaccgaggtgggcggattgcttgagctcaggagttcgagaccagcctgggaaacatggcgaaacaccgtctctaccaaaaatacaaaaaattagcagagcactgtgggtgcatgccttcactccagcctgggcaacggaatgagacccagtctcaaaaaaaaaaagcgaataactaatggctccggtgctgtggcttatgccagtaatcccagccctttgggaggacgaggcaggaggatcacttagcctaagggttcgagaccagcctgggcaacacagggaaaccctgactcaacaaataacataaaaaattagccaggcgtggtagtgcacaccagtagtcccagttactctgaaggctgaggcaggacgattgcttgagcccaggagttagaggctgcagtgagctgagattgcactactgcattccatcccgcccgggtaacagagtgagaccctgtctcaaaaaaataaaaataaggccgggcatagtggctcacgcctgtaatcctagcacttcgtggggccgaggtgggtgaatcacttgaggtcagaagttcgagaccagcctggctaacatggtgaaaccccatctctgctaataaatatgaatattagtcaggagtggtggcacgcgcctgtaatctcacttactcgggaggctgaggcaggagaatcgcttgaacgtgggaggtggaagctgcagtgagccgagatttcgccactgcactccagcctgggcgacagagcacgactctgtctcaaaaataaataaataaaataaaaataaaaaataataaagatgaaatatgtaatatgctgggcatggcgcctgcccccaggaaatgctaaccataattccctcccctaaagggcaaacaaagaagataaccattctccaaagtcaaggatgctctgagaacaccagtaaaaggaactcaggataatctcagctctaactcggccagagtggctccatcgctcaaatcgttccctccttcagtgattggctgagcctgccagagtcgaacagcggaaagcagccccggggcctcttgctgcccccaggtcggtgcaagtcgcttcacaactccttgtagtcgcctgatcctagcagtccagcttcctgcccttatgcagctcttggcttcgttcaaacggaccgcctttgctagcacccaatcagaacgctcgatcttcggctctcgtccaatgaacgcgcgtattggggaggggaaaaaagacggcgtgaagcccaatcgcagcgccattacacttgagggcaaagaggttaggaagccggcatggcgctccggtcaataaaatcgatagctggaagctgcctgtgttccaggcaaaggcggtgcggtagcagcgccgccattttccccgaaggcatcttccggtgcctttcacccaagttcgggcaggagtttcctgaataacagcaaaaggtttccgttagccccgcgggcgaccaattccgattccctccgggcctccccggccacgctcagccctggtccggcaggggctcctcgatcccaggggccgccagcgcccgagggccgaggcctggacacggaaggccgtggcgccggcttctcgggtcccatggcgccaccttcggctccgctccctgcgcagggaccaggaaaggccagacccagtcggaaaaggggcaggaggccgagggctctgaagttcgtggacgtggccgtgtacttctccccggaggagtggggctgcctgcggcccgcgcagagggccctgtaccgggacgtgatgcgggagacctacggtcacctgggcgcgctcggtgaggccggccccatccgctgccgcggggcgcgaagggatgcaggagccggagagggtgtaggcagggaggccacggtcctggcaggcgaccaggttgtcaggggaggtgggcaggggcttagcaggaggtgccgtcggggagatactactcggcgtgatctaggagctggccttctgatttgttctctttccccagggtgcgcaggtcccaaaccagccctcatctcctggttggaacgaaacaccgatgactgggaaccggctgctctagatccgcaggagtacccgagagggctaacagtccagagaagtgagtgctaaataaccacgcagagcctgcagccctcctataacgttctacctctaacggctctgtccagagttttggttgggctaggggtgggtgccgcgtatttagtatattcatcttcccagcctcttgtgtctggtggtgtggggccggtccaccacacagagattcctatgtcagtctgcaagctgcagttttccactgtgtgaatgaatcagtgggcttattcttcgtcttttttttttttttttttttttgtagaaacattgtcttgctcagttcggtcttgaacttctggcctcaagcgatcctcctgccttggcctcccaaaatgcaggggttactggcgtgagccattgcagccagccagaatcagtgagcttttaacaggtgctaccctctgcctcctttccaggatctctgcctctagccacctttgagttggaccaaagagatcctaaacttctcagagttttctgggttttggttgaagggagctcatggggaacagctgcctgggatgcaggggcctctttctgctcttacggcaggatgacccttatcagcgaaggacatactgcaatctcctcagaatccaacaaggctctgcttaaccccattcaggtagaagggtcccagatccacccatagtagaagatggagctgtctgggctggaatttcagagccagattcttcaagaccagggatagctgtccaagattcagatctgaccatgatatttccttgcttaaaacttttcagttaatttttgccaaggttgttaaatggccattggttatatctaaatcacttggggaacttggtaaaaacgcaggttccaggaccccatcccagagctattcattcactcgtgtgaatgtttaggaacttccattttttaaatagcctcagctgattcagatgtgcatctaggtttgaaaaccggccggctggtggctcatgcctgtaatcccagcactttgggaggccgaggtgggtagatcacttgaggtccggagttcaagaccagcctgaccaacatcgtgaaaccccgtctctactaaaaaaatacaaaaattagccgggcactatggtgggcgcctgtaattccagctactcaggaggctgaggcagggagaattgcttgatcctgggaggtggaagttacagtgagccgagatcatgccagtgtactccagcctgggtgccacagtgagactccatcttgggggaaaaaaaaaaagaaaagaaaaccattgggtaaaatacagtccaaggtctttaacaatgctaacagcagtggttctcaaagcgtggtctcagaccagaagcagcattatttggaaacttgttagaaatgcacattcttggaccctaccccagacctgctgaatccaaagcgggcactagggcctggcattctgtttcagtaaatcctcccaatgattctgatcacagtggagtttgagaaccattggcttagagggccttttgacccagtcactgctagctcatacctcataggtttccatatcttgccttacactcttttgtgtgtgtgtgagacggagtcttgctctgttgcccaggcaggagtgcagtggcacgatctcagctcactgtaacctcttgctcccggtttcaagcaattctcctgtctcagcctctggagtaggtgggactacaggtgcccacgatcacacccggctaatttttagtagagacagggtttctccatattggtcaagctggtctcgaactcctgacctcaggtgatccgcctgccttggccttccaaagtgctgggattgcaggtgtaagccaccgcgcccagcctgtcttgcttttacactttgtgtctaagaagatcttagggcctgtgcacactgtacactgagccttgggacttatgtttcttttcttttttttttttgagacggagttttgctcttccacccaggctggagtgtagtagtgcaatcttggctcactgcaacctttgccttccggtttcaagtaatcatcttgactcagtttcccaagtagctgggattacaggcgcccgccagcatgcacggctaatttttgtatttttagtagagacggggtttcaccatgttggccaggctggtctcgaactcctgacctcacagtccgcccaccttggcctcccaaagtgctgggattataggaatgagccactgcgcttggctgggacttacgtttctaacactgcataattttaattcttttttttttttttttttttttttttgagatggagtctcactctgtcatgcaggctggagtgcaatggcgtgatcttggctcactgcaacctccgcctcccaggatcaagtgattctcccacctcagcctctgggtagctgggattataggcacctgctattgtgcccagctaatttttatatttttgtagagacggggtttcaccatgttggccaggctggtcttgaactcctgacctcaggtgatccgcctgcctcagcctcctaaagtgctaggattacagacatgagccaccacgcccagccacattttttaaagaatcagctaagtcaaataaaccatccacaatggaattctgtgtagctgtaaaatagaaaaaagatttgctgacataaaatgatctttagaatatattaagtgaaaaaatgtaaagtgtgtataaggtgtgtatatgttgtcttttgtataagaaaggtgagctgggcatggtggctcacgcctgtagtcactttgggagatagaggtgagcagataacctgaggtcaggagttcgagaccaacctggccaacatggtgaaaccctgactctactaaaaatacaaaaaattagctgggcatagtggtgcatgcctgtaatcccagctacttaggaggctgaggcagggagaatcacttgaacccgggaggcggagatttcagtgaactgagatcacaccattgcactccagcctgggtgacagagcgtgactctgtctcaaaaaagaaaaaaaaaaagaaaggtggggaagagaacatacgctgtaaagcatgtgtatgcaatctcttatgaaagaaagatagggaaggtgacatttgtattgcatcaaaaaaatgggaaaaaactaatatggtttctacaaggtagattggaaaaaggtggcagcaagacttctctgtattcctttattaatattttgacttgtttgttttttgagatagggtcttgctgtgttgcccaggctggagtacagtggtgccatcatggttcacagtagccttgaactcctgggctcaagtaatcctctacctcagccttccaagtagctaggactacaggcaggcacgcgtgccaccaggccaggctaatatttgtattttttgtagagatggggtctcactatgctgcccaggctgatcttgaactcctgggttcaagcgatctcttgccttgggctcccaaagtgctgggattacaggcatgagcaaccatgcctggctgatattttgacttttgaatgatgtaagcttacctcttcaaaaatattccttttttttttttttttgagatggaatctcgctctctcgcccaggttggagtgcagtggcacaatctcggctcactgcaacctctgcctcccgggcgattctcctgcctcagccttctgggtagctgggattacaggtgcgtgccaccacgcccggctaatttttgtatttttagtagaaacagggtttcaccatgttggtcaggctgctctcaaactcctgaccttgtgatctgcccgcctcggcctcccagtgcttacgattacaagcgtgatccactgtgcccggcctcaatttttaaagttagtttaatctccgagaaatcttcctagacttctccaagctgggttagaagctcctgtaatgcacaccgtatttgcatgacagtatgtcacacttagctgtctgtggcactaggaattgagaccagggggtgagtctattggtcttgtaacctataatgtaattgacaagagcaggagcccagtatttgttaaattaatgcttctgtatttctatagaaagcagaaccagaaagaagaatggggagaaggaagtattcccgcctaaggaggcaccccgaaaggggaagcgaggccggaggcccagcaaaccccgactgattcctaggcagacgtccgggggccccatctgccctgactgcggctgtaccttccctgatcatcaggccctggagagccacaagtgcgcccagaatctaaaaaagccttacccttgcccagactgtgggcgccgcttttcctatccatccctgctggtcagtcaccggcgggcacactcyggcgagtgcccctatgtttgtgaccagtgtggcaaacgtttctcccagcgcaagaacctctcccagcaccaggtcatccatacaggggagaagccctatcactgccctgactgtggtcgctgcttccggaggagccggtccttggccaatcaccggaccacacacacaggygaaaaaccccaccagtgccctagctgtggacgtcgcttcgcctacccctccctgctagccatccaccagcgtacacacacgggagagaagccctacacttgcctcgagtgcaaccgccgcttccgccagcgcacggccctcgtcatccaccagcgcatccacacrggcgagaagccctacccgtgcccggactgcgagcggcgcttctcctcctcctctcgcctggtcagtcaccggcgtgtgcactctggggagcgtccctatgcctgcgagcactgtgaggcccgcttctcccagcgcagcacgctgctccagcaccagctcttgcacaccggagagaagccctacccctgcccagactgtgggcgtgccttccggcggagcggctccctggccatccatcgcagcacgcacacagaggagaagctgcacgcctgcgacgactgtggtcgccgctttgcctacccctcactgctggccagccaccggcgcgtgcactcgggcgagcggccctatgcctgcgacctttgctccaagcgttttgctcagtggagccacctggcccagcaccagctgctgcacacgggggagaarcctttcccctgcctcgagtgtggccggtgcttccgccagaggtggtctctggctgtccacaagtgtagccccaaggccccaaactgtagccctagatctgctatcgggggctccagtcagaggggcaacgcccattagaaggggaaggactgcctacgttcatttcattttatggagggtcccagaaaagggaaggaggagccccaggtcatacagggcagagtcagaactaaacccgggtctcctgctgcacagagctgaactttgtatcttgcaatgcgctggctgcctccctgtgcgtgtctggaacagtcccattaggagaggtgacgtcatttgcttaaagttttccaagctaccctatcctaaaatagtttgtgtggatatcagggctaaaagttctccccatctattttaggggctgtctgcttttctagtctgtccacacagggattacctgtcatcttgcatgcaatcaggagaatctcataggggcaggaccttcccctactctgcctcttcctccatactaggttggaaaaatctggtttagcccactttttgcaacactcctgccaagtggtcttctacccattgcttgaaaatctctcttgacagggagctcactacctcacaaggcaggtcatttcattgtgggatctatagaaggttaagtaccacattctcctctaaaccttgcctacgacatgtttaatacttcatctacatagcagcccttcagataatcacaaccactttgcccccaagttttcaggttaagtagcatgaatttggtcattccttaaagacagggtttcaatttccacacatgatctctgcaaacaggcactgggttttcagtgtcctttttgaagggtcatataaaaataaggtaacaccacagtgccactacaccttctggggctggacttgtttcagcagctttggttgcactgaatttgggggagctgcatggtaccaggggtttattgggttgcagatatataaatgccctaaacttaaaaaaaaaaaaaaagctataaaactaagtcttcatcttgtatttggaaaattggttcaagctgggtatgagacataagtgtagtcagctctgggagaaggttgctcttaaggagaagcagggacctgtggtttagcagcaggaagtgcaaatgggactggcttgtgctctacctggcagacctggattggcttcaggcagccagtgcctggaaaagcctggagaattgggccgtacttgaccctgattctcatcaggcacagatgaatcacaggcacctaagaatcggcacagaacttccatgaggcctcagtcagcattttttcacaaaatgagctgaggccattcaaggaggctagaaagagggaactgaatccagagaggaagagtctatagtcatcaagttgtatccatgccagcctccctccacagaggtggcagcagcgtggctcaatctgatccacctccatggcacccactgggtaggtgcttcataaagctttaccgagttaaatgtgaacaaggcctaccactttgccttgggcagctgcaccaaattagaatttccagatgtgactcatctcatattccaacagctggagtgggtcatcctttacccctgtggctccttcctacagctctcctgatctcagcacaagcaggggagcagctgggggaacacagctttatgtaattacctctgttcaatatttagcaagttgcattgtaacattgtaactgtttgtttctccttggatgatgagctacccccaagaaggggtcatatcagattgggtctcattaaaatgtctgatgaatgaattctgttccttgtggaattactttttacaaaatatcaatctggttccttgactctgtagcaatctttgctattctgatgggagagccagactttcagaccaggagacctgtcctgcccagcagagccctattaccaggtctgcccagccccctggtagagctggctctttccccttccctttgccaccagaacgcaaggatttcctcagctaggaattgtataactttctttgggactggattgtaattcataaaacttggtagccactgatggctaaattccattatgtggtctgtggagagcagaaatgggagataacctcctatgttccctgaagcacttcaatccacccgagctgggatcctggttccttattcagtgagagatcctagcatccttccaataacttcccctttccgcttaaggtggtttgagtttctgttatttgcaatcaaaagaatgaactaatacacagcctcagtctgggttaatctcccatctgcctccatgcctagatatgagctgtgaggaaaaacactgcattgctgctgagaggggccacgatacctttcctgaccttcaacctcagtagaaccttcaatattatgtcttctgggctgggtgcagtggctcatgcctgtaatctcagcactttgagaggccaaggcgggaggattgtttgacctgggagtttgagaccagcccgggcaatatagcaagacttaaaaagcaacaacagtaataagacaatattatgtcttccatatatatatatatatatagaattaaagttagatataaactaatagtttatatacaaatgtataaatataaatataaataaataagtacataaatactctggtagtccagagcaggaccaccctataggcagtgtgcccagagaagcattccatatatatatatatattttttttttttttttgagatggagtcttgctttgtcgcccaggctggaatgcagtggcgtgatctcagctcactgcaacctcctcctcctgggttcaagtgattctcctgcctcagcctccctggtagctgggactacaggtgcctgccaccacacccggctgatctttggtatttttagttgagacaggatttcaccatgttagccaggatggtctcgatctcctgacttcatgatccacctgcctcagcctcccaaagtgctgggaattcaggtgtgagccactgctccctgcccattccatatatttttaaccagtaaatacctccgctttcactaggaaaatacaaggggtcaaataggagcttctttaacattctgctccctgccattactccaaattgaccagtgtgcccactcatatttacttctgatccatctcagcaagtcctggatatacaatgttcagcaacacagctgggcctgggtttcatccccttctgcccctcagggactttgctctattattcctactttctcgtctcctagttttatggtttcagattccctttcttgtcccaaagacactccagcctataagcatgctaagatctgcctttaaaacaataaaaaagaacttttctcttgatccctattattttcagctaaatgccttgaagcagtagcctacattcactgaatccacttttttcttttctttctttttttgagctggagcctcactctgtcacccaggctggagtgcagtggcacgatctctgctcactgcagcctccacctcctcccaggttcaagtgattctgtgcctcagcctcctgagtagctgagactgcaggtgtatgctatcacacccagctaatttttgtatttttagtagagacggggtttcaccatgttggccaggctgttctcaaactcctgacctcaagtgatctgcctgcctcagcttcccaaactgctgggattacaggtgtgagccactgcacctggcctgaatccacttctgtttattctttggcctactgcaatattaatagccacttgactgagcttttatgatgttccatgtactgtgttaggcactttatatacattccaatccaatgttcacaagaactctataaagtaggtgttaacagacactcctccatgagtctccctgctgtgactccaaattgaccagcgtgcccactcatgttgacttccgatccatctcggcaagtcctgccttcacatcttgttgagttggcaaaaattgcaagtccctgccttcaacagattctcagacttgagcctattcacagatctagagtctccccttctctagatctggggaggctgggttcccttgatgaaggacttgatgtcagttctacactgacaaaaacatgctgtagagcttctagccttttccaagtgtacctgcagccatttagcaagcacattagattggaatgtatataaagtgcttaactcagtacatggcacatcatgaaagctcagtcaagtgtctattaatactgcagtgggccaaagaataaacaagtgggttcagtgaatgtagactactgctactgtgagcatcagagaaggggaagtaactagagtttccagagatttgttgacattggacctaaactaattttaattctaagagatacaaaatttagtttaccaggtacaatggactcatgggatcaggtgtgtgtaggaatgggttaactcaggaggtgtaggttgttcaaaccctgcacattccaaagaaagctcatctttagaactggcatttggtctgctcctgggaaataacttctgagcccgtggaatattttatttgattagtgtttttgtatgccagaggtcttggcatacagcatgccatcatgctgtaccagtctgaacaaataagtttatcctaagtgtgatttatagtgaacattgttttttgctctggggtctgagtagcagagatcagtagtatggacactccaagcctatgtgactaatccccaataaaaaccccacacatggccgggcgcggtggctcacgtctgtaatcccagcactttgggagcgcgaggtgggtggatcacctgtggtcaggagtttgagaccagcctggccaacgtggtgaaaccccgtctctactaaaaatacaaaattagccaggtggtggcacacacctgtaatcccagctacttgggaggctgaggcaggagaattgcttgaacctgggaggtggaggttgcagtaagctgagatcgcaccattgctctccagcctgggcaacaaaagtaagactatctaaacaaacaaacaaacaaacaaaaaaccaaaacaaacaaacaaaaaaaccctgcaccctaaagcttgggtgaacttctctgtttgggaacaatcagcacctgttgtcaaaaatcattgcagggagaaaaaagcacgtccctgtgataccccactgggagtagacacctgaaagtttgtgcccggttgcatccggattttgtcccatgtaccttatccctttgatgattttaaatctgtgtcgttttgctttaataaaccataaatgtaagtataaccaataaataaaaataaataagcaaagcccttgccactcattacccagaacaattctcaggagtgttggcagcaagcaaaccttgagggagaggtaatgtctgcatccaggacaaagagcagcttccttactgcttactataaaacagcagatggctgggcatggtggctcacaactgtaatcccagaacttttggtggccaaggcaggaggattgcttgaggccaggagtttgagactaccctggccaacatagcaagaccccatcttatttatttatgtatttatttagagaaggagtctcactcttgtcacccaggctggagtgcagtggcgtgatcttggctcactgcaacctccacctcctgggttcaagcaactttcctgcctcagcctcccaagtagctgggattacactcacctgccaccatgcccagctaattttagtatttttgtagagacagggtttcaccatgttggtcaggctggtctcgaactcctgacctcaggtgatctgcctgccttggcctcccaaagtgctgggattacaggcgtgagccaccgctcccagccaaatcccatctttaaaaaggaaaaaaacagcaggagcttcctgttcctcccctatgatgcaactcactgtgtgtctagcatccatctgggcacatcccacattgcccctgcagggggcagaagggaaccaatgcaggcatgctcatgctgcttgttgtgccctgaacagtaaggtcttttgtctctgttttctgacagcatccatgaaacaataacagacccatttattaacctataagtagggcagcctcaaattccagatctgactgtaggtattgttttccttgaccagatgaggaaacagaggcacagtgacattaaatagcttgtcgaccgggcacagggtgcacgcctataatcccagcactttgggaggccgaggcgggtggatcacctgaggtcaggagttcgagaccggtctgaccaacatggtgaaatcccgtctctactaaatgcaaaaacatagccaggcatggtggcacatgcctgtaatctcaactacttgggaggctgaggcaggagaatcacttgaacccgggaggcaaaggttgcaatgagccgagattgcgccattgcactccagcctgggcaacaagagcaaaactccatctcaaaaaatttaaaaaaaaataaataacttgtccaggatcacatatctgggtgactgtaaagtcagctgccatgcaattattctaagactgtcctttaagataactgatgacctagttaacaaatcagtgcttcaatttttatcttacataccttagttttcctacttaagctctcttgtaacttagctttcatgccccgcattcttctagtcttcctggtgccgcttgtggcttctgctagtgcgtacatgtgagaattccttcccagcaagaaagagtcttgctctgtggcccaggctggagtgcagttgtgtgatcatggctcactgcagcttctacttccctgagctcaagtgatcctcctgcttcagcctcctgagtagttgggaccacaggcatgtgccaccacacccaactaatttttttgtattctttgtagggatgaggtttctccatgttgcccaggctggtctcgaactcctgggctcaagcaatcctcctgccttggcttcctagagtgctgggattacaggtgtgggccacctcgcccggccttatgttttttccaaatcccaaaaataatcagtaaagaaattgggaaaatgcaaaaaagtgataattatttattatttgtttgtttgtgtgtttattcatttattatttttgagatagagtcttactctgttgcccaggctggagtgcaacggcaagatctcggctcactgcaacctctgtctcctaggttcaagcaattctcctgcctcagcctcccaagtagctaggattacaggcgtgcgccaccacgcccggctaatttttttttttttttgtatttttagtagagatggggtttcaccatgttggccaggctggtcttgaactcctgatctcaggtgattcacctgcctcagcctcccaaagtgctgggattacaggcgtgagtcaccacgcccagctcatctgtatatcttctttggagaaatgtctatataaatcctatgcctgctttcatcttttttttttttaattctttttttgagtggtgtcttgctctgttgcccaggttggaatgctgtggtgccattttggctcactgcaccctccacctcccaggctcaagtgattttcatgccttagcctcctgagtagctgggattacaggtctgtgccacaatgccggctaatttttgtatttttagcagaaatggagtttcatcatctctgttggctaggctggtctcgaatttctggcctcaagtgatctgcctgtcttggcctcccaaag

SEQ ID NO: 96466 - DNA, 21901 bp, Homo sapiens
  misc_feature (1)...(21901): n = A,T,C or G
cagggcttcccttttctccccaccctgagtgtaatttcgcttgtcgacacttaagtcatgtgtccaacctgggccaatccctgtgctttctttttttgccccgagatggagttgtgctctttttcacccaggctggagtgcgatggcgcgatctcggctcactgcaacctccacctcctgggttcaagcgattctcctgcctcagcctccggagtagctgggattacaggtgcatggcaccatggaaccacaggacagccagaggcagagggggttccccaagtgcccatggggcacaggctgccagttcagtttgtcagccatagctcgctgtctgagcaaagcatcactcagtcaccatgtggggggcagcagggcactgggcagtgtggagtgtccgccctgcaaggccctgtgcccggaggactggcagcacccttcaagaggggaccagacagcccagctggccaaggcctcatgtctacttgctgtctgtgcagtcagtggaagagccctgctcttctttctctcacaagcaccctgctggaacaataaattaaatagtcctctggccttggaagtaaaataaggttttgtgttttatgaataaggaaatgaagattgggtatgatgaggctcagcccagctacctgacctgctgcccaccagaagccccggtggcttccagacccagcctctatcctagttataaatggccagccccacctccaccacaggcacagaatcaggtcattctcctttgaccactcggcagcacctgcctcaatgaccccaccactggccccccagcaaataccagctgttgcttctatgacatcattctctctacttcctttacctccaaccctcccaagaccatgccacatatggacacgacttcgacgtgtccacgtgctatcagctgacaaactggagaggtccggctctaggcaacgctctcctgcgggccagctggtgcctctgcccagcctgtccaatgctgacgcccctcagctggctccttcctggggccttctctccagtgacacctacccacccagttccccaaggcctcatattacttcattcccatgcccctcactcccgagaatgccaggaagtcccaaatcctggtcattcctccctccaaatgcctgttacaccactactgcacaaccaaagcaatgctgcttgtcagtcctgtcatttgtcacaccctgcaggggctgaccacaccagtccatcaggtgccctctccacttcctaagcagcagggagccagtcctagcacggccccagagagcagaccccctgcctggcatgggcctgctcaggccttgctccaacaccgaggcccgggccaagggcacctgcttggggataacctgactctaactcactgcactggtgacattttctgtcacattcacagcgactacagctggggacttagtaatcctttctcctgctagactgggcttctggaagggccaagattagtcatcctgttcatctgggttcctagactgtggccctggctggcattgggcaagctgcttagatggcagctgctgatctgtagtgacatctgtgaccgacagcgaaagaaccacccttagtcacactcccttgcccatgactcagccaggcccatcccagcgtggaagcaagcttagcctgggatgtgtgcccgcaggagccgctggtgcagggaaaggtttctgcagacacggcatgcattcctgtctgtctctccactaccactgcccactgccctgggcttccttacatcccagctgtgggacagtggggtcaggcagaactctggagctcccttgtcccccttcccatctcattctcaaagtgctgtcaccaacccagcatcagggggcacaaggctctctctccactgcccagcttggagtgcagtggcatgataatggctcacagcagcctcaacctccagggctcaagcgatcctcccacctcagcctttagaatagctgagaccacaggagcacgccaccacactcagctaacttttgtatttttagtagagatagggttttgccatgttgcctaggctggtctcgaacttctgggctcaagagatccttctgccctgacctcccaaagtgctgggattacaggtatcaggcgttgccctactcctttttgagacggagttcactcttgttgtccagactggagtgcaatggcacaatctcggctcactgcaacctccacctccctggttcaggcgattctccagcctcagcctcccaagtagctgggattacaggcatgcaccaccacacccagctaattttgtatttttagtagagacggggtttcgccatgttggccaggctggtcttgaactcctgacctcaggtgatctgcctgccccagcctcccaaagtgctgggattacaggcgtgagccaccgcgcccagccgccccactcttaaatggacggattatcacagcttccaccagccacttcatcaaatatacaactaagagaggatcctcatgccttgctccgtggcaaggttaaaaacaacaacaaaaaaacaaacagaaaaaggaattacactacaaagtcaaaactgctgaatccacgtttctctgaaaaccagagtacaagaaggaaaggaacagcccagagatgttctggctgtgggaagcctgtggacggcacacagggcagccatcccaccccaacctcccctcacctggaggcacaggcacaagggtcaacaggtggctcccgggcaaaggtgtcctcccacctggtgagttagagaggaaggtgttaggtgtgaggcaggaaagaagataagaaagaagacaggcagcttcggccctccaggagcggggaccccccgccacccccacaacccatgccaacttcaggtgtccaacaccagatggggctgctccctccatccccaactcaggttctcccaccccctcccagctggacagacaccaaaatcctggcccaggcctggactccaacagtgggacgaatcaaacagttccagttctacacacatttctattttattatggaaaaggtggaaacgccaccttctccacaacagcaaccagtaaaatttatcccaaaaataactcggtacaaaacaggtctgtttcagaattaaaaaaaaaaaaaaagaaaaaaaaaaaacctttacatgagtttttaaatcctattttaaaacataaaagaaacaaatccatcattggccgcacagccccagccaccgccccccaaccagggagcaagaggagacgcctgggtcctgttccgcacgcggatttgctggtctgtttaactggtgtccatctgaaacacagaggagaaagaggcttgcattcacaggcggcctgctccccactgcggctttgaccaggcccccagctggctcccccgggactcactctcgcattataggcgtccagctgggcatccagctcctctgccgaaagctgctgctttgaattcctgccggcacctctgcctcttccacgggcgcctccgcgggtgcctctccgggtgcctccaccaccaccaaaacctccagcgccacggtttctagtcatgccacctctgtttacgctagcaaggaagacgaaaccgttcacacacccggaaggaccctaagagcgacgcagcctcaccctcggccaatccccttccccagaggccccggaagtcacctctgtgcaggcctccgctgtgcgtcaatctgtgacgtgacaagctgaatgttcatggggcggcctgcggcaaagaatacgagaaggcacgttctattgagaggctctgaaacccacccagctggcgccacaccctggtctccatgcaaacactggaaagggcctctgtgcgtctcaaatgcccccgacaagggaaatggcctggagatactggtgggagaacaaaatggcaaggaagcaaccccaccaacacctcctcactccttctcagtccagactaggtgggctgctcgctgaggtatcggggtgctcgtgggtggagaggtgtgggtgacctgacgaagaagaaccggtacctttgtctttacgactacagccccgcactcagaggtgtactatggcggttctgagaaggcttcacagaagtgaatcttccggaaggagctgaaggaggggagggatgtagcttgctggatgggggttcacaagaggttggtccagatgtgtggggcagcatgagaggtggcagatggaagagagagacaaaggggcaaatgcaaagtgtcctcagccacaggggtaccccatattcctacctggacaggtgccagccccaaactccacaagccccacagtcagcgtgggtccacccccagactcaccatccagagggacgccgttgtactgcttcatggccttcagggcatctgccttccgctcaaagtgcacgtctgctgttcctaagctgcgaccagagcgatcatagtgcacagccgccttcttcagcgttccaaattcagcaaagagttcctgggagttgcagagagcagttgtcagaaaagcaacaaaactgcgttccttctggtggcccagggacaggccctggaagcgtgagttgctttgggggtggttctctgggaggcaggacagtggttaacgggaaatgagggaagggcggggcaggagggacagcaacttccaagagcacctgggtctgagggctcctgccattgtggggacctgacacgtgtaccacgatgcaggtagaggaagctgcaaagcccactagcaacgggcacaaaattaagccactatcctcttcaacaaaggaaaatgtacaacacacccaagggctgttccaagaaacggtaaaggccaaaatcaagagcaagggaagcagtccgatatcagaccagcttgaagggcctgtagattcgggagccctgaccccagcccctcccccaaaggcagattctggctcacctttccctctcctcctactcaagcctgcggcaaagtctgaagtcaagcgctgtcatggaaactgccctgacctcaggcaggctgggagttggagagggaacccagagtgtggggatactccggccgcaggcacacagcgggaactggagttcaccaaaagcggtttccagtggatgctagaaaccaccttaaaaaaagtgttgagacactgtgagtgctcactggccctactctgtcctcccaaggcaaatggctgggctgtgggcaactgaaccctgcccagccatctccaaaactgattcccaaaaagtcatttcttaaccagaaaacaagttgaaatgccattgggattcaatttttctttttttaaaaaagaaaagcttcaaccaaagatggatttgagagtcatgtcactgacgggacacggcggtggggagtgataaaaccacagcgtacaaggtctttataagacagtactcaaggcaaacagagccagaaaaacagactccctgtgcttcacaagatacataaagaagattctttttctcacattaacccactaagacaggcacaaaatttaaaaagcaactgggctgggtctaacagccaaaaaccactcacatttggtcagtctttgtccctgttagaaactggaagccctggcaggggattttcactcacagaacccatcttcagactaacagcagcagttcctcaggctcagctaggctcgcacctgcctgcgcactgaccccggctttactagcactgggtctgtcctgcagcccttcagagctgggagggctcccttcgctaaggcgggaaggggactcagggccacatccccaaaatcacgatccgtcctgtgcagggcgaacggctcaccgagaagccctcgtctcttacctgaatatcggcgtctgagactccaaaatccagattggacaccagcagtttcccacctgtctccacgccggcaccaccgccgaagccactgtcgaaaagatcgtgctgccacttgtcgggaagttgttttggctgaaaaaaaaaccgcaacaagagcagatctgtgagtctcagtccagggctttcctgaccctcacggctactccggacccttcctcttcccggcctgagaggatccggccgaaacggggccgccagcgctccctccggcgctgcagctgccccagcccgaggccgcacggtcccaccgcggccgcacaacttcagttcccttagactaacttcccgccgcctgtgccgcgcccagcgtcccctcctctcctgccacgaggccccaacgtccggaacaaacaaagagctgggaagggtctcagcctccgggaccggaccccgaaagaacgacctcgctcccgcccaccaccccctccgcgcccacacgcaccctccggacctccgggcggccgctccaccagccttatccacccgccggcccgggtctccgccgcgagcggcccggccccagccccggctggccccctcccactctccggcgcggccggcctccgcactcaccctgctgtagggcgccggtcggttcctgccgcctccgccggccgcgccggcgatggccgcggattccggatgggcccgccgcctcgattcactcgcgcggggcctgcgcccaccgccgggccgccctgggagccggcccggcgcggttccggcccccgccccggccgcctcgctggctccggttcagtttaatgatgtcgtccagagacatgtccattttgtcggccatggcgggcgcggaatcgggcatcggctcgagccgcgcgtcagacgccggcacgtcacttcggcgcccgtgagccttcggtgccacgctcggacgctgtgattggcgtgcgacggctccgccggaacggtgagcggaagcgctcacttgcgtgagactcgcggcctctgaaggatcggcggatgtgtgttttatactccgcgcgacggcgtgcaacgaggcggtaggcgtcttataagtgcgaagtcaggccaagggtggcgcgctttgaaggtacgcgcctcctccgaactcccgacgcaagtgggcgtgggctaggcggcggtctggactgtgaatcttttgctcccagaattgctgtcggttgttgcggcagttggggggaaatannnnnnnnnnnnnnnnnnnnnnnnnnnnnnnnnnnnnnnnnnnnnnnnnnnnnnnnnnnnnnnnnnnnnnnnnnnnnnnnnnnnnnnnnnnnnnnnnnnnnnnnnnnnnnnnnnnnnnnnnnnnnnnnnnnnnnnnnnnnnnnnnnnnnnnnnnnnnnnnnnnnnnnnnnnnnnnnnnnnnnnnnnnnnnnnnnnnnnnnnnnnnnnnnnnnnnnnnnnnnnnnnnnnnnnnnnnnnnnnnnnnnnnnnnnaggactgtgcgctcggctcgcggtggggtccggcgggcgcggcttcggcgggcggcagccgctgcagacgagctgcgggttggttttttggtctccacctgcagcccccccaagtctgcactgtcacattttgccagtcatatcctttacaagttttcttgcgggccgggcgcgggcctcacgcctgtaatcccagcactttgggaggccgaggcaagaggttcgcttcagcccaggagtttgagaccagccggggcaacatcgtgagacccccatctctaaaaaaaaaaatgagctgggcatggtggtgcacttctgtactaccagctacttgggaggccgaggtgggaggattgcttgagcccaggaggtcgaggctgcagtgagccgtggtggcaccactgcactccagcctgggcgacagagccagaccctgtctccaaaaaaaaattatttttgcaacttattaatgaaaaccagtgtgccatttcattgattttttttttttttttttgaggcagtctcattctgtcgcccaggctggagtgcagtggggcgatctcggctcactgcaacctctgcctcctgggttcaagcgagtctccagcggcagcctcccgagtagctgggactacaggcacgtgccaccatacctggctaatgtttgtatttttaatagagacagggtttcgccatgttggccagggtggtcttgaactcctgacctcagatgatccgcccgccttggcctcccaaagtgctgggattacaggcatgagccaccacacccagcccatttcatggattttaagttgttttgagatacttgcttttgtttttgttttttgagtcagggtctccctccgtcacccagagtggagtgcagtggtgtgatcttggctcactgcagcctcaaactcctgggctcgagctatcctcccacgtcagcctctcaggcagctggtgcacgccaccacagctggcttttttttttttttttgagacagtcccactatgttgcccaggctggagtgcagtggtgcgatctcggctcactgcaatctctgcctcccaggtccaagtgattcctgtggctcagcttcccgaatagagctgggagctggcgtgatctcagctcgctgcaacctccgcctcccaggttcaagtgattctcttgcctcaccctcccgagtagctgggattacagttgcccaccaccacacccggctaattttttgtatttttagtagagacagggtttcagtatgttggccaggctggtcttgaactcctgaccttgtgatctgcctgcctcagcctcccaaagtgctgggattacaggcgtgagccactacgcctggcctctaatttttgtttttttggtagagatggggtttcaccatgttggccaggttggtctcgaactcctgacctcaagtgatccaccctcctcggcctcccaaagtgctgggattacaagcatgagccaccacctgcggctaatttttttgtattttttgtagagacggagtttcgtcatgttggccaggcccatttgagatctttgaagatatcctcaacgtgaggtaaaaccaaactcctgactgtcctgtgctcccaaatgtgatctccttgtccgtaaggagctgagtcccttcccttggagagaagagtgtgccctttctctagatggctaaagaaacctcacagatagttcttttttttcctttttttttttttttttttttggtagagactcagtctcactgtgttacacaggctggtctcaaactcctgagctcaggcgatcctcccgagttggcctcccagagtgctgggatcacaggtgtgagccacaaagcggattgctgctggggcttgctgttctcccgtagctcccctgcagccctgaccctctgggcccagagccctttacttgttatttgttttaatagaaacggggctcatagcagggcataggggttcacgcctgtaatcccagcactttgggaggccgcagtggcagatcgcttgaggccaggagttcaagaccagcctggcctacatggtgaaacctcgactactaaaaatacaaaaattagtcgggcgtggagtcacgtgcctatagcctcagctactcaggaggccgaagcacaagaaatgagctgagatcatgccactgcactacagcctgggtgacagagtgagactctgtctcaaaaaaaaaaaattaataaaaataaaagtaaaataaaatagaaacagggctcacgatgtttcccaggctgggttcggactcctgggccggtatgatcttcctgccttggccccctgagtagctgggactgcactgtggcaggcttatacctgtgttggtgcctaaacgttctakctctgcagactcaatttagccagtcrtcctgttccctccgccgcaggctctgctgccatgaaggtgaagattaagtgctggaacggcgtggccacttggctctgggtggccaacgatgagaactgtggcatctgcaggatggcatttaacggatgctgccctgactgtgagtgtcccctccatgctgtctgagcggccccgactgtgagtgtcccctctgtgctgtctgctgcctgctggactagcctcagtagctcctgttaaatacctgcacgaaatacccagtttcattttctttttttttttttttttttgagaccgagtttcgatcttgtttcccaggctggagtgcaatggcgcgatctcggcttgccgcaacctctgcctcccgggttcaaacggttctcctgcctcagccttccaagcagctgggattacaggcatgtgccaccatgctgggctaatttttttatttttagtagagacggggttttgccttgttggctaggctggccttgaactcctgacctcaggtgacctgcccgcttcagccttccaaagtgctgggattacaggtgtgagccactttgcctggcccacatttttattttcttttctttctttcttttctttttttttttttttttttttgagatggagtttcactcttgttgcccaggctggagtgcaatggcgcgatctcggctcactgcaacctccgcctcctgggctcaagcgattctcctgcctcagccttccaagtacctgggatcacaggcatgtgccactacacccggctaattttgtattttttagtagagacaggctttctccatgttaggctggtctcgaactgtcaacctcaggtgatccacccgcctcagcctcccaaagggatgggattacaggcgcgaaccaccgtgccccccccaacattttcattttcatctcatgaagaaaagttgatagaaaaaaagccaggtggttggtacccatgtttatataaagatcctgtcacagactccataggatgaaactcagctgtgaaatacgtgggattaaaaagagattagagtctgggcgggcagatcacaaggtcaagagatggaggccggcatggcggcccacgcctgttattccagcactgtgggaggccgaggcgggcggatcacaaggtcaagagatggaggccggcacggtggctcacacctgtcatcctagcactgtgggaggccaaggtaggcagatcacagggtcaagagatcaaggcagggtgtggtggcccacacttgtcatcccagcactgtgggaggctgaagtggatggatctcaaggtcaggagattgagaccatcctggccaacatagtgaaacgccatctctactaaaaatacaaaaattagctgggtgtgtggcgtgtgcctgtaatcccagctactggggaggctgaggcaggagaatctcttgagcctgggagacgggggttgcagtgagccaagagcaagactccatctcaaaaaacaaacaaaaaaaagattagtttaaactttttatttgaaaattctcaaaattgaatggcataggccaggcgcagtggctcacacctgtaatcccaccactttgggaggccaaggcaggcggattgcttcaggccaggtgttcgagaccagcctggccaacatggcaaaaccccgactctactaaaaatccaaaaaaattagccgggcatggtggcaggtgcctgtaatcccagcactttgggaggccgaggtggatggatcacctgaggtcaggagtttgagaccagcctggccaacatggtaaaatcccgtctctactaaaaatacaaaaaagtagccgggcatggtggtgcatgcctgtaatcccagctactcaggaggctgaggcaaaagaatcgcttgaacctgggaggcagatgttgtggtgagccaagatcgcaccattgcactccagcctgggcaacaagagtgaaactccatctcaaaaaaaaagaaaaaaagtggaaatgtttgattatgtttaggttgaaagcagagttttgcatcagcgaaatggtttttcatgagaccgaaatgagcgtaaagcagaagcaagggtcaaggttttgcccagggaggacaagaagaactccccagaggacagtggggaatggagaggacagtggggaatggggaggaccgagaagctactcactaccccaagtaaccaggcgtatttttgtagggccaggtgcatgcccatattgattgacagggtctcactgtgttgcccaagctggacgtgaactcctgggctccagccatcctactgtctcagcctcccaagtagcataccaccacactcatctgcctcctttgctttttttttttttttttttttttttttttgagatagagtcttgccctgttgctcagactggagtgcaatggcaccatctcagctcaccgcaacccccacccttctgagttcaaaggattctccggcctcagcctcccaagtagctgggattacaggcatgcaccaccacagccagctaatttgttgtatttttatttttatttatttatttattttcgagacagagtctcactctgtcaccagggctggagtgcagtggcacgatcttggctcactgcaacttccgcctccctagttcaagtgattctcctgcctcagctttccgaatagctgggactacaggcgctcgccgccatgcccagctaatttttgtagttttaacagaaatggggtttcaccatgttggccaggatggtctcgatctcttgacctcgtgatccgcccacctcagcctcccaaagtgctgggattacaggcatgagccactgcgcccagcccttgttgtatttttagcagagacagggtttcaccatgttggccgggctggtcttaaaactcctgacctcaggtgatccgtccacctcggcctcccaaagtaccaggattacaggtgtgagccactgcacccgcccctgtctttgcttcttaaggtgaaattgagatgactgaatcttagtacaattttttttttttgagacagggtcttgctgtcacccaggcggcagtgcagtgtggcaaaatcatagctcactgtagccttcaattcctcagctcaagtgatcctcccacctccacctctcaagtagctgggaccacaggcatgctccacaatgcctggctaattttttatttttttattttttgtagagacagggttttgctatgttgccaaggctagtcttgaactcctgggctcaagggatctgcctgccttggcataccaaagtgctgggattacagacgtgagccaccatgcctgaacaaaactacataaatttttaattttttttgtggaaatggagtctcactatgtttcccaggctggtctcaaactcttggctctgtcctgccacagcctcccaaagtgctgggattataggtgtggcgcctggcccgtacaaatactttttattctaggcttaacttttacattggccctagctaaatagaaatctcatcactcaggaattaatcctcatttaatcaaacgggtagggtgtaatcttaggaaattattgattgactctacctgattggatttgtagttaatagctaattaggttaataactaaattcacaaggcacagttttatttgatctcttttaaattgctcttaaggatgtaacaaagagtgcgtgggatgccctgagggcaggcattygacttctggagcagcagcttaacttctgaaattcctccgaaccatgtgtccacacctcgtctggytgcatccgtgggccagatgtgggtggtgaatcctgtggattagaggtggtgctaggtagcccccaagtgactgcagtggtgggtccacaggcagcctgcagagcccgccctgcagcatgccagctgggcctgtgatggggcatccagagggtgttgccctgaacactcagcatgtctccgctgacacagtgtgctcargctttgttaacatggggcctgttggctgcagagactcaggagttgagagtctaatttttggacctgctgatggttaagtcatagtgagtcagtgttaacgcgcaaagcgtttgacgagtccaatgtgcttccatactaagcagcaccaggtttcttttgctaaaattgaactcctgtgaaaaattcagagtgactaagttcattcaacaaagaccgtgggagcccgaggctggtaaacaatgagtccatcccgcatcccaggggactctggtggcagtgcagttttgccgagaggagttttaatttaaaaaaatgcaatcaggagaccagcaggtcctggaatgagtcaccctcagtgcatctgcggactcatcagacaccccaggccggcttcgggtggggaatgcactagaacgaagtgacacctttgactaaacgaggcctcccccgagtactcagagtggcccagacccctctcctcagggggctagcaggcttcagctctcatttgaaagggccgatatcaagcagagttgtgctgaggccagaaacccccacgggcaggtcctcccagggctgggagtgggcatgccgtggggccggcgctgccaggacaggagggtggccacgagctccagctccacaatgccaggccgaccctgccgtggggctggggctgggacttgctgtgctctgttggcagcagctgttcctcaggggtttccaggctcttggagatcagggacactcatttctcttgatcatggctgatacaagcatccctctctgtgtcaggkcctctccatggagaaagcatttctaggtgtttgggctggtgcccgcagcctgtgcctgtcctgggaggcagggcccatccacaggtgcccatcaacacagcktccccaacgcctgggcagcacaccggatccctgatgtctagggaagagtcttctaggtccccagaccccacccctcctgcccttgatcaagagaccagttcactactcagatgcacgtctccttggtgccttgaccattcatgtgacctttttggcatcacagatcaagtgtctgcagatgggcccagggcctgtaggtcagacattgccctttttccccagcctcaagcacaggggacacagggtgggctaggccagagcgccacctcctcagagaggcccctgggctccccactgagcatgatgagcctgggtgaggggaggcgcctgctgcggttgccccgggtggaggccgcatgtccggtgtcccttggtcattgctggtcttcgcctgggggcgggctggtcaggagaccgattgggtaacactcctgatttcggcttctctgaaacatgagaggctgcagtgctggagccactgcccagggtccctacctgcacccctgcctggcttgtcacatgctctgtgtccagcctggtcatgcctgtccttttccccacctcccctccgtaggcaaggtgcccggcgacgactgcccgctggtgtggggccagtgctcccactgcttccacatgcattgcatcctcaagtggctgcacgcacagcaggtgcagcagcactgccccatgtgccgccaggaatggaagttcaaggagtgaggcccgacctggctctcgctggaggggcatcctgagactccttcctcatgctggcgccgatggctgctggggacagcgcccctgagctgcaacaaggtggaaacaagggctggagctgcgtttgttttgccatcactatgttgacacttttatccaataagtgaaaactcattaaactactcaaatcttgctggaggcctctgggtgcctgtgttctcrgcatatagatgtggtctcggtgtgttttgatatgaaaactctcatgaataaacatctccgtgaaacgccaaggccctcgtcaaaccctgagtcatgactgggaggagaaggagcaggatcagacggtagagcctggggcatgctcttcaggcatgctcttgcctgctggattgccggcggcggccctgggaccctccctcaggctggctctgagggaccctggctgtgcaaagctggcggccactgcttgtggcgcctccagactgaaggccaccatctctgagtgggcgtccattgttctcactgggactgtctgcagcggggctgggcctcccacagtgtagggatcagtgtcctgacactgggaagtgtgtccacacgtctgaggcttcccttcctagggaaaggtggccctgggaggctcctttgtgtgcctctgctccccacaatcgtggtgggaaggggccgctgggggagtggcagccccggcatctcaggctgcttctggacagagcacaggctgtgtctccagtaacctagggagcccttggcattcatggggccagtgacccgtgcccagtgtctcttgacccttcctcacagcaacctgaggagtagaccaggcctcacctgaaatctgtgtcagggttctctagagagacaggactctatatgaagagtatatatgaagagtttattgggagtattgactcacgtgatcacaaggtgaagtcccacaataagccatgtgcaaggtgaggagcaaggaagccagtctgagtcccaaaacaaaagtagagaagccgatagtgcagccttcatcctgtggccaaaggctgcagagcccctggcaagccactggtgtaggtccgagagtccaaaagctgaagaacctggaggccgacgtgcgagggcgggaagcatccagcatgggagaaagatggaggccagattcagccagtctagtctttccacgttcctctgcctgcttgtatcctggctgtgctggcagccgattaggtggtgcccacctggattgagggtgggtctgcctctcccagcccactgactcaaatgggaatctcctctggcaacaccctcacagacacacccagtgataatactttgcatccttcaatccagtcaagctgacactcagcattcaccatcacacctgggaagcatggaacccagaaacaagtgccagggctccagtgccagtgcctgtcctgggaagatacccaagagaagacatgaccaggaccttgggggagcatgaaatggtgagggcacagtgagcttgaaggctgatgtcacctgccaggagagcggctggcagtcctgcctggtgccccccaaggggcagagctggcagagaggggcctccaatcgaaggccaggagtcgtggagctccagtgccttggtgtggctggccttcttgcccccctcccagaggaccccgccagtaacagccctgctggtggaaccttccccagtgggcatgaaagaaatgagggccccacaagccacatggactctgatgcctggagccaagaataccccttagggtggtagaaaccgcccccggggcactgtgcagtgtggctggctctccagcatcaggagtactggggattgcctgggggacgactcctagggctgggcgcccgtgggccctcccctgctgccactgcggcccacgcaagccgggcctgaagggcgcgagcggcatgggtggggagcttgagggggcgttgggctcccaccaagcgccagatccttgcgcgcctccagctcgcccgcgcggctggttcctttgggatgcggaggtgcgacggctcctccgcgcgcgcccgctgcaccccagcccgcccgccgcccctcccggccctccgcagcctcggcccgccctcgccgcagatataaggcggcccaggcggtggctgctccgagcccggacgccgccgcccaccagtcagccggcgtccccatggcccggtccgcgacactggcggccgccgccctggcgctgtgcctgctgctggcgccgcctggcctcgcgtggtacaagccagcggcggggcacagctcctactcggtgggccgcgccgcggggctgctgtccggcctccgcaggtccccgtacgcgcggcgctcccagccctacagaggggcggaacccccgggcggggccggcgcctccccggagctgcaactgcaccccaggctgcggagcctcgtgagtccggcgtgccggggactgatggggggcggcggcaggacgtgggtgggggtgcggcggcccctcagcctttgcttgcctgccccccaggctgtgtgcgtccaggacgtcgccccaaacctgcagaggtgcgagcggctccccgacggccgcgggacctaccagtgcaaggcgaacgtcttcctgtccctgcgcgcagccgactgcctcgccgcctgagcccggacctctcctggcaccgctgggggccccccgcccccaccgtcccactcggtgaccccaggcccctccggcgcgggatggcgccccaggtctcccctactccgctcaccccgcagttaatggcaaacgaataaataaatgaggcggcctcggagtgaggggtgctggaggactggcagccaggccacgaggggaacgggacctggaaatccccaagcctgggtatgagaaggcagccgagtgtgcggcggcagggcaaggttggcctgggccgcccagaggtcttcagacccaggggcgaagctggccacgacccagccccgcggtgaagccgcgcctagccttggtgctccctgggggaagtgcagggccacggctggcccggttcccagtgtcctcccccagcccttcgctccccaactcgagagccaaatctgtgagggcatgggctggagcccctggctgccttcctcttgcccccatcccttctggccaggccaagtccgagggtgcaggggcaaggaggagagttgggggcctgagccctggctccagaggcccagagcatgcctccccagagctgaaggtgggagatgggtaggttctccctccgccgttgggtgtgactccggaactggcttgggctctggcctccaatgctgctacggggccaggcccacctccgggcccaggcagcagcactgcagggcctttctaccctccccaagcctggggcccaggcagcccctgtccagcaccaatctgtctatggggaactggctggtccctctgctcaggggaccccgcagtccagggttctgagtgggagcattggcaccaccccactcctgaaagcgggggcctggcaggatgaggatggcctgtgccccccacaccttggcccctggctcggagagcagggtgacaggctgccttcctgggctgtggagagcctcgcgtgcacctcgcctccagctcctgtgctgggtcgtgaggtcgacctcacaacagcagaggacaggcccatggggtgccacatgggccaggtgctgtagggcagaggccattctggagaggaatgtggggctgaaaaaagtactgatcataagcctcattttgaatgcggcgagaccaggcaatctatggcctccctagacacctcccggaggctgcagtaagaacctcttcggcctctgggctgctccaggcgggccgtgacaggggtgtgggagacagagatcccatggcccctggaggggccaaggggcaaggagcctcagctctggctctcctccttattctagcatcgcctgctacagggggtggccccaggctttggagggctggaggcctgggtttcactcactgccaggctgcccgctgcactcccggctgctgggtgcatggtgggggcagggccaagagggtctccttgctgagtggttccctggtccttcccagcagggctgggagccccgcgcagcactgccaccaggctttattcggttgtaccaaagagatttccgtcagccatgtacaaacagaacagagtccataaggagagtggcgaagctgccgggaaggaaggcaagcgtgttttcctggagccaggcgctgggtggcaggacaccgtgttggggggtgcccagtgggaggtggtgtggtctacacccagagaactaaaggggtgaccgcagtcactgctccctaaagccctctgctctgcacctcccgccacagctgggtgggcagtcagtgtggcctctgtccaggtggtgggggcatccggggaccaggtgggggcgcacgcaggagcggtgcgtttcaggctgcaggtgccgtctgcccgtctcacttccggcctctccactgtgctggacaccctctctgagcagctttgctggaaagagcggagagcctgctgcaaaccaggcaccttgtaggcaggcaaggaggcagagtcctcaccagcccttccagagccaggccagttagagagggcggccctgcagagtcctatgtccaaacgcagaaggcgcagaagcagagcagggggagggccggccagggcctctgccaggttagaagtcaccatcgcgctcccccaggggctgtgccgcctgctgcctggcagcctccaggaaggccagctccttggcttccttcttctggtttcgcgcctcatactccaacctgagagggcagggtaagtctagcagagagcgcccatgaggcggctccgagggggagggcagggtaagtctagcggagagcgcccatgaggcggctccgaggtgcccccacccaactgcacctgttggtgatgatccgctggacgatgaggtctgtggtgaggttgctgccactgtcaatctgacggaagatgccccttctcttgggctcctgggggtccagagaggaggagcgggatgaaggtccctgctgacctccccaagacccatctgatgccctgccccagagggagaccagcgcccagggtcccatgggagtggtgcagtcggagcagctgcgccaccatgcccgtttcccaggcaggcacagtgagtcattaaatggctgggaggtgccaatggcaacccctgtgcccagcaagggccagcatgacccacctggtatgggtcggagccatccctgtcagggataatttctgtcttgccgtgacacaccaggtccacctggagaaggagtggggtcaggagccctccccggggaggcagcggccgtcgccacccacagcccagcacaggccccgggggttgggagagctgaccctgccctttcctcagcccaggtacctcctgggccccgcctaggagcccacagccagcctgcattcccagcccatgcaggaacagaggtgaacagagggaacgaggtgagcccatgcggagcctcaccttgaagtgacttaggagctctgctgtgaccgcgtacggggctccaatcaccacttctgacacgtactgtggggacagtgggggcagaaagacttgctcggtccctgctactggtaagccagggccacagggtggtgagagacggctcagacatggggcggggctgccagtgagtagcagggatgggctgggcaggctggggacccctggggctcctccatgagacaagaaggaacagcatctggagacctgaccacccctcctcatgcctcaacaaacaggtatgggcaggtgccacagaactcggggtgctgggtgcagctctgccagtgacccaagcccccctgccctggctcagggaggcccttagtaggggggatgttgtgggaatgtctccccatccttgggctggctcctggcccccactcacccggcaggccagcacgctcagagtccgttcatgcagattcatgatggggtagttcttccccttgtagtgattgacctcctgcggccagagtgcggctagctcagcccggagactttttggggggacagggtgtgcccctcccggctgtccctcatgggaagaagtcggggaggttgctcgcccttgtggggatgccccagacaggacagccctggaccccagaagcctacgatcaccccccagggtctcctgtgacttcacctggggccccttcccagagaccacctgcacctaacagcaacgcttagggcccctcgagggcccatcagctgcccaggggcccagggagcaagaaggcagtgacctggtcaaagtgtaagcccgcgatgatgtagggcctctctgccagcctgtgcaccttctccaggaagtccacat

SEQ ID NO: 96467 - DNA, 25421 bp, Homo sapiens
  misc_feature (1)...(25421): n = A,T,C or G
ccacctgccaggcccccagaggacccctcgaaactttaaccctgtgcagggaactccattccagaacaacaccctcctatcagctgtacacacgcccaccacccaggtcccaagagcaatcagcagggcgaggaggtggggtccatgagaccccagcccagggcccctgccctcactggggtgggggctacagcacacactcctgcctctcacacccagccccacagagactcagtctcctttctccctttcatctgcacctaccctgagagcagaaactgtggccaggtccatgtctggggagctagccattatcttgtgggcagccaagacgcctgaggggagaaacagttcctcttcagttctttattatttttttttttttgagacggagtctcgctgtgttgcccaggctggagtgcagtggcgcaatctcggctcactgcaagctccacctcccgggttcacgccatgctcctgcctcagcctcccgagtagctgggactacaggcgcccgccaccacacccggctaatttttggtatttttagtagagacggggtttcactgtgttagccaggatggtctcgatctcctgacctcgtgatccgcccgcctcggcctcccaaagtgctgggattacaggcgtgagccaccgcgcccggccggaaacagttcctcttcatggctagctttggcttccctccctccccattcccaggaagaagagtgagacagcacaggtaaagccccaaacacacagaagttgccagttcccgcaggactcaggccttgtgacccagcacccaccttcagcccccagccctgcagaagtggaaagaggccagtctctcccactgggcctcaccgtcccccacctgggggcctacctgctgctgtgaagcccttggccagggcaaaagccagctggccagcgccgatgaagcccacgctcatgctgtccggagacccctggcccaaagcccccacagatggcaccggctctgcgggacgagaccggcaggatcgagagcaagttaggggggcagtgccagcctggccgctcctcccgcagccgggtgcccacctcccctggtcccagctggtctaactttccactttgctgtccggcccgttaactgcttcggggcccccagtcagagcggcggtgcctggcctgctgcctagggtcccgcacccactggaggggtggaggttccgcagaagaaatgactgggaagggggaaaagtacggggagagggagggcccggcgcctaggggtcccccgtctgggttcccaccccgcccagaactgggctaccgtcgcgccccacccggcgaccgccgcccaccattcccggagcccgaccccaacccagctaccgtgcgcgggtcgtacccacccctcagcgctgcggccgccacgcggcacccgcacccaggccccgcccccgtcgcgccagcgaatccgggcgcggccgccaggcgctggccaatcagagcgcgcggcggcgccagagcggttgcatcatctgcgcgcccctcccacgccgaccgccggccctcgcctctctcgcgccccgggatcccccggcccccggatagacaccctctccggcacgcggtcccctgacccgcgctcctcctggtcgcgcttcccgggacctacacgtggggtccgaggacgcgggcggagggggcggcccgattggggcctgtgaggggccctccacgcagggctttgtcttgggccacccggacacggacgcgtccagctggcgtccctgggcgcgcggccggctctctctgggaatcagtcccttctactgtcatcgagtttggagaagcccggctgtacagcgttttctttcctttttttttttcccttgggggcagagttgaaaataatttgccaagtggaagcattttaaatatatcaccatttgggccgggcgcggtggctcacgcctgtaatcccagcactttgggaggccgaggcgggcggatcacctgaggtcaggagttcgagaccagcctgaccaacatggtgaaacccccgtctctactaaaaatacaaaaaattaaccgggcgtggtgacaggtgcctgtaattccagctactcgagaagctgaggcaggagaatcgcttgaaccctggaggtggaggttgcagtgagccgggattgcgccactgcactccagcctgggcaacaagagcgagactccatctgaaaaaaagagagagagaaagaaaggaagaaaagaagaaaagaaaagaaagaggcatgacagtgcggccacaggtgttcctctaactgggcacgcagcggtgctccactaagcaaacgaaggaagcccaccccatcatgcccccactcccacgcagcccggagcatcctccaatacccaaacctctcgcctgcctgggttttagggggagtgaagctccagtcacttccccctgaggacatgctcagagttcatctgattcgggcctgcatctggggctctggatagtcagggtccctgtcggtggccaagattaagggcgaagtcagaagggatcactggcagcccattcccctgccaaggggtgagaggagctgccttattttttctgtgctgtatcttagatgatgacaggctattctagcacatcatttcagaaggcctgggatgcttctgccacagcggcagggccacgcgttctggctatctgtctacctggtccccccaccgtgaacacgtaatgaccaccaccaacactgggaggctgctctgtggtggccatgggaagagcttgtccagatggacagctcaaacctggggcacggaggctagcatcgcctaggcgctttgagagccaagctccccaggctgttacaaaatcacttttccccaagtgataacagcaagtaacacttttacctaaaaacccaaaaacccaaaatggacagccctctgggccagggatacactgtcaaaaggactgactctgaaggaagtctcccagccctgggtcccctccccttcctttctgtccctcaggacctttgcgaaggtggcagaggaccaccggacagggaggaaattgggaagttggtgacaattaactcgtttcagaattctggccacatgaaaaaaaggagagaaggaggctgggtcctctccaagactggtgcccaggtctcccctgagtcaggaagcaggtgatccctatgccccctctgtatcgccctcagccagcggcaggccctgaacagctgactgccctcatctgggatctgccattgaccccaaaacacccaccccctctgagtaaaggatgtcggccggaccctgtttgttggctaacgtgagcgagacccctcctcagcggccagtgaggccccttcctcacattcttcatggcagcagcacaggcctggctgtggggaccgccgtctaaaaggagcaacagtgcgtctgtccatcgctgtgtccagggcctctcgagacccccagatgggcgtgggggaggaggtgagtgctgcgggcctctgggagggacgggcatgagccacaggcccgtcggagccaggctggcctgtcacccctgtgaggcagaagacgctgcctgccccttccccaggaggctgctcagaccctcaggagcccagcctgccctgactgtgatcccaggccacttccttcctcagccttcccccagagcacgctaggaggggccgccaggaggggcaagtgcccacagtcccctcagaagagactgctggtccagaggcagggtacgtataaatgtcagcatttatttcctgctcaaggacgtcaatggggcccagtcaatgggctgaggggctgttgtgccactgcccacccggcttggactcaggggtggccagtgggtcagctcctggctggaccaggctgggcttctgtgcaggagaagctggctggagcctggaggatgatggccccggcgtcaggagtttcggcaactggacccttgagcagaggcaagcagtacccagattctgtgtccagcggccgccctcagccgggctccctcccagtgccacagatgcccacagtgcacagatgcccgccgggcactgctgaagctgcttcgtcacagccaatggtgagtgtccaggtggggctccgtggctatggcggaaccaggtcctccccgtccactgtgcactcggtgccgccgggctctgcaggctcttccaggccacccgcgccacctccagcctgcggagactccggaggaagcctgcttccaaacactgtggctaccagcccagaggcttcccggacgtgggtgggagaggctggtccagatttctggctccttctctgtgagctggcacagctccccaggcagggctctcttcccagggttctgggagctgcctctctgaaccaggagtggttccggctccccacgcccctccctccccttgcctggcccagctactctcctgggttcgtctcctctggaagtcattcctctttcagcttgccttacccagcctgactgtggtctccagacactaatggaggtactgggtgcctcgcaaatgcttctagcctccacgtccccagctgcaaaatgggtcacaacagcagctgctttaaagttttcccttatgatgttccagtgaccagcactgagccccaggagcgctgggaaatggtgagagagagtgagttggggattggcctaggtgaggctctcccctgcgtctgctcagggcctctgccctactgtcctgcccttgtccctctgagcccagtctggaagtcggggagcgacctctcccgttgtacttcatctcccctgagcccgcggcttccctcctgctcgctacttgacactttggttcacctgagtttccctcgcagagcctggagctggtggccagagagcagaggtgggtgggctgccactgtgggctacaggctgggcacgaagcgaatcctctgggagtaggcgaggtcaacgacgtacaggagcaggttgacgtaggtgaagatggccaccaccagctggctgtcccagggacagctgccccgagcacagttggggggccgtttgggctcaccgtacttgggatcgaaacagaagactggccagatcacggcggcgctgaggtacaggagcacagccaggaaggtgtacaccaccaccagccggtcaaaggggcagcccaggccccctgtgtggcccatcacactcagggccaccacggccactgtggccaggaagcacaggctgtagacggccacgcaccactgggtggccacgtagcgcccgtagcggctgtcatggaccagcgccccgaagatgatgcaggccacgaaggcctggacgatcttgaggagccccgacaccgtggccatatagctgctcacctggccgggccgggcccgcgtcagggccacctccacagcgtaggccaggaagaggagcccggcgaagacactggctgccaggcggaagtccctggcagcacagccggcgggctcgggggaacactcccgccgggcaaagtacagcggatacaggaccgcagccgtcgcgcatagcagggtggccagcatggcgaaggcggcggtgaagttgccccaggagagccgcaggcagccgtggagccgtgtgaactcacaggccaccaccagcgcagagacggcgaagcagaagccccaggcggccatgcagaaggtgccctggacgcccgcaaagccaccccggtgggccaccaggctgaaggtagtgcagccaaaggccagctgcagcacgcgggctgtgcccacaggggatgtcacggcgcccaggtgcaggtacgcacccccagggggctccatggtgctgcccatctggccagccacgtttccagctcacacagtcccccaaggccctggggtccctgctgggccaaggcccctcagtcctctgcagtagtggcaggtgcctgcagcctgcagaggcagtgacgacggtgacattgcagcagggcagcctctctgctgtctatgtgaggcggctccccccagcgctataaatagacagccgtgatcagagccccggaatagcagcttgcgtgcctgtccccatcttagagagacatctgacccctggtcccctgtggagcccctgccrggaccattaacccattggctgctggcaccacccccacctccgcctcccgcgcacctgcatctgtcaatccggtcagttggtttcacgcttgtgggggagggggagggagaaggaggggagcaaagagcatgagggtccccacggggtaaccccagctccagcagcctccagggccagctgtgggggggaggggtgtaggaggcaggaggcggcagcctgggctcctggggctcgcrggggtcggggatggtttccccaacatttatctcaccccttctggatggccgcgtggttcagagcctgcatgggcttcaggatcctgctgtcattgcctggggttcacagggttctgctgcggccagaggagcagagcatggagaccgtggcctctgctccccgagccccgctccccaccctcattctgtctcgtccctaacctgcctggggcagagacatttgactgttagttactgttactgtttgcaggggccattctggggcttttcacttgtccttcacattaaacacctagaaaaacactcaactcttccctttttttttgagatggagcctcgctctgtcacccaggctggagtgcaatggcgcgatctcggctcccaggttcaagcaattatcctgcctcagcctcccaagtagctgagattacaggcgtgagccaccatgcctggctaatttttttgtatttttaatagagaccgggtttcaccatgttggccaggctggtcttgatctcttgacctcatgatccgcctgcctcggcctcccaaagtgctgggattataggcgtgagccactaggtccggcccctcttttttttcgagatagggtctagctttgtcgctcaggttggaatgcagtggtgagatcacagctcactgcagcctcgacctcccaggctcaagtgatcctcctgcctcagcctttttatttatttacttatttatttatttaaccacttgcactcacttccacctcttccatttttaagctaaaatatgaaatgtttttaaaaaggaaaaaaatgatatctttttttttttttgagacggagtcttgctgtgttgctcaggctggagtacagtggcgtgatctctgctcactgcaagctccgcctcccaggttcacgccattctcctgcctcaacctcccgagtacctgggactacaggcacctgccaccacgcccggctaatttttaggatttttagtagaaacggagttttaccatgttagccaggatggtctcgatatcctgacctcgtgatccacctgcctcggcctcccaaagtgctgggattacaggcatgagccactgtgcccggccggaraaaatgatttcttactaatttttttttctttttttctttttttttttttgagacagagtctcgctctgttgcccaggttggagtgcaatggcgcaatctcggctcactgcaagctctgcctcccaggttcacgccattctcctgcctcagcctcttgagtagctgggactacaggtgcccgccaccacgcctggctaattttttgtatttttagtagacacggggtttcaccatgttagccaggatggtctcgatctcctgacctcgtgatccgcccgcctcagcctcccaaagtgctgggattacaggcgttagccacctcgcccagctttgttactaaaaagagaaagaaaaattgcctgtaattccatcacctggattcaaccactttgaacatcttctggtatatccttgtatgtatttcctggactttttagttagaaaaacttaaatccagccgggcgcggtggctcacacctgcaatccgagcactttgggaggggctgaggtggatggatcacgaggtcaggagatacagaccatcctggctaacatggtgaaaccccatctctactaaaaatacaaaaaaattagccaggcgtggtggcacgtgcctgtagtcccagctactcaggaggctgaggcagaagaatcgcttgaactcaggaggcagaggttgcagtgagccgaaatcacgccattgcactccagcctgggtgacagagctagattccgtctcaaaaaaaaaagggccggacgcagtggctcacacttgtaatcccaacactttgggaggccgaggaagacggatcacaaggtcaggagaaattgagaccgtcctggctaacacagtgaaaccccgtctctactaaaaatacaaaaacaaaattagctgggcatggtggcacgcacctgtagggcagctcccagctcctcgggaggctgaggtgggagaatggcgtgaacctgggaggcggagcttgcagtgagctgagatcgcaacagagcgagactccycaaaaaaaaaaaagaaagaaaaagaaaaagaaatgcctactgaatctctgccctgggtttctgagacagaacttctaagaccctttcagacagaggcaggaggagtcttttattgtggtatttggtctttgaccccggttcctgacatagagctcctaaaacctttataatctcctaacccataggatcatctgacatggggctcccaatccccttgaatttcctgggtgacaggagcgtcttttgttctaatgaggcgactcctggtgggctcctggacagccttggggtggggggttggtggcagctactatgtgatcagaagggcagagcttctagccccacttgcagcctccaggagggacaggggctgaaggctgagctgatcaccagtgaccaatgatgtaatcagtcatgcctacgtaatgaagtctccataaaacccaaaaggacagggttgggaggtttccaggtggcggaatgcttggagggtcctggaagctccctggagaggcctccagatgaacagcattgcctctatctgctgttcatctgggtcctttgtcacacatggggaaacataaataaagtgttggcggagctcggtggctgacgcctgtcatcccagcgctttgggaggctgaggcaggcagatcacttgagctcaggagttccagaccagcctggccaacatagtgagaccccatctctacaaaaaatacgaaaattggctgggcgcagtaggtcacgcctgtcatctcagcactttgggaggccgaggcaggtagatcatttaaggtcaggggtttgagaccagcctggccaacatggtaaaactctgtctatatttaaaaaaaaaaaaacaattggctgggtgcggtggctcacacctgtaatcccagcactttgggaggccaaggtgggcggatcacgaggtcaggagatcgagaccatcctggctaacacagtgaaaccccatctctactaaaaatacaaaaaattatccaggcgtggtgatgggcgcctgtagtcccagctactcaggaggctgaggcaggagaatggcgtgaacccgggaggcagagcttgcagtgagccaagatagtgccactgcactccagcctgggcaacagagcaagactctgtctcaaaaaaaaaaaaaattggctaagtgtagtggcacatgcctgtartctsagttactggggaggctgaggtaggagaatcgcttgaacccaggagaccgaggttgccgtgagctgagattgcaccactgcactccagcctgggcaacggagtgagactccatctcaaaaaaaaaaaaaaaatgagttgggcgtggtggtgcacatccgtaatcccagctacttgggaggttgaggtgggaggactgcttaatcccaggaggttgagggtgcagtgaactgtgattatgccgtcacactccagcccgggcaacacaatgaaaccccatctccaaaagtaaatcaataaataataaaatgaggaaagtgcttccctgagttctgtgagccactccagcaaagtcacaaaactggaggaggggccatgggaacctcggttggccagagggcgggtgacacctgctacatttggtcatctgtcctcaggttccacacccaagtattcaacaaacctcagactgaaaatacaaaaaatactggcccggcgyggtgggtcacgcctgtaatcccagcacgttgagaggctgaggcaggcagatcacctgaggtcaggagtttgagaccagccaggccaacatggtgaaaccccatttctactaaaaatacaaaaattagccgggcgtggtggtgggtgcctgtagtcccagctacttgggaggctgaggcaggagaatcgcttgaacccggaaggcagaggttgcagtcagccgagatcgtgccactgcactgtagcctggcgacagagcaagactcagtctcgaaaagaagaaaaggcmgggcgcggtggctcatgcctgtaatcccagcactttgggaggcyraggcgggcggatcacaaggtcaggagatcgagaccatcctggccaacgtggtgaaaccccgtctctactaaaaatacaaaaaattagccaggtgtggcagtgggcgctggtagtcccagctactcgggaggctgagacaggagaatggcgtgaacccgggaggcagagcttgcagtgagccgagatcgcgccactgcactccagcctgggcaacagagcaagactccgtctcaaaagaaaatacaaaaaataaataaataaaacaataaataaggccaggcgcagtggctcatgcctgtacatccagcactgttgggaggcggaggtgggtggatcacctgaagtcaggagtttgagaccagcctgaccaaccaacatggtgaaatcccgtctctactaaaaataacagaaattagccaggcctggtggtatgtgactgtaatcccagctactccagaggctgaggcaggagacttgcttgaacctgggaggcggagattgcagtgagccaagatcatgccactatacttcagcctgggtgacagagggagactccatctcaaaataatagtaataataataataatacaaataatacaaatttaaaaagcaatactatgtaacaactgtttacatagaatttacataccaggtgttataagtaatcaagaggtgatttaagtccagaggagggggttatatgcaaataacatgccattttgtatcagggactctggccttgtggattctggtgttttggaggtactggatcccatcccccaaggatacaaagggacagctgtacttgggactggcatctgaagtggaggacactcttgtgggactgagaccttagcctgcaggatcgggtactgtctccagggagaaagcgtcacaatggaacagggttggaggacgcccagcgggtgtccgcggagactggatggaacagggttggaggacacccagtgggtgcctgcggagactcgctggagcagggttggaggatgcctagtaggtgtccactggagacttgcttggtgtttggggaaaatccccacacacattttggtgaccagagatgaagtattccatgttggatgttgactgttgagtgtgtgagagcagggaaaacactgtttttttttcctgtctcagacaccagcccagccctggagtcagccgtgtctcccaggaacctggttccttgtgttgggggaatggcatcagagaccaagacatgggggccaggcacgcttgttgctgctgtggtatacattcacaaacgttaacaaatatttttatttttacttatttatttattgaagatggggtctcgctctgttgcccaggctggagtgcagtggcatgatctcagctcactgcaatctccgcctcctgggttcaagagattctcttgcctcagcctcctgggtagctggaattacaggcacgcagcaccacacccagctaatttttctatttgtagtagagacagagtttcaccatgttggtcaggctggtttcaatctcctgacctcgtgattcacctgcctcggcctcccaaagtgctgggattacaggcgtgagccaccacgcccagctggctttctttttttaagtacagagtttaaatttgtaatgttgtcacacagtggaagttccctgctttcagtccctgaatagcaaaggctatgcctyggccatcgctgctggaagagacacggctcagtgttggatgaatgtcctgactgttttcgccccagagaatgaaaggygccaaccgtcctgggaaaggtgagaagtcagcgtggacaagctggggtgaccatcactgcagagctacaggccagcgtcctcttcgtgtcctagggctcgttttgtycctggtcctgcaggacagcctggggtcacygtcactgcggagctacaggccagcgtcctcttcgtgtcctagggctcgttttgtccctggtcctgcaggacagcctggggtcaccgtcactgcggagctacaggccagcgtcctcttcgtgtcctagggctcgttttgtccctggtcctgcaggacagcatggcagcgattgaccgattgaccattaggtgagctgcgcctctttctctttcggcacaaatgtgggaagaaagggtttatttgtcggtgaaatccctttgggcccaacccacaagtgtcctgttcagtgagcctggtccccccagacacacaccaccatccgccctcaggtccctttcagccacctcagaggagcaaacatcacgcctgccagactgcagtgctcaagccagagttggccaagagccagcacctcrcatgtggctcccccagctcccacagcacggcaggggtcccagcaaagtctccccagacagggtgacagccaggcctctttcgggcyccccagccccctctccctcccgagctctgtccttgtggggagtcctgtccaaggccctgcctggaggtctggctctggaggccccgagaaggaggccaccagactcccccggaccccttctctcacctccagccctcggtctccacatctctgaccttgtcgtctccattggctgctgggactccatggattccctccagagaccacataggagtgctccacagggggatcgtggacaggccactkkgctctgcctggggtggcagacacctssccacgggcaccagtcctgtctgggtattctcaggcccagggcagccctgactcattggcacagagagtcagaccccaggacatgtccccaaggcacagggtcctacggtcctggccactctgggaatggagccgtggccgcagggcaggtgtgaagctcaggctgacgtggccccgtgtcctctgacccttatggtcacattgcctctctgggcctgtttctttgtaaactggagtatttattttattttattttattttttgagtcagaatcttgctctgtcactcaggctggagtgcaatggtatgatctcagctcactgcaacctctgcctcctgggttcaagcaattctcatgcctcagcctcccgagtagctgggactacaggcacccgccaccacacccggctaattttttggtattttcagtagagacggggtttcaccgtgttagccaggatggtctcgatctcctgacctcgtgatccacccgcctcggcctcccaaggtgctgggattacaggcatgagccattgcgcccggccttttttttttttttttggtatttttagtagagatggggtttcaccatgttgcccaggctggtctcaacctcctggcctcaagcaatccacccacctcggcctcccaaagtgctgagattacaggcgtgagccaccgcgcccggcctgtaaactggcgtttataatgaaacccacctcgtagggctacatacaattggcatggaatgctttgctcagaaagctccacccacaaccatgcccaaggctggcattggtgtgaccttggtattatcaaaactacagagattcatgggtacgtttgtgtgtgtgttttgagacagagtcttgctctgttgcccaggctggagtgcagtggcacaatctcggctcactgcaacctccaccttccaagttcaagcagttctcctgccgcagcctcccaagtagctgggattacaggtgtgtaccaccacaccctgctaattcttgtagttttagtagagacaggatttcaccatgttggccaggctggtcttgaacttctgacatcaagtgatccaccagtctcagcctcccaaagtgctgggattacaggtgtgagacaccgcacctggtctgttttttttttttttttttgagacagggtcttgctgtcactcaggctggagtgcactggcgcgatcactgctccctgcagctgtgacttcccaggcttaagtgatcctcatacctcggcctcctgagtagctgggaccagaggtgtacatcaccacacccagctaatgttttaattttttttttagagacggggtctccctttgttgcccaggctggtctcaacctcctgggccaaagcgatcatctcacgctggcctcccaaagtgctggggtgacaggctagagcttcatgtttttgccccaggaatcccacatctggggtttagtccacagacatacttgccctcatgcaacgtgatgaccacacgacaaggctatgcacgtgcaccctttgcacctgcrtgtgccgcagagccctccgcaggccctggactgtcacacctgcggcagctcactgcgcgccccgaaatacagtgtcaagaggaggagacaccagtgtgtagtgtgtagccatctgtgtaaaagaaaaaaatgcatgtatgtcaacgtgtgcacctgtttaccggaattttcacgaaatgatctctgggaatatccacaaggtaacactgtttgcccttggaagcagagccagggaacctgggctgtgggggaaatgggcattcgccctcatatcttctgcatcttttgaattttgaaccatgtgcaggaatgacctagtagaaagaaataaaatgcaaatgtttaaggaattgtcagctgggtaggaagtgttctggattgataaagagttttgaaactagggagtgggcgtggtggctcacatctgtaattccagcactttgggaggccgaggcgggtggatcacctgaggtcaagagtttgagaccagcctggccaacatggcgaaaccccatctctactaaaaatacaaaaattagctgagcgtggtggcacatgcctgtgattccagctagtcaggaggctgaggcaggagaatcgctgagnnnnnnnnnnnnnnnnnnnntattttttatttatttatttttttgagacggagtctcgctctgttgcccagactggagtgtagtggtgcaatgcaatctcggctcactgcaacctctgcctcccgggttcaagccattctcctgcctcagcctcccgggtagctaggattacaggtgcatgccaccacacccagctaatgttttatatttttggtagagacagagtttcaccatgttggccaggctgatctcaaacccctgacctygtgatctgcctgccttggcctcccagagtgctgggattacaggtgtgagccaccacgcctggcaagagttttgaaaccagaaacgggggtcacacggcactctgagtgcgacagatgccgagtcgctcacttggaaatggctcatcctgttatgcgaatttcttcccaaaaaaaataataaaatgaaaaggggccacgtgcagtggctcatgcctgtgatctcaacacactgggaagctgagcagggaggaytgctggagcccaggagttcaagaccagtctgggcaacaaagggatattccatctctacaaaaaattaaaacagtagccgggtgtggtggcgcgtgcctgtaatcccaactattcaggaggccaaagtggggaaattgcttgagcccmggagttcaaggctgcagtgagctgtgattgtgccactgcactccagtctgggcaacacgatgagatcctgtctctaaataaatgaataagtaaaaagaaacgcagctggtgccatccgccctgggaagtgggtatctgcagaagggttgaagggaagcagggcccctccagaagaccctgctctgagtctgtgcatccaagaaggggtcagagttggagagtccccacggcccctccctttgtctccctgctgccgtggggctggggaggggaggtgggggagggagaggaggggagagagggagggagaggagggaggggagggagaggaggaggggagggagaggaggaggggagggagaggaggaggggagggagaggaggaggggagggagaggaggaagggagggagaggagggaggggagggagaggaggaggggaagtgtgaagcaaataaacacgcgggcagggtgaggttcttttttgtctctttaaaatcatttttaaaaagttacaaaacaatatcattcatcatatattcttattttcctttttttaaaaaattaaagtaataaaaaagtcactttataaaataatataaaagggcttgatgggtggggccggtgggtgctgtctgagctggtggactgaggaatccagtgcttctcttctggctaccccctcgttgtcaggaaggacccccaggccacagatggggatgacagcaggtcccttgtctctggctgggctgtgggagaggggcagggaaagccggggcaggagggcagtgrgcakacccagacaggggggacggctggkgccctgtcccgaagagacgggagggcctgctggtgkggggtgaggtggcactggkgcagcgggtgtctgggcccctcagtgccggctcctcctccagacagtctgcctagcttccgttgctcagcatccccagcagctcactgggctccagtccctgcggctgggccaccgtctgcatgtcgaagcccatgtgcatgaggaactgggccacgttcatctcttgccccgtgaactggtctcggacggtggggcatgaggggttgcagtggggccaggggcagctgtccaccaggtggacggggcagcccttgaggggggtcttgctggccttgtggctgtcatggaggctcctgtcccagcagtgcagtgctcggggcagcgacgtccccttcacctggacatccgtccagtggctgcagaggaaaaccgggggagggggtcacatgtgcggagtggcatcaacactgaggcagctgtttttttttttgagaccagccatggcaggatctcggctcactgcagcctccgcctcccgggttcaagcgattctcctgcctcagcctcccgagtagctgggattacaggcgtgtgccaccgagactggctaattttttgtattttcagtagagatggggtttcactatgttggccaagctggtctcgaactgaygtcaggtgatctgcccccatyggcctcccaaagtgctgagataacaggcgtgagccaccgtatctagcctgggtttttttgttttgttttgttttttgagacaaggtctccctctgcctgtcaggctagaatgcagtggtgtgatcactgctcactgcagcctcaacctcctgagttcaagtgatcctcccacctcagcctcctgagtagctgggattacaggtgtgagccactgctcagcctgagtcttttttttttttcttttttttttgagatggagtttcactcttgttgcccccaggatggagtgcaatgttgcaatctcgactcaccataacctctgtctcccaggttcaagcgattctcctgcctcagcctccggagtagctggattacaggcacccgccaccacgcccagctaattgtatttttactagagacagggtttcactatattggccaggctggtgtcgaactcctgacctcaggtgatccacctgcctcaacctcccaaagtgctgggattacaggcgtgagccaccgcacccagcctgagtcttaattcttgccatacagctgttggtacaagtggctctggcacccctataaggaaatcccacccctagaagcgccaagaagaggcccatgggaggccaagtgcggttggggagcatgtggacttttgaagttgatgtcatggaygcaagctgcccggagcagggacactgacctccggatgatgatctcatgggagaggcaggcgggggcaaagctggccctgttggagaggagacagtggcttgtgagctccttaccccctcagccccttttccacccccactcccctagagctgtcccccgcctggccatcaccccttcctgttgctatggctgccagctgttcctctggcccgggcctccccctagttggccagctcccggctgacccttatcgctttgtgcctcaaatccctgctcagagtccacctcttccaggcaggccctcccaggtgatggcaagaggctgccctagacaggcaaatattctgctactatctagaactctattttcattttattttgagtcggggtctggctctatcgccccagctggagtgtagtggtacaatcgaagcttgcttgcctcccacaggcaaggttagctcactgtaaccttgaactcctgggctcaagggatcctcctgcctcagcctcctgagtagctgggattacaggtgatgccaccatgcctggataatttytgtatgtgcagtagagacacggtttcaccatgttgccctggctggtcttagactcctggcctccagcaatcctgctgcctcggcctcccaaaggggtgggattataggcgtgagccagtgtgccaggcccaagaccgatctcgatctctctctctctctctctctctctctcctctctctctttctctctctctctatatatgtattttttgagacagagtcttactccgtcacccaggctggagtgcagtggcacaatctcagctcactgcaacctccacctcccagttcaagtgattctcctgcctcagcctcttgagtagctgggattacaggcgcctgccactacaccggactaattttttgcatattttgtggagatagggttttgccatgttggccaggctggtctcgcactcctgacctcaggtgatccacctgcatgggcctcccaaagtgctgggattataggtgtgagtcactgcgcccggcctacaagacctctatttttttttgttctggtttttcttcttttgttttctcaggacctctatttttaaataaggagggagctacccggcgtggggctcccggggcccacacactcacggcacgtccttgagtgtgtggcgcagctcgcggccgaggttctggatgtacagccgcaggccctcctgcaccggctgccccgtcaggtgcacgttgtccaccgtcagctgtgcctcgtcaaacagccactgcaccacgaacacagggcctgcgggcggcggggctcagttcggcctcccctgacccccgctgctgcccccaccccaggctcacagctcagcacccccaggcccctgcagtgcccccaccccaggctcagagctcagcacccccaggcccctgcagtgccccccaccccaggctcagagctcagcacccccaggcccctgcagtgccccccaccccaggctcagagttcagcacccccaggcccctgcagtgtcccccaccccaggctcagagctcagcacccccaggcccctgcagtgccccccatcccaggctcagagctcagcaccccccaggcccctgcagtgccccctatcccaggctcagagctcagcacccccaggtccccgctgctgcccccgaccccaggcagagctcagcaccctcccaggccccctgcagtgctgctgaggctcacaggccagctagccttggcccaactctccccaggggtgtcagtcataggcccccacagaatgtggcttccttctttcaaaccagcctttttataatccacagcttcataactaaatcaataactaaatcaacaactaaatcaataaactgcctttccttgaagacgggctctgtttaacccctccatgaccttggcctggttctcagcgactccactttcacctaaatatggtgatgatgcccttgcatataacctcaccattcctcagagcgtggggctggggaggaactagcccaggaccctgcagcagggaggggcagcatggggatgagctccaaagcacactagccaccggtataggcagggtgaccacctgtcccactttgcctgggactgagaggtgtcagtgctgagggcaggcaagtcccaggcatgccgcagcgactaggccccctggcacacagccggcctcctccctggtacacagccggcctcctccctggtacacagccggcctcctccctggtacacagccggactcctccctggaccagggccgtggtctccaagcccagcccagaagactggagtccacgctggattttcagaagcaaggaagtgtggccacccctgctgccctgtgtgctccgctctgccgcccactcacagcgcagggtcgggtagaccttgtagccaaagaagcagttccactcctcgccctcctggaactggcgtcggcagcgctccgggaccaccccgttccagtacctggagccacagccacaggttaggctgccgtgggtctcgtcccccggggctccccacccacagatgccactccacccaggcccttctggggcaaagctgcagcacgaggacgggccctccccgctgcggcacctgatgccacggcggatggcctccgtgggcgcgcacgtgatcgtgtcgacgcagtctgtgtggcgatactgcttgttgtccaggaaccagccggagtcagccaggcctcgcacctggatggctgggtagcccagcttctccagctgctcagccacacggtccacattcaggagcaccccggtgccccccgcgctgcaaggagggccagacgtgaggccaggtggctgggaagaggcactcacctcccccgagtctgctcagcgtcagcccgtgccccgaggggggcaggagtcctgatgcgttctgaactgcggatgcattctgcattctctgttcacgtgcaagacccatggccgtcccctccagagcaggccagggctcaggctggcaggccacatttccctgacacagccaggctctccccttcctcctccccttcctctctctgtctctttacctcaggttccttatctgaaaatgaagataaactatgtggcctcaggccccatcatctattccccatttgtctcctggtctcctgtatgcctgctgggatacaggaacccacaggggtgatcctcatctaccgggccctggagaaggagcattagtccatggccaacccctaaccaacgacttaggtccctgcagcccaaaccttcccctatatccaacaaccatggcgtccagaagcatcctctggacagtgtctggttacccagcactctgaagccaggcctcagagacgtccccaatgatgcgggttctcccagctccagcctctcaccctcctagccacctgccaagatctgcacaggctccactccatcctcgcctctcatacaaccccaccccacaccccttccatgcgccctgcacaccgtcctcgcccctcacctccagccctgccccgccctgcccacctgctcccggccagcagcagcaccttggccccgctcagccctctgcccagaagctcccgcaccacctcctggatgatgagggcgcccatgaaggcgtactcgtctgcaagagggagggggtggcctcaggtaggggcctggacagagagaaccacctcctaccccagaatggctggcagaggagttcttgccccactgggggactgggaggaatcttctgagaaggggtcaggggcttgggtggactggaggaaggcgggtgcaccaggccatgctggggcctcctccccagggaatattcagaaataaggacctcctacagttgtggacaagcaggcagtgggagcatggggcaggcaccctgggacatactgtcaagggctttgaaagcacgacaaggctgagagtcagcttttccccagaacccctgccgtcccgcctcatccctgccctgccgtcctgcctcctccctgccctgccatccggccccgtccctgccctgccatgccctgggaaggccgagactcactcttctcagacttggatgaagccccgctccaaacatcactggagcagtaggggatgaagctgcaacacagaacagagtgagcctgtcacagcgcctgccgcccggcagcctccagaaaggacccccagaacaggaccctcagaaaagaccatcccaggacaggattcccctggaaggaccatcccaggatagaacttcccctcaagaaagacctccagcgtaatactcctcaggaagaaccaacccaggacaggaccctttccaggaaagaccaactcaggacaggaccccccaggaaagaaggaccatcccaggacaggatccccctggaaggaccatcccaggagaggaccctgccaggaaggaccatctcaggatagacccctccccaccaggaaggaccatcccaggacaggacctcctccccaccacgaaagaaacacctccagaacccctctaggacaggacctccccaaaagaaccatccagaacaggacccccaggaaagaccatttcagaatatgacttcccaaggaaggaccccccgggaagaaccaccctccaggcaggactcccaggcaagaccctgtgcccccttacaccatgtttgcgttccaccagtaggggttctcctccggctgtgaggacaggatccctgtgcctggggacacagaggcggtgggtctttctagcgggaggaggctgtgtagggtcgggtctgggaaccctggtgaggtgttggggctcctacttggccccaggaagggaggtgtgctggtgttgctagcccgaaccaaggttgccgggaaagtggaggacagttgggtttagttacccccgggaagccaccatggccacggtgcccggctaggctggacaccaggtctgaccttgacttcaaccccttgccctgctttgaccctggggagggccagagccgctgggtaagcgcctgaatgctaatgtggaatgggccccaaaaggcaagagtgaagggcgccccttgctcttagtaaacccgggcgccaggctgggcatgatgtgcggggtgggggcctggctggggctccaggaggcgggcgcggcttcctcccgggcctcacgtcgagacgccttccccagggcccgccgctgacctgtgcgagtgcgcggccagtcccgggagctcatgaggcgccgcatggtgtcgtatctggagtcgcagttctcgcggttgaagcagtaccagccgcctgcggacacgaccgccgctcaggcccgcgcgcacagacccccggcctccccccgcctcagccctggacgcaccttccaggaagaggagccaccgccggctgcccctggactccttcaggtagtagctgcgggggaggacgcaccgcggggggtcggccagggctgccgatcccgcgccccgcgcgcccagctccggcggagggaacgcgccacctgttccggccgcgcgcgacggtcgcacgggggcgccctcggccaggcccacggggagctcagggacggcggcggtcccgggaggtggcgctccggggcggggaacgggccgcgcggggctgtggtccgtggaaaatccccacgttccgcccggcgcgggtcccgctgtcacctcggcgcgggcggcggtcctcccggggcgcgcggcgggcttgaagcgtgaaacgcgtccgcactgaaggagcgcgcttggcgggggaacgggacgccgcggggagcgtaagtgcgggaacggcaccgacccggcggagtagccttcctgccgagccccgaccccacacccaagtctcccgctgtccccggctgtcctcggcctgttgagcgcgtgggcggccccgcgtctcccgacccccgacctcacgtcttttatctacttcggggctgcaaggaggtgggcagcgggcctctccccgccccccggtgtcgccggttcccgctggagccaggcgcgctctcgggctgccatctccccgccccgggaccgaaggacgccagcagagcggctgggcccagaggccgaggggtcagtgcccgagctggccggggaccagcccttccagcgccgctccgctccccacgcggagagtcaccgaaccgggcactcctcggggccaggaccgcggggcgcccgacggaagccctttctccccggggagagaacggccgcggcccgcagggaaggtccagccggagaccgggcgcgtcgggcggggcggggaggtgcagggcgcgggccttacccggcggggctgccgtcgttgcaggtcaccgaggtgttgagtaggaggtgcaggcgcaggtcctcgttgagctgctgcgcggagcaggggtacagggactgcgccaggctcttgacttgcgccatgaagctgtccatgttaccctccacggccgtgaagtccagcgggaagctctccacgggctgtccggccgccggcgccgcctcggtccgcgggggaggaggcggctgctgaccccggcgccgccaggtcttcctgccctcgctgcccccggcgcagtgcagcaggctcagcagcagcagcacgcgcacccctcggcccatggccgcgtccacctgcggggagcgggcggccttgaggcggcggcggcggcggcgggggatgccgggccgggggtgccgggccgggggtgtcgggggcactggccgctcctgctccctcgcccccgctcccgcccgccgggcctggcggagaaggcgcgcgcggctcggcgtnnnnnnnnnnnnnnnnnnnnnnnnnnnnnnnnnnnnnnnnnnnnnnnnnnnnnnnnnnnnnnnnnnnnnnnnnnnnnnnnnnnnnnnnnnnnnnnnnnnnnnnnnnnnnnnnnnnnnnnnnnnnnnnnnnnnnnnnnnnnnnnnnnnnnnnnnnnnnnnnnnnnnnnnnnnnnnnnnnnnnnnnnnnnnnnnnnnnnnnnnnnnnnnnnnnnnnnnnnnnnnnnnnnnnnnnnnnnnnnnnnnnnnnnnnnnnnnnnnnnnnnnnnnnnnnnnnnnnnnnnnnnnnnnnnnnnnnnnnnnnnnnnnnnnnnnnnnnnnnnn

SEQ ID NO: 96468 - DNA, 88425 bp, Homo sapiens
caaaagaaagcagtaatggaagaactgaggaacaataaagaaagacataacatgtatagaaaacagatagaaaaatgtcaagaataataacattttatcagccattacatgacatataagtagattaagttctgcaataaaaggacacaaattggctaactggattttttaaaatgacctcaatatatgttgtctacaagagactcacattagatgcacagataggttgaaaagaaaaagatattttatgtaaaaaatattcaaaagagagcttgaataggtatactaatatcagacaaaacagactttaagacaaaaattttaacaagtgacaaaagaagacataatataacaataaaaaggtcaattgctgaagaagatacaagaattataaatatgtatgcacttatcaacagagccacacaatacatgaagcaaaaactgacaaaactgaaggcaaacatttgcaagtcaactctaatagagactttttaatacccactttcagtaagggataggactagaccaaaaatcagcaagaaaaaccttgcacaatattatgtgccaatgagacctaacagatatttatagaacactctacccaacaacagagtgcacattcttttcaagtgcacatggactattttccaggattaattacatgtgagaccataaaacaagtctcaaaactttgaaaagattgaaatcatacaaggtatattctccaaccacaatggaaaaaaaatagaaactaataataaaaagaaatttgaaacatttatgaatatatggggaaattaagcaacatactgctaaataatagttgaattaaagaaagaatcacaagagatttaggaaatgctttgagatacattaaaaacaaaatataccaaagccatggagaatagcaaaagcggcaatgagggaaatcttttttttttttttttgagatggagtctcactcttgttgtccaggctggagtgcaacggcaccatctcagcttattgcaacctccgcctcctgggttcaagtgattctcctgccttggcctcctgagtagctaggattacaggcacctgccactaggcccagctaatttttgtatttttagtagagacagggtttcaccatgttggtcaggctggtcttgaactcctgacctcaggtaatctgcccgccttggcctcccaaagtgctgggattacaggcatgagccaccatgcccggcctgaaatttatggttattaatgactacattaaaaaaggaaatatcacaaattaatagcataaccacctgccttagaaacaagaaaataaaagatcaaaactaaactcaaataagaagaaaaaatagtaaagactcgagtagaaataagcaaaatagagaatacgaacacagtagagaaaatcaatgaaaccaaaggttgattctttgaaaagatcaacaaaaatgacaaacatttagctagactggccaagaaaaaaaaaaaaagaagaagattcaaattactaaaatcaggaatgaaagaggggacattactattgtctttacaggagaaaaaattacaaaggaatactataaacaattgtatggcagcaactgatactagataaagtagataaaataaattcctagaaacacacaaattattaaaacagactcaagaagaaatagaaatctaaacaaacagacctgtagtaagtaaagatacaagctactcatccaaaaaaaaaaaaaaaaaatctgcaaagaaaatctcaggacaagatagcttaattaattgattttctcacatgtttaaagaacattaattaaagtatttcaaaagaagtagagtaggagggaacatttcctgacttactctacgaggccagtattatcctgtgagcaaagtcagacaaaaaaccatcacaagagaaaactacagaacaataacacttgcaaatataaatggaaaaaaaattctaagcacaatactgaaaaactgcccagcagcatataaaaatgtttatgtcaaagccaaactggatttatttgaggaatacaaaggtggctcaacatattaaaatcaataaatttattataccacattaatataataaagagaaaataaaaacccatggtcatctcaataggtgcagaaaaagatagtacctttcatgatttaaaaaacaaacatgcatcaagctaggaataaaaaagagctttctcattttgataaataacacctatgaaaaagccacagctaacacatcatactcacttactaaaaactgaaaaaaaaactcaaataattttcctaatgtgaagaacaaggcaaagatgtttgcttagactacttctgtttaacattgtattgaaggtttaagccagggccattaggcatgaaaaagaataaaaactgtccacactggaaaggaaaaattaaaactatttctgcagataatagtgtcttaaatcataaagaagctacaaataaacagtttgaacgagtttagaaaaattgcaagatacaaaatcaatatataaaaatcagttgtatttctaaacattagcaataaacaaactgaaaaggaaagtaagaaaacaatttcagtaatatcagaaagaatagaatacttaggaataattttaacctaatcagggcaagacttatatactgaaaactataaaacactatggaaagaaattaataaagatctgaataaaataacaggaagaccccccttgttcacagattggaagacttaactatcattaacatgacaatactttctaagttagtctacaaattcaacacaatctctgtcaagtgagaggaagttaaaagatcatgattcaaatgccacagagcctcactgctcttaatgttgtagtagattttcttgaataaatgtttcagcatttgctgtgtacccttagaataacttctagagactttaagtgggggagtattatttttttcataattgttactagttatgcttgttttgcaaaggagaaggtccgtgaagcttctcccactgccaatccagaagtggaaacccagaaaccctttttaaaaaaaaattcctacactgaatgtcatttcaacatgtaaaacacatacaagtagaactgctctaattgtgattggggtaaagtctccgaagtccattcgggtggcaagttctcaaatatttcacggactctagatgacttatttatcaacccttggattagatgacagtattctttcttttttttttaacttttattttaagttcaggggtacatgtgcaggttgattacataggtaaacttatgtcatgggagtttgttgtacactgttggttgaagtataaattagttcaaccattgtggaagagagtctggcaatctcttgaagacctaaagacagaaataccgttcgacccagcaattctattactgagtatatacccaaagaaatataaatcattctattataaagaaacatgcatgcgtatgttcattgtagcactatttacaatagcaaagacatggaatcaacctaaatgttcatcaatgatagactgaataaagaaaatgtggtacacatacaccgtggaatactgtgcagccaaacaaaacaaaacaaaaaaaacaaaaggagatcatgtcctttgcagggacatggatgagcagtgttctttcaagccctaatatttgtgaagtgtctaatatgttatttatatatctaagaactctcctctctcctttgtaaggaaaactgcttttcttaagtgccatttctcttccactccttcaaggaaatctgttcacttttccttttcttctcagtaaatgctatctacgtatttagtgcatacttaattcttttaagccttattgacagttacatcagttttgagtctaagcccattaggtaatcaggcctctgagaagctcatattttttcaatgagtatacctaataacaacttctaaacaactacagattctcaaatgttttgggcacaacaacaaaaaatgataaatcggaccctcactgatgcttttaaaagtaaataagcaaatcataagaactcagggatatgggagataaaaacaatgattctcactgtccaaggatatataagtgggtagggaaatgccttcaaacaaggagtttactccttcgacctttgataaaaggataagctttgtcagacgggcccaaagaggagcttgctgataagagttgtcacaaccactccacccctcagaagtcctctgccctcaccacttggctgtggagtgacatatgtcttcatagctcctattacccttgatttttcttaactgggcctttctcatttcatgaattttactactaatcacttggagaaaatagataataagtaatcaacttgggattttaatagaaatttcaaaattttcactatcacaagtccatttggtttatatgctggagtcttcttgagatgtttctgagttttctcctttgatgttctactctctgttatttgtttgttctcagagggggtttcactagtctctcactcttccacaaattgtttgttagcagaagaaacaggaatcctttcctccatgttatctccgtttccacagtggagatttaataaaaataaaataatcagtttttcctttcttgaaagtggcaattaatatttttaactccagatcgaatgatgctcaatcactagcttttttaagacatactttagtttgtcaatttttccaattggaatagaggattagaagagtagaaaaggaaaaaaactaagaaatattatgtaaataaaaattttggctggagaaggaaataaatggtaagtacatgggtggatatctaactactatttttgggcaaaatgcaaagaaaatagtctgttttttagtatttgatcgatcttttcttgggctcctttttccagcagtccagatcattggttgtgattaagatttcaggttgtcagcttcagttgaatttgctctctgaagaatgttttacattatcttctttgttcattaagctagactttaacacatcatgctttttcttatctaaattgccaatgatattagtgttattattgcataaattatttgtgtattggtgttctgtatatttctataattgtaaaccataaatactcttagtcatgcatagaatatttgctgttctttggaaagaagcatttgagttcatagataattcatagagaattttgcttcttttagatggcatctctgtgttcacatattttttaccttctttgctttcttgtcttatctacagatatgacctctgatttttcttacatttagtatgggccataggtacttagccccatcatatgtattggtcctctgcctctaatccctccaacaacaacaacgacaacaaaatccaatctgcgtaacacctccatataattctttctatgcactattttttcacacaattccactcttcaaagggcaatagtcttccactgcatatatattacatacagaataaattcaaatactttgggctgatacccatagatttttgctattttgttcttgctgcccacttttctactattgttttagtttataagcaccaaactaagcattcatttttctcattttctgaagcagaggtggaaaccttgcctgttcatatgcagattatcatgtaggttattacatgaagattatcatgtagattattacataaagaataattcctctggattcctaccaaaccatgtcaattactggggaggctacaagtgttagagtttgtgtctgaagggccttatgcacaataggaatgatatcctcttgtcgggggaaagacttgtcattcaaaataaaagagttctatatctgtacagatagtagatatatgataaacttttccactgtaattctcagaatcaactgaaatctaccacagttgggggagagcagtaaggctattaatgtcacatgaaagttgatgctgcccccgccggtcgcgccgcagaggccggtgagcgcgggcggccacgcgcggaaggcgcgggctgagcagagccggcgttggagcccgcgcgcgcatggaggcgttgccggcagccccctgagggcagcgtggagacaagacccggcgacctccgcgcatccctcgagccgccacgcgctctcgccaccgggcggcgacgggccgcggagccggcgcggccatggcgacgggcggccagcagaaggagaacacgctgcttcacctcttcgccggcgggtgtggaggcacagttggtgctattttcacttgtccactagaagtcattaagacacggttgcagtctttaagattagctctccggacagtctactatcctcaggttcatctggggaccattagtggagctggaatggtgagaccaacatccgtgacacctggactctttcaggttctgaagtcgatcttggagaaagagggaccaaagtcactttttagaggcttgggtccaaatttggttggagttgcaccatcaagggctgtatactttgcatgttactccaaagccaaagagcaatttaatggcattttcgtgcctaacagcaatattgtgcatattttctcagctggctctgcagcttttatcacaaattccttaatgaatcctatatggatggttaaaacccgaatgcagctagaacagaaagtgaggggctttaagcaggtgaatacactccagtgtgctcgttacgtttaccagaccgaaggcattcgtggcttctatagaggattaactgcctcgtatgctggaatttccgaaactataatctgctttgctatttatgaaagtttaaagaagtatctgaaagaagctccattagcctcttctgcaaatgggactgagaaaaattccacaagtttttttggacttatggcagctgctgctctttctaagggctgtgcctcctgcattgcttatccacacgaagttataaggacgaggctccgggaagagggcaccaagtacaagtcttttgtccagacggcgcgcctggtgttccaggaagaaggctacctcgccttttatagaggactgtttgcccagcttatccggcggatcccaaatactgccattgtgttgtctacttatgagttaattgtgtacctgttagaagaccgtactcagtaacaggccggaaaattgtgctctagaagaataaaactgaaaaactctaaaaaaaaaaaaaaaaaaaaaaagttgttgcttagggcttagggatatagtactgggaatatttcagtgaggaggttggaaaccagaaagtattgtctgctatgacaagagtgttgggtatgtgaaagtgtgcctgtactacatatgctcactttgaacttacttaactgttattaccttgaataatgagttttactttatagcacttaaagacacctttctccatcagatacaggttcttggtctttgactgaagatataaaaatcatataaatgattaaagatataaaaagagataaatagatataaatggtttaagtggctttcttccctgaaaattccttaagggaaggactctgctttctgaagcttttcatctcccattttactacatacatttcctgtacttgcccgtaggtaatagttcgtttgtatctattttctgaatatatgttttgaagaaacatataatatattctcctcattcccaggggatacattctgaaaaccctctgggatagttacttatcaaatatttattatcaactgtgtacaggcacgattctcttttctatggacatagcagtgaacagatgaagtttttatttctaatgtgaaatgtcacatagttttctactcaaagatctttttcaatgtttttctttttcctgattaacttagaaaatgggcaagtcatataggcttactgtgtgtatgtgtgtgtgtgtgtgtgtgtatgcagaatacacaattggaagcacttggtgtcctgaaaagtgccaagtacaaaagactcaggtttgattcctactactccatttactaactaaatagagggaagttgcataaaccctcactttttgtttgtttgcctttttttatatgtattttaatgggagtacttttgtacaaatacctcattaaggctaagaacacttatcatattcagactgcaggtttcaaatgttgattctgccacttcacacttaccggctgtgtaaccttaggcaagttttatgtcccttttgtcctccagttttctcatctgtaaaatacaaatataacatatctcatagggttattctgaggttcaaatgagttcctgtgtgtgaagtgctttgaataatacctggcatacagtggtatatgagctaactctcactactgctaccatgctacatttcttgcagttttgttggagaaataaatatgatatatatatatatcaaaattctcagcatagcactggatgcatgactgtcatccaataaattgaaattattactgaagcaatcagtcattttttattattctaagagcctcagaagcatcactctagagaagaatagtaggacaataatttatgttaaatgaagagaaattttggaagaatgagaggcagcatagccatcttaagaaaagtaatagctatttgtcatatgtagaagttgtcttagtcactattgctcccctggcatactatgatctccactaaacagaagtattatattttgatttattataatttaatataatacacatatccattataatcatagttctaaaattaaaatccaggaatggttacttcttatctaaagcacttaggttcaaattaacccttgggatcaagcccagactccccaccctgatatgcataaggcctttcacagtgtaaaccacctccacctttctgggctcacttcttgttgatcccgcactgctctacattgcatcccacaccagatcacttttatttttcaattacatcagtgcccagggtccctgtcagtctacacattctgtgtggtacctttcccataatttactcatccaatttaaataccactttctcgtttccccatctggttagctgctcctgctgtaatcccataggctttatacacatctttaagagcatcatttacattgccttaacactttatgtatgcgtttatcacaacatggagggagatcaatgaagatagggactatgcttctacatcactggagcttgacatgtcatgattcttaacatgatagaatatttattgaataaataaatggacaactcagtgaagggagtaaggtaagttttgttatcaccacttcaccggtaagaggggtgaggctttgaaggcccatcagtaattcctattgaaagccaagagaatagcagacctcccatttacacccagcattgtctggaggtctgttaggagacattttctagattcatcttgactactgtggcctggctcattttttttgagtgcaatttctgcctaatgcagtgtctctcaatcctgggtgcacacattgaattgttcatagcagggtgcctgctacttaatgatatacttaaatgttttttggaaaaggagagaaaaaaaaaaacactgaaactgcctttctttcttaaacttttaattatttaggttcttatactaagttcctccaagtttcatcattagtttaagtattttaatctgattttaactgccttactgattccccaagggtttgtttccgcttttttcaactaagttaagaacttctagactatatacttaaaattgtagttaattgagattggccacagttgaatttcttagctgcgtaacaggattttcatttgaagctatttattcttgacaatctctactcttaaagtgtggagttctcttaaaggggctgtttttcagtgaaaatttccagatactcctcaaatgtgtttcatcattagccaggaatcaggaggaaatagagctcctgggatgctattatttcaaacccagatagatgctccaagtttttcccagtaaaagtaggttgtctatctactaccgtgttgctccctttgagctcccaaactcagctgttggtccattgaattatacagtaactaggcacgattatgtgactgcatggcttaaaatcctccaatggctcctcacagcttttaaactaatattgactaattacctttcatgcaaacctacagtatcggtgttaaaccacatatacctacagatatccacataatatccttcctttcaatccatctgatctacttgcagggtcccagaagcatacttctgttccttcatgcttgtgctttactcctcctagagtgcttttttccctcttattactttgcctagatctctgctattcattttctaaaacttaagttcaagtgtcaccaaaggggcaccttgaccgacaccactcaatcctcatccaagcggatactaactcctctttctcttttttcccaaggcatgaagggcccttctctgttggcattcacactgtactgtgctgaattattgaccagactttagctctttgtaagacaagcacatttcctcatttggctttctatttccagcactcggtgcaatgcttattacatgccaggcactgtcctaactgatggggattagtgaatggtacaatctaccaagattcaacccaaagtcatcgacatttcttagatcctttattctccaagttctgatatctaaacactaaattagtgattcataaaatgtttaaataatttgaataatttaaagaatttaatcttaaataatttaatcttgaacaatttgaaaaaattttggactctctagggaaaaaatatacaattcctatgtattttatgtaaggtttatgacactttataaataatatgaattcaatctcctggttgaattcatattgtttttaactggcaggcactgtaatggacacaggacatataatgaccaataaggcaatatcattgctttcagagaatttcccatataggcaaaaaattacacatgatcaaataactgcaatgcgatatgacaactgtgataatcaaaggaggaaaatgtcaactcttaaaagttttcatagatgtagccattgagctaatcttaaaggggcaaaatatgtaggagaatattaaagtttaaagaacccctaaggaagaaaaatcccaaaacaaagtgttgtttataattttaataacaattataataacatcaatacttactctatgctacacgttactctaattgattttacgtacattaattcagctaatgctaaaagcgatccctggtagtaagtaccattacstattggtttattagggcttccataatacagtgcaagcataactctaagatatggaaggtttgacttcagaccaccacaataaaacaaacattctaataaaattagtcacgttaatattttgatttcccagtgcatataaaaagttatatttacactatattgtagtatatttatggtgcaataacattatgcctaagaataaaatgtacataccttatgttaaaaatactttatcctgaaaaatgctaagaatattctgaaccttcagcaagttgtgatcttttttctggtaggtcagacctctggtagatctagcaggttgatggttgctgaccgatcagggtgatggctgctgaagtttggagtggatgcaacaatttcttaaaacaagaaaaaaatagagtttgctacattgattgactcttcctttcaaaaaatatattcttgtagcatgtgatgctgtttgacagcattttgccgacagtagaacttcttgcaaatatggagtcaatcctctcaaaccctgctggtgctttattagataagtttatagaatattctaaatactttgttgtcagttcaacagtgttcagagcatcttcaccagaaataagtttcatctcaagaaaccattttctttgctcatccataagatgcaacccctcattcattcaaattttattatgggattgaataatttgtttccatcttcaggctctacttgtactccagttctcttgcaacttcccccacatttgcagtaactttatcccggaagtcttgaatcccctcaaagtcagccctgtggtttggattcaacttcttccacactctattaatattgatattttggccacctcccatgaaaattaatgttcttaattgtatctaaatagttaatcccttccaaaaggttttctattcattttgctcaaatttatcagaggaatcactgtatctcggctatacccttatggcatgtatttcttaaataatagcaattgaaagtcaaaactattccttaatccatgggctgccaaatggatgttgtgtaggcaggaatgaaagcaatattcatctccttgtgtatctccatcagagctcttgggtgaccttgtcaatatgcagaaatcttttgttttttttgaaggagtaggtctcaacagtggacttgaaatattcagtaaatcatggtataaacagatgtgctgtcatctaaacattgttctatttacagagaagaggcagagtaaatgtagtgtttttgatggcctttggacttttggaatggcttcaactaaataagtactggcttcaacttaaactcaccagctgcattagctcctaacaagagttagcctatcctttgaagctttaaagccagtcattgagttctttctagctaagaaagccctagatggcatcttccaatagaaggcaatttgtctaccttgaaaattgtttgtttagtgtaatggctttcatctattatcttagcaagatcttctggttaattttctgcagcttttccatcagaacttattgcttcacctggcacttttattttatgaagatgggctcttttcttaaatctcttgaacaactgccagattcaaacttttcttcttcaacttcctcactgctctcaggactcataaaattgaagagagctgcgrccttgctctggattaggctttagcttaagggaagtttgtagctggtttgatcttctatccaaaccactaaaactttctccatatcggcaataaggctgtttcactttcttatcatttatgtgttcactggagtagcacttttaatttccttcaagaatttttcttttgcatttacagcttgactgtatttcacataaaaggcctagctatgttggctttggacatgctttcctcattattattcttacctctaatatttatctaatattattcctacctctaggtaattattcctacctcttgatttaaagtgactcttcctttcaattgaacatttataggccactgcagggttattaattgacctaatttcaatattgctatgtgccagagaatggggaggcctgaagagagggaggaggactgttggtgatggagacgtgagggaaggaggatggctggcaggtggagcagtcagaacatacacaaaacttcaccatcttatatggatgtggtttgtggcaccccaaaacaattacaagagtgacataaaaaatcactgatcacagatcataataagagatttagtaatattgcaaaagtttgaaatattgtgagaattaccaaactgttacagagacatgacacgaaaacatgctgttggaaaaatgtcactgagagacttctacaatgtggggttgccacaaaccttcaattggtaaacaatgtaatatctgcatagagcaataaattgaattgcaataaaatgtggtatacctgtgccacagactgggtagcttgaacaacagaattttttttttctcacaattctggaaaattaaagtctgagatcaaagtgtcaccagggttggtttcttttaaggcttcttcccttgacttgtaaatggccatctttttcctgtgttttcacatagtctcctctctgtccctgcccatgctcaaatttcctcttcttctaaggacttcattcatattggattctggcctactaatgtcttcatttcaacttaattatctctttaaagatcttatctccaaataaagtaagattctgaagtattaggagttagggcttaaacatttgaattttacagagacacagtttagctcatatgttataatccccacttcactgaaaagaagagtggagcacatgaagttaagtagcttgccccagtttgcagaattattaagtatcacaatcatctagctccagaatctgtgaggctaacctttagattgtatgattctctttttatattttaaaataagaaataaaattgatagacctattgaattaatttttaggacaactctttcatttgtggtacaccataattcacaaatagcaaaaatttgcctatgtctataccataggcgtaccaatttcttgacagcaaagcagggtctagtctggttagtacttggatgagagaccaaatagcaaatatttaaaatgtcttttctaaggaaattaaattggctcctgtattaagctgtagaactaatgatttctgctctgtgcaagtataatggccacaactaacctccctgcacgttaagcactgtccttagtgtacctgatctcatttatgtcttacagctctttgaagtttgttattatccacattttacagatgggtaaactgagacttccagagattatcttctctctcctcacaaaaatcaataacaggaatttgaaacaagttttcttaggaggagrttttgtatttctgacttctcttcttgctcccacatcccaaggccaaagttaggatgccttgtataagcctttgtgcttgtgraaattggactttcccgtcttgtatgttcatctggcaggttcttcctatgttcataacaagatatattgtactgctttccccaattcccctcactttcactgcctcttgtgaatgtgagctatttaggtccctttcagcactcttaaagtcacctcccaagtattctgtggccctcctcaggagggtattctaagttagtcatcatggatacatctaggcccagatccagaatctcatgttcatggcatcctctttgacctacttatctgttgccgcctcataccctactaagccagtgctggtctttggctcctcatagcctgtgaataaaaaagggtttcaattctacaaggataaatcatctgtctttagactactgttactagtgtttcacaactgtgccgtcaccctttcttacatactctgagagattttgtaatcaaattttgtcacataaggtgaaatcagaagatgcctagttctcacttctgtgtatagctttgaaaggcctgctaatgcttggaacaaaacatgaaagccttgtccacctttctgttttaattcctaattactaatttcttgcatgttagtggaaaagcattaaacttggaacagagcaccttgattctggtcctagctctgccagctgggtgttataataaaagtcacaggaatctaaaatggaacccgagatcttctactgctttctagttgagttactattggcaaactctttgactcaattttttttttctgtaaaatggaatcaataaaataktaagcaagatattgttcaaaggaaaacttcagccaacttaaatttaaaagagtttaattgagcaaagaacaatttatgaaccaggtagcttcctgagctagagtgggctcagattctctagcacagccacatggtggaagaagattaatgtacagaaaaagaaaaataacattaagaaaatggaagtgggggacagaaacagtcagattggttatagtttggtgtttgacttatttgaacatggtttgaacagctggccacctttgattagacaaaactcggtgattggcacaagaatagactatagtctgtttacaactccatttagtttatagttcacaatgtagagagaaacctttaggctgaacttaaaatatgtaggagacaactttcagctaaacttgatttaacaatatattaagagtttatattatagaaattgctttattgctaactttgtcatctgggttagattataaactcaagattattgggtagatagttggcacmtaatctgtgtgcaaggcactgagaaaacaaaagataaaaagctgttgttcttcagctagttggcagcattgatattcctccaatgtacttgtgcctgctttgaaaacaacaatgcctctgcctctatttggattggctccctcacggtgaaagaaaaaggagtgattgtgatcctgaatttctgaaataaggagcatgtttaacggacaatctagcatctgttttctgtacctttcccaccctgttgacaaattctcctccatctgcatcgcttaaagcttagtcagaaagtaacagaaacctcctcatggagagaaaggaaggagagaacagaaacctagatagggaacactaaagtgtcagagaaagaaggagaagaactgggttctcatcttaactcagtcccttaccaactttgttcactactttctctctctctgcctttttttttaaagtatgatttcacattatctccttcgttgtatttcttatgctaatacatatcctttcctgatcttgtaatgtattcattgctgctccttgagtataaagtgtgtgagtcctgggtcctctgagaaaaggaacacttaaggtgtttaatgctaattaatgcaggtgtctgttggataaacagcttacatttctagatgaaggtcaagcagaacgtcttccgagagagaaaatctacacatcagactttggtagacgcatgtgcatacttgcaactgcagaaacactcctgtcatcctatgtaaacatacagagaacagggtatttactattattagtaacagagtgatagccaagaccccttgattccaatattggttgtaccgttaactgtgacctttggattcaaattttattttgcctctgtaaaatgaggggtttggaagggaagaaaacaaattactgctttttcagaactaagccaatcatttatattgtctcattttatccttaactattgttacttgacatttcacttccttattttatttttgttctcataaatacattaaaataaatagtaccatcccmtttctataaatgagcacactgaggcttagagagttttactggattaattttaaatggaaatgtttattatcatttaaaaattacaagtttgttttaacaagtaactacttcaaaacaagtactacgtgaagaaataaataataaaaaaagaataaaaaatataggaatgcactggccttgctattgtacaactgcaattcaataaattttgagtgactagaaatttgagtggctggaggcatctcaagctgcagttctcaaagagagtatgattgtcacgtcatctgtcctggcctttcagaaagatgatatccaagaaaaataactccagattctcttgtattttcattatctcattattcccatggcttcaattattagctagaggttggtgacttctcaatttgtgtttccaaagttaatcttactctgaaatccagacccagatatctagcaaatgacctgacatccccactgaaatgtctcaaaaacatcttgcagcacagtacatctagaatcatgacatcaacatcctcccctaatattccacttcttcaaggatttctgtatctggtaatacaaacacttttctcagtagcataagccagaaaactgggcattttctgtggtacctggtccctcagttgaactgcttggatttccggacatcatcttttttcctggacataaattttctcaccgatttctttatcccccttgatgcctgcatatccaccaactcctattcttcctcagtcccttctctacaatgaaatctgtgtggtcttttacaaatgataatctgttcatgttatcattcaccatccaagatacaaatagttactttctaccactcttaggaaaaaaacacaaatctccctaacatggcctctgctaccctgcatgatttggcctcagttcaccttcctagactcatctggagctatttgctccttgatccctatagacatattggtcaatttttaggtccttgaatttgtcgcatacttccgatcaawgattctttccaaattccattctatccttcagaaatattcttctaccatttctctaaacagtcattcttcaactmttgaaggatgcaccatcaaagacttttcctcaggccacagacaggatgaggcttccccattaaatcctgttaccatattacatgcttccatatttgccagtccataactataggttgatttctgaaattgctagttagtgtctatctccaccactagactccaaatactatagggcagaaaacttcaccaatgctgggcacagagccagtttattatagatgtttaaaatatattcatttattttgaaatatatgaatgaatacataaataaaaaggtcttctattatatgtgtgtatgtaacttttttgtgtgtgtggtcatcgtggtggtagatgtgttacaacaaatcagttcccaaatatccaactatcttaaggcttccttgtttgttctttttttaaataaatatttattttataactattttatttgtaaaaatgttgcaaagatagaatggagagttccaacattttccatacccaattcccctattattaacatcttcccttggtatggaacattggtcaacattaaggaaccatgctgatacaattattatcaaccacagtcaatactttactttatttagattacttagtagttacctaatatcttcttctgcttcaggatcctacccaagatactacattacatttaatcatcctgtctccttaggttcctcttgcctattacagtttttaagacttaccttgttttttgatgaccttcacaacatcgaggagtgctgctcaggtattttgtaaaatgtcccacagttgatatttgtctgatttttttctcatgattaaactgggatatgtgttttgggatggacaaccatagaggtaaagcaccaatctcttcacattatatcaaatgtgtatagggactcaaaaatgtatcccaargtatggtgccttgggatgctgagtattttgaagtaaaggagattggaattcctcagaagcaaagtctctggcccctytttctcctgtgaaataaaccatagaaactaaactccctcttccccaagattataaaaactagacccttcttttccaaaacaagccataaaccctaaaactattactatcatcttctcccacctttctgtatagcagctggccataaagaaatactctgacctacgttgtttgatagtaggccataaaacattcattgctaaggtcctgccctatatgtaggaggagggactgctgcacagagaggtcaagaagaatacaaacagacagggcttactgggttatttctctcagtctattaccatgagatcatactcttttgcccaaatttctgcaacactggccataagcataagatttaagcataaaaatagataattttccctgggtctttggctctcttttctgaagtctcccatgtcatataaaactttgattaaataatttattatgcttttctcttgttaatctgtcttttgttataggagtgttggccatgacccttatgatgggtagagagcaattatcacacctctatcaccccaaaagggccatgctattaacataacttaccattgtgaatgttaaccttgatcaccgggcagaggtagtgttggtcaagtttctcaaactgttaaaygatttcaccatgttttgatactgtactcttcgaaaagaagtcactgtgtgcatcccatacttagtcagtggggagttatatatagtaccttcaagacagagtatttacataattatttgaattcttttacatgacagatttatgtatttctctccatttattaatttatatatttatagattgtatctgtacagactcctctatatttattttataagactttattttgtggctcaaactcttccagctttagccttcaggagtgatttcagttgactactctgtccctttgacatatctctaacattgtgggtggttgtcgtttctttgaacatatccttactttatggcactgaaagatgctcaacattcatcttgtatatttcttaccccagccctagagcctgccgtttcttcgaggaaccccagttccctttattggagaatatttcttctgttctgcctacttttccttcttctggcattccaattatgcatatgttacattttttggaaattatcccataattcttaattattttttattctttctctttgcatttcagtttgggaagtttctactaacctaccctcaagctcactgattcttttcttgaccatatcaatgttagtgatatatacaacactgctggagtgtttttgatttctagactttctttcaattttttcttagggtttccatctttctgcttacattattcatgattttttgcatattatttactttttttattagaaatgttattctaatatgttaattttatattatgtataggtttttcaaattgatattattcacaattatttcagattccgtgtctcatagttccaaaatttatatcatatctaatatgatataaatgattctaatgattgctttatctcttcagattttttttcttctctgttgccatgccttgtaattttttattaaaagccatatgttttatcaggtaagataaactgaggtaaatgggcttttagtgtacaaatttatgttactctggcaaggagttgcacaatgtttaaatgtttgtcctagttgttacagttttgagatcagaggcctcaagtttctctaatgtatttgtttttgtctctattcttggttttgggttcccctatatagtcttcttcagagacagcttatgtatttcagctcttttagctgtaatccactgttgttatactggagctttgttggatgctggtaaagtatgagagaggggagtgttcaaaatattttaattaaatcttagtcctttagtaggccagtgcattggggcttcacaatacagctttttcttcttttgcctctgcccctctatatgcttccctggttgcagtatttctatttatttccttgaaactctgacccccgtggcttatatttacttcctcttaggtgagacaggaagactgaaagaggctggactgaaaggaattctcttcctgaaactgggataagtctctaacaatttcccctggatcatagggcttggatatggagaatgtcctgggcatatttcacaawggtcactctcctcytccctgtaacagagtaaggagagtatctttctgagttcttcaccataaaaacctggtggagttcctggaggtaaagccccaaacatgtggaagttcccytaagacagcagcacccrggaatttcccactatcatcactagtctagactcagtctccagccattcatcgaagtgtttcagtgttcctaccactttaggaatccagctgctcctgcccctggtaagmagatctcagctatgttcctctggatgaacccatctctccacttttgaggatggcagtttgccccgcaacttcaattttctcatgggtccaagaaaatttgttgattatgaatttgtctattattttcttattttaaggataagagtgaccagagtctttacatgtctgacctgaaatcagaggtcccatgccagcttttatttgtaaaacacatctttccatatttccatctgtggtcatctttatgtttttctaatttttctgtggtgaatttcactgttcctcagattttcagaaaaactatctagattcagttcaaattaagttttgctaaaaatatgactaccccctcctccccaaatgtcaatgtaattatctaagttaaacattaatattcccatgtgagctattctattcatggtctggtgaaattaactgaagttgagaatcactggtgaagaacttaatcaagattaataccttcatttgaaaaggttgatgatgtgggtgagcacattaatggtttcatccattaaatcttttggtgctgagaattgatgtccttgtcctacttaggtaaagaatttttatttcatggcagaaacaagattatttataaattgaactatagaagtaatttttctcgattgacaaaaggtacaatttttgcctcaagcctttatttagtggctcactgtatatcaggctgttcccaaatcagtcaaaatttgacaggggtggtggagggattatcagacagcctccttctcattttaaaaaattaatttaccaattgaaaacrcatggtttagtacaaataaaatgtctactaaaaattatctaaaatgtgatttccttttttggtaaaatacatgtagagtgttgtggatgcatattttaaaaactagatataacaaaagcatagagcaattacatgtgattttttcttttctcctttttgtttgtattttctctgttttacataacaaacaagtactgcttttgtaaaagaagaaaaccataaaagttaaaacaaaaggactagtttataaaatcataggactttaataaaatttggggtttattgtcaagccagtttctaatttcttctgttgaggaaactgaagcacagaaaaactaatcttcttaaatcttctaatttctcacttttgcctatcagaataataaccatcactaaaggcactgctcacatatacaagctttggcatttctaawacagcatatgttatgtctcatcaattttaaagtttttccagtatagtcataatacttaggagggggaagaagagaagagaggagctgtgagaaagataatagcttttatgtactatttggcaagcacttaactgtgtattttgtgttattttaattaatccttacattaccttcatggtataaatataattcmcattttgtagaataaagaagatcaaacagatacaattttacaaatcttccctgtcgcaacctatagaactcgtatttttacacagttctttgtgtaagttgacctacagtagwtactcagtaaatattcatttaataaytgaactaatttagaaagcatttggtatgcatggaccagatttttagtgtttatcagtggactgccaattcttcactaaattcacaactgaaaaccaactttgaccacaagtagtgtttcaagttcagatcctctaataaacaaaattgttttctgtcatggaaaaaatcaacaccatttcttccacttggcttccttgttctcttcgttattgtgcttcaaaatgttgaaaatggttttctaaaattgtattcattttgtttgaagccttatcacttctttttcaataccaccttttctaccatgtaccaacctttgacctgctagcttaaaatgtacagctaagtaacgatagcttacttatttagtactttcacaaaaactatcatattggaaacaggtaggacatatattattactcttatttaaggatgaggaggctaagtctccaagttcagtgattttcttagagttatacagccagatgaaaacacagagctaggcttcaagaagagttccccaactccagctcttgtgttctttcttctatgtcatatgactcaataatgcaaagccattctctttgtcatattgttaatggctcgctataaactaccttacaacttgagtttctactccattcttactggacttttttcaatcctttaattttttagtttttgttccagtcaaagtttttagttgcatgaaacagaaactaactctgcctgatttaagtaggaaaagaatttgctgagaggctattgagtagctcacaaaatcatggagcagcaggctcagaaacaggtgagaataagcaagaaggrcatcagctaagacagctgccaaaaccatgctatagaacacagggcacttgctgggcaatggattcctttgctggtacatctggctttgctgaccctgaaaactgaatattgttataccaactgccactgcccatttctaggatggtttctgattatccctgcttctttgtgtcactatctcctgtttcgaagtcatgaatgagtatgtcagattggcagaatatttatcatatggtcatactctaactttagaaaaagccgagaaacaaagtttaagtatctaaaccattgtcattggaggtaagctctgtctcccatcaagactcattaagcccacacttcacctatcacaacatgaatgtttaaattattgaaagcctcccaccagaaccaaaaaaatgaccaaattccagcactgtttccaatttagttttatatgttctttctctggtctttctttgggaatacatttaatttacaactatgactcaattgtcactcaaccaatagttacctttattttgcagcattctgaaggttcaaaacgcaatgtgtaagttttattcayctgctaagaattattttttcaaagcttgcctcaatatttattttaaatgagtgaacttcaaggcctgaaagaataaactgatactttatgaaatatttttgaagtataaagaatatattcaacatctttccatgtctccagattttaatatatgccttattttatttaaaaaattttcaaatgtttcttttatacacaatatgtttcttagtctgaataaccctttcctctgcagtatttttgagcagtggctccraaggcaccgtcttcttcaagaagtttatccggaagccaatgcacccattggacataaccgggaatcctacatggttccttttataccactgtacagaaacggtgatttctttatttcatccaaagatctgggctatgactatagctatctacaagattcaggtaaagtttactttctttccgaggaaatgctgaatctagtgttaccaatttatttagagataacacaaaactttatgcttcgacaatgttattcctgaaccctttaaatcctgaaagtaccttataatccttaatttattaccaattcattatcacaggagtcaaattctgaagatctttaaagtcatagtcatggcaaccatgggaagagcagtcgaatcagaagaagaaaaaaaaaaggttttgagamatgactctatcaactgactgtaatgtgacctggggaaatttgctctgcatccctgaatctcagtttattcacctgaaatcctgggaccagaacaccctaaagaattattgagaatgatacattaatgaacctagtacagtgtaacacagggtaaacatccagcagttttggaatcatttttggaagtttcttgctagggttaccaagaaaatttgtagaaatcttgaacttaagtgtagttaataataatagctattataatgtttattgctctatgatgaagatagcaatataaaaccccaggattagaattagatttgggctctaaataatcttcctgcatagaaccatgtcagtatcttcttgacaaaatgaggaacagatagtagtgtttccttctacctgaaagtccactacatgcatattctttacatgtattattaataaaccatataggaggtaagttttattcttccaagataaaggtgaggacactgatacccagagaatttaagtgactttctcaaaatcaaacaccaataatgtggagaagcaagatttcaattccaggaggtcctcctcatctcaccacactgtaattcacctaacacatgagggttaattatcaaaaacagtgtggcttgtgggtaggaggtatttaacaagcattgatgtttcattgtattcattgataatgacacataaatacataaataaataaaataaacaaatgaatgaaactcaaccctctcactcttgtgctcgaattcagtgatacatgactgccatagtttcatacctgaagaagctccagtgtggaagtaagacaattgtgcaaggaagtaaaaaacatcaggctgtgttatgtgcagtaaaagagtcataaagaaaatcccacagcagtgctaaagagaaagccatgacttttgaaggattcaacctaaaaagagaaaacgaggccttgagaatgagtaagcaggtagcagatagaaaagggcaggggatatgctaggcaaagagaatagcaagaacagtagaggtggaaaatgtacagcatatttatgaaatgctgaattattctatttgagtaggatgaacagtggaaaaggacacaaagaaaataagttgacccagtttataacagttaacacatactaagtattttttattagccaggaactcttctcaatgtgccctatgcattacttccttaaatcttcataattactctatgaagtaggtatcattrtttctttttctttttcatagatgaggaaacagagtcataaagagtataaattgattttcccaggccacttacctagtatatggtatagtacatacacaatttagggttaacaggagagtctataggttatcaaccttgttctgccctttgagggatgattaattgaaaagatatgggtttaattgaacttttctgctttatcggaagactgtagacaatggacaaaatgctaacacagctgacaaagaagatcagtttttggaaaatcttaagatcactaggaacagagaaatttgcaaagggtggaggtgtggtaagaggaggggcttcctgtaagtctcaagtaacatgtcttctctttcttctatgaaaaccacagtacataaaaaagggagcttattggtaactatttttcaaagatgttccatttaggattctatgatttagtatctgtttccatttccaaaacatgctagactttcatgggttcatgcttttaaatatgctattgtttctgcctgaattctgactctacttctccatttgtcaaactctcagatataaaaatcattttatacttatagtgatgtttactcacgcctttctcatagttacatagcatttctttctatgtatgaatctgtcctgggttttattcttccccaaacccccaagatcagaatttatcttgcaagcttctccattctaagcatcacattgtatctggtatggactgaaatcaataaatcaatttgagtgcaagtgatatttatcatgaagtgtcatttctcttaactaatataaatgaagttttctagaaaaatgccacacctcttaatactcaggtcacttttggatatatattttaaaacactataagtattctatcatgccaggtgtttttttttttatgtgtctgtactgagtcgtttattctttacacacacatttattcaataagtactttgaataagacattgccttagatactatggatacaatggtaaacaacatagtctctatcttcacaaagtttataatggaagagaaagatcttaactgcttgcttaaaaactcatttatgtagagatatgtctaaatccaggggtcaatgaagtgatatttcagatgacatcaatatgacaggtagaattaactagttgaaaaagaggacatggttatgaatttgggccatattgttagaataatgctagccactgataaattttaagcaggttataatcaaatttgaattttcaaaagattattgcagcttcagtatgcagaaaaattttagtagttggaaagcacatgcagaaaggcagtgaaaatgctattataagagtctgaggaagaggtaaaggcagtttaagttgcagtggtggtggcaggaagggagatagaaagcatcattaatttgatattattttgaaggcaaaatttacagaacttggaaaattatttatataccagatgaaggagattaggaatggctttatgctttctggcctgtgaaactgatgaatggtagtataattcactcatataataacaagaggagcaaagaaagacatggaggaaagcttatggttttgttatacagtgaaatgaagttatatgggacggcaaggtaaatttctcttgggaagttggatacacaggcctgaaactcaaaaacagtgtctggccatcagatccgaatgtgagagacatcagcatataaattattgactcggctaatttttaaaacccatggaagggtgatttttattctgttttacaggtaagtaaattgagactcaggaagataaagtgattaattttaaactacaaagctagtaagtgtcaaatattgaatccaaaacttcatcactccatcactgcacagagaagagagctccctttaacccctatattgtcttctacacatatgctccacctctttgttccttccctagtgtccaaatggatactttttactacaaaggcaacaaaatttcctggatgagccaggggagaagaggctcaatgagtcatattagaggcttgaaggtatttatttccaattaaatttaaagaaacaatttatttgaaatgctttagagtaattttcacacagctttgaatttacaaagttaattttagagaagtttgactttaaaataagcaacagcagatacttaggaagctgaggcaggaggttctcttaagcccaggagtgtgaggccagtttgggcaacacagcaagactcatctctaaaaacaaagcaaaacaaaacagctaaactaagtaacaccaattgcctattttctattttatgaatttttccatattgttgcttctgttgtactttcaaggagtttaaaatttatctctattcatagctgaattttaagcttactaaaaatttatttaaaatttcttgatataattttgttcaaggggattattattcatcaaccaggtactcatgtttataattaattaagtggtttctgtaaaaaggcagctgatgtctgccatttatcaaactttttctcttataattgaatttagtgattctttagaaaattgagtagcaggtgattttctcatatgtataactaatttacaaggggaggccaaaaatctttggcaaagaaggattgtgtcctcaatgttgttgataaatgtaatcttactttctacatagcagaaaaactctgttgagagcttccttcttcccatacgttacaaaagacctggaaatttggtttcaaaaatgagaaggggaaacactgttcagagtaactgcagtgtcccattctgccaatggaatttgatgacacttctatcattcatgaatttgttcaatagctctgtttggctgtgtatacctgtgtgcatgctgttcctttctgcctaggatggattgccatcaacattatatgctcagagtctaattcattcttttactcagtgggacagtcttctggggtgccttccctaacttcacagagatgtaggaagtcttttctccatgatccctttgtatcttcatcagaacaacattactctcgaaatgagttgtttacctgccaggtgctgagggtgaaaaggtaaatgagacagagtgccccccaactccctgccgacaggtagtgtatctcaatgaatatgtggtattttaataaatgaattgaagaaagataaaacaagtaagacataatacttgctcttgagagtttgtgacaagcttgaaaaataagacatatataaatagatataattataataaatggacatttgtgccaaatatcacaaggcagcaaagaaactagtttgagaatccagaagagaatggagctgaggagtcagcagctgaagcaagtttggaaagaaaaactcatattgtaagctgatttagttgaaatattgatgaaactatcattctatcatgataagaatcaacagcagttgtaaattgttttctatatggtagacattgtaccaagggctatacatacattgtctagtttaatcactccaggcagactcctaattcattagagtaatggccactaactacttcatgtgtttgttttgtgaataaatgggcatgttaatgcgctttggaaatgatagagcataaaacaaaaatctacataattattctgaaaagaatggatgacaagaaaaataggacttcacatagggaaagatgaccaaaaaattacgacattggaacagaagaaaaaggtgcactattggggctcaaacacagatggcttagaaagaaagtctgaattttaagaatgttgagaaataaaaatgtctcaaggacagtcccttggtgacagtaaaaattgagaccacttggaatgaattgaagtggagcaatagtaagagaagctggagaacaggaccgacatagaaatagtatttagaagctgtgaaagcacttcagctgagcctttaacaaaaaagaaaatatttattatgtagcctctatgtatcctgcctttttttggacattttaaatgtactatgtattgaagccactaacagcaatttaagctaagtattatagtcccattttcaaaataattttaatatatattaaaaacagtaattttcaaggtctagggtttaccctggattatatagtccatgatggctcgccaacaacctgtctgtattctagctagtcagaaaggaaaaggtaaatggtcaaagatatacttttttctttttaagggaacttcccccaaagttatacatacatttttgctctagacttgagtcacataggcatgacttgctgcgaggtaagcccaggatgcactctcttctttatgctatgtcaaaaagtaaatttatagtatcttctgtgtatgttctacatacatatcttctatatacattatagagagcatcttctataaaggaattgttttgttagaaagaagccatttgctcttactgaacagatactcagtacagacttcctcatttactcaaatcttatagtctcmtaaatagattctatagttatagttacataaaatttaaacatctctccttaactgttacatgccttaaatatgtagttgattgtgtgaatgagatttgtttttcattaaaacaaatcttcccatttccacagctgccattcagggacattccttcaacatatcttctgggtccaataacacattcagtcattcagtaaacatgttcattctctcatatgtgtttcagacactgtaccagattctagaattaratcaatgatgwaagcayactattggccttcaaggagccattttaatagaaacaataggttaattgttgatgtacagggaagtttaatttatgtaatmcttatctagcagtattttatttttttactawgcattatctgattatggatttcctaaatatatagttatatcatctattaattgcatcaggtacttttagtagcatgctttctaattgtatcagtaaaaagacttttttttttattttggaaaattaatagaataaaccaaaaataaaaatcacctgtaatcttattgttagattgatcrcttgtgctgttttagtctccattgtactttttcttatacttttttccacatacacataagtttttaagcatatctcttaattaattttgctttatcaaatattatatgcatgttattttacaagccaaagaatgctgcaagtcttataacaaaaggtttatgcccctatatcagctactgtaacccttttagctatttattctgctatattgccctgtatttctaaatgatagggaaatattactctctgttaattcatcaagtttatctttggagttcctcatatttaaataatgattttaactctcttacagcttccctgttctttcattcatcttctcagtatagtattatcatatttgggggcaaatccacatctaggaattttattgtttttactactacaatattatttacagttcaaccaaatagcatgctatgattacatttgttttcctacattacttttctattggaattaagactcttttttttttttttcattttaaagcacccatcactgtttataccaaattttaaaaggaactgtaactactacctcataacatagtgmaatatgagtaatttataaattttttccctgggtgacatccttttgtgtacgtctccccttctcattccacagctgccattcagggacattccttcaccatatcttctgagtccaataacacattcagtcattcagtaaacatgttcattctctcatatgtgtttcagacactataccagattctagaattatatcaatgatgacaatatactattggccttcaatgagccattttaatagaaaaaaaattcatgtaatagataactggaatataatgtgatgggtacgataatagaggaaatgctaagccagtaacatattggatgctgtctctccccaatgccatgttcttatgtggtttgaaggaatataaataatcaggaggctaaagacttttccttgttcagaattattgttaaaatatatgtggtcaaaatctgttgttgctttttaaagcaatgtaaaatgattgaccactattcacctttatttacaataaaggaatcaacatacaattggataacattctgattactaccaagttattgtttttcctggtttctgctgaaccagcaaatcaaatattgaaaggactgagtctacatgtaaggaattagttaaggtaaagaaaaaatatgcaagtcaatacattacaaaagttgttcatctatttatggcagcagattctaaactgccaaatctccaaccatctgattgggttcctaaagccaagtcttcgacatcccatgaatcattaccttttagtcagtatagcacagggatttcaactttttgtaaaggaatggcctggtagaggaatctttaaatgtccattaaattaagtcttgtttagataattaaaacagagcgggatctgtctagttccctcatctggttggggaggttgttggtagtaataaaattattccttttaggaattttgcaaacaaactgttcatttatatgactaaaggtgtagatagggattcttatatggctactattaaatgattcatttaaattgtccaactaattatagaatcatctgttttatttgaaatgtatggcttcaggaaaattttgaatttaatttgatgtgatttatttcttaggttgctcagaatgatggcatctcaaaaacatgggcttacccgtgatttttgtttggtgaatgtttaaaaacaacacaaaaagccatttaagtacacattttaggcatacacacacacacacacaacccagaatggtccttaggctaaacgcaagttctgattgagtaatgactatggaaattttccccgacatttagaagtgctgttctctaatgcagaggaaataatacatcattttatgaatacatgcataaaataacaagatatcaaatgttcttttatgataaaggaagcaactacagaaagcttttatttgttcaaagtaaccagtggtattgatgaaaaaaaaaccacacacaccaaaaaaacccaactctcccaatactacttttaaaattaacatataaaaactgattttcattagaatgtagttattttcccacactagttaattaaaagccaagacccagattttatatatatatatacagatatatatatatatatatacagatatakatgatagatagatagatagatagatagatagatagatagatagatatcacaatgcaaacaattaagcttcatcatctggacaagaatgccaacttagtctctctttgtaaaaaaaattacaatttcaagacacttcatatttgcctcttttgccagcaccaagtcggcctgatgtgaatattcccatttcaggagaaacatccattctccactgctgcctgtggcaccaattattctttcaggatcaagatctctggtgaagcctcttggtttgtcggcagcatctcttgtcttctttgatttgctgtcattagattcattgtcagataaagactttctttctttttgtacttttttctttttttaccagctttttgagaattaaggaatgtttcaattaactctggacaatctaaattttctgagggttcccaagtactgtcaacatctgacgtctcttccacttcaggaaatgctccaccttcccttttgctataattggatccagtagtttttccacaaattcttcaggctctgcctcttcgacttttttacccttttcattctgtttttttccctccctttttaaaatatttatgtttattttttgcactgtagtttcatttaaggcttttggggtttttttgtttgttttgattgttgttgtttgattttggcagacctaaagggctattattcttacatatatcggctcccctaagccccgcccctccaggctttactttcagtgtcctgaggcctataaaggccaggcccctgccctccagcagggagtgcacctccgaggagaaacaaaggcccagagtgcgggcgctccagggtaccgcggcacagggcccgctcctatgccactgcggccgggtaaccaagagcgccccccacccctgaagccttaggacagagggacggcgcccatgcgccaaaatctgtttcaagatttaagactgtgacctctgtgaatacagagattgttcaaatgccctggggttcttgggaggcttctaagattactgagcatttgccaacattactattaatgtttgtcaaataattaaagactggattagtgaatggttaatgatataacagtgttctattgataattggaatagttacaacaaccttttacagaaaaagatggaaaaatcacagctaacatttaattgagtacacactatataccaggctctgaatcacttacggatgttatctataaaattcaaacgttccaacaaggggggtattattttcctatttttctggtgaagaaactgaggctttggagtattaggtataactttcccaagctcttacagctaataagtagtagagctggtcttcaaacccaggcgtctactccaaaggactgcgaaaggatgaagatgatggtgatcgtaacaatggtggtaacaataaaaacaatgggatgtctttttatttcagacccagactcttttcaagactacattaagtcctatttggaacaagcaagtcggatctggtcatggctccttggggcggccatggtaggggccgtcctcactgccctgctggcagggcttgtgagcttgctgtgtcgtcacaagagaaagcagcttcctgaagaaaagcagccactcctcatggagaaagaggattaccacagcttgtatcagagccatttataaaaggcttaggcaatagagtagggccaaaaagcctgacctcactctaactcaaagtaatgtccaggttcccagagaatatctgctgatatttttctgtaaagaccatttgcaaaattgtaacctaatacaaagtatagccttcttccaactcaggtagaacrcacctgtctttgtcttgctgttttcactcagcccttttaacattttcccctaagcccatatgtctaaggaaaggaygctatttggtaatgaggaactgttacttgtatgtgaattaaagtgctcttcttattttaaaaaattgaaataattttgatttttgccttctgattatttaaagatmtatatatgttttattggccccttctttattttaataaaacagtgagaaatctacattaactgactcctttaggcttcagaaacacatttttattttcttcagaaaggatgatattccccywtattttacatttctgctccaaaatacattatggacttcaaatagaaaasaacctttagctctttcctgtcatagctctgacgatattttttaaggtcactgagaacaagggcccagygtctaagtgcctgtctcaagatgtgtccattaaatattttaatgatgataactatattaacatcttttcaccttctaaaaagtatcttattagagaaagtttaaaatgcaatcaaacatttgaagtttgaacaattatctgaatattagcctttctgtagttctagtaaaataactcatttccattttccttgcctattaagatttcaaattagaatgttcagataatcctactacttaaattttggggccctattgatttccaaaaaaagtacaattgatattgcatttgtattatggctatgcatagcataaaagactaggaccagtaggaagaagttatagtgggcccattttagttcaataaggggaaacattgtttaatactccgagttacaaaatcaaaatggacacctttggacaataataagtggtaaccacaggaagtcttcacatactggattgggtggctaatttgatttggaatctatagagaaaatttaagcagtctgtctatattatatttatttaaattggctcagggttcttaccaactctccccactgtaaagcaaagctaaccatgctctattaaaagtacctattactcttccacattatttcaggggttttcaccattatttcttccagcctccaaccaaattaatttactttgtccaggtcttcccagtctcttcagtttccttatacctagttgtgcttgtctgcttaggattttcaaatagtatctcagtttgactacttttgtttccagtgtcatctttgaacaccatactttctctgtcccttggtggcatattaaaggcagacctactcaatccaggctcctagaaacctctctgggtctggcatctgagccctacatctctgggaaggtagttaagacacacaggtttttatgaggtacctttcagtcacaagattctataactactaaaaggtctgcagcatagcattctgatagtttataaatgcatttaaaaataaattggctgaaaaatttgagctcttggaaacatctttatctgtataaggctgacctaaaatcaagaccacataattttcaaatgattactttttatttcgtaccattttagatttcaaagagagacaaatatcatcctactttacacatgtcctaaccacacacatgtcctaaccacacattttggttaattttaaaatctacaataagtaaaaatttacagttatttctgaagttatcttattaatcatcagaaattcctaacggttactaaacttggtagcagagcagcagtcatcttctgactctcattagttgtcagacttaagctagcatgtctaatttctgatactgactgtaggaaaatctggcaagaagtggggagtagcacacatggacacagtggaagtctgtgggaggaaacgataaataccagggagtatatcctcaacttagtacacaaccagcaaaaaagatttcaagcagatcattaacaatggtgtctgaggattagagtcaattgtagatgggaattgaagctagttaaatgaagagcaagaaggaatgggaaaagaaatttgcacaatagtctgtagaagattctgaagaaggaataacggtgattgggggcacctttagtcacagatcacacgtgtgggcgggtctggcttacctaacaggggccaaggtgttgtggacactgcaaaacaactatgtgtgagtcacttatctaggaatgatttgaaggcaagattttagtccagggtggtatgtttaaatcattttggcaacacattttgaataaaagtccacctaagaaattgtcattgttactgagagggagccatataaagtcatttttttcctttgtcacaagcaattccctccatcactgcacctcaatctagaacatcattttgtttctctagagacttgagttgtctatttgtataaaagcagcatctatgatgaaaccatcatcactttaattccatggttttctcaatatggcatagaaattacatgactgatatttcaaactgacagttccattaaattataatcaacattatattctatggcttttttactgagacctttacaaattgcttcattttatgcttctgctctgattattttccattgctacattataagccacattctgttgaaaaaaaaaaagagaaataagcagctgctactctttctttaatctttctgtgttttgtaaaaaaaaaaaaaaaaaaaaaaaaaaaaaaaaaaaaaggatttttagtatccaacctttccaacaagtcaaatatataattctccatctgtaraaattacatytgcagttggcacaagtcatttcagccagtgtctccagcaggctaacaactggcattagtggcggatgtttttagctttttccttgttwgtgtaggctttgattttgtgggatttctttgtcatcataaaaagggcctaactggggccacctattgtgagtttgttttggaggacatgtcagtaaagcaaagttccactccccctctgattaratgccttctgaaagctgctgaaatgcaaatgtgaaaagagttttggttttctaataaactttttattgcttattttcaaaatcatttgccattttgtacaatgtaatgaaaattaaaattggctatggaaaccacttagacctcaagagctttcaaactattcagctatttaaaacaatatgggaagaatttaagtatttttttaaagaaargcttgccaaaattctatattgttcatgtttatcttattgttttatgagttcttttcttaatagcaatgtaagaaattattcttatgacttcatgttcatcttccaatttttatgtttcataatcatgattataaggcatattcttatgatttctagtttttcaattagaaataagtaacaaagatgttacaatttagtcagtagttgtgatattcaaataactgtgctaggcactttcatgtatgttaactcatttaataatcgacatgttaccaatatgagaataagtactattcatartgtcaaaggaggaaattggttgaaatggggtaaacaccttcccaagtttacatgtctgctcagtagtttaggtaatttatcttggatttgagtttagttattcctaggtgattcttattataaatttaattgttatattttactcaattatgttgaagtgtaataaccaactccttgctactaaacagttttgatttagcttttgtcatcattttgtttaatattgtaatacatatcttggttcatataccattttatttatcttaggttattttccaggagtaggttctctgggtcaaagcacatgaatacttttcataacttttctaatggactgccacagcgctcttgaaaagggttgtgtggacttaaaaatgcaaagaaaagagtctaaaataaaggacatcgaaagaataaatgagaaaattaaaaggtaaagaacttagaagaaagaagacatgctgcagttatctttgaggggaactgaagagccttatttaagttagagccttaacttcatgtgaatttaacatggcataggctgagatattaagtgcattaaaggtatgagaaaatttttaacatatgtggcatctcaagtcagattctatgaatttcattcctggttcaatctctcactagctgcataaccttgtgtgagttatcttacctctgtgtgccccagttttatcattgttaaaatgcatgaaataatagtactttcctcagcatgtcctgaagagtaaatctgaagcctttacagtagtgcataagtattcattattatttcacaagttctcatagagtatgttaactcaacatgttacctgttttaagaaggaaagataaaaatataaccacacattttgtttttcaataataattttgccaaaccatgaatagtaatgtacctatttaataaaatgatattatgataaatttactttgaagacagagaaacatttggggactagaaatattaatcatgcaagtacatagacttctagctcataaacaaaagttggctattaaagcatctatgatgtggtactgggcttgaacctaaagcacatccttggccaactgtctctagcaggataaactcctctgagctagagagtgttggttcacttttaatcattcactcattcattcaaggaacaagtctttatagaacacctactctgtcttggcactttgctagaggtacaaatgttaataagatttagtctctattcacagtgaaatcacagtactctgagaaacaagcctatgagcacatcattgcaaaattataaataccatcataaaggaatattccatgttttatagaagtaatataattaataytgcaggggtacaatatcatcaggggagctgtagaaggtttcaaagaaaagctaataattgaatggtattcccagaagttcaccaggtagatgaggtgatcgataatctgagcaaaatgataacatgagcaaaggtaagtgccgacaagctatggctaatgggctaaatcctgcctggcagttgtttttgtaaatgaagctttattgaaacacagccaaactcattcatttacattacatatcatctattgatgttttaatgctacaatggtagagctaagtagttgcaacagcaaccatatggcccaaagcctacagtatttactatcttgcctttgattgaaaaagtctgctgacccctggcataaaccaaatcagaaaaattcagattagatgaagatagatcaatgtagataaaaaatcatgaaaaagaacttcaccttaacaattgagaaaacaatagttgattagggttttcgttattctactgttttgccagtttattttaaagatataaagtgctttggtgcagatatgtagacatagatatagtaacagacatacatacacacacagacacactctgaattatatgaataaggtatgtgggattttaaatatttttttctgccagaaaatctacaaatttcctagatttttgttttattgatcttctttttattccctactgtatcagtcaattttcacgctgctgatatagacatacctgagagttggcaacttacaaaagaaagaggtttaattggactcacagctgcacgtggctgggaaggcctcacaatcttggaggaaagcaaggagaacaaatcacatcttacatagatggtggcaggaagagagggaattcgtgcagggaaactccaccttatgaagccatcagatctcatgagacttattcactaccacgagaacaggatgggaaagacctgctcccatgattcaattacctcccactggtccctcccacaacacgtggcaattcaaggtgagatttgggtggggacacagccaaaccatatcactcactgttgccattaagtgtccttcctatggaacacccatctctttgtaagctcaggaacccaaccattctgaaattcctgagtttttgcttcactaattttcctcattcttccctgtgtcttcaacccttcccatactgtagggtccttaatgcttcagcattcagatatgcttaacttaaaaaagaaaagtcactctccattaatagcacatgagctaaaataagttatgcacaggtgagagtttctttgaccaagaaaggccaaaataaaaaaaaagctgaatttccacttagcttttgccctatttctttctatagccaaacttcttataaggctgtttatatttgtggtctttactgctatgtcttttactgactacttaacacacttcaattcgttttctgttctgcctctctatggacattttccttaccatggtcaccaaaggtgtctatactgacaaattagatgacatttttggtactcatttaacttgattctctcttctacgtaaacactctttccttatggtttctgagcagtaactcacctgtaggtgttttcttcctgtctgctttttccttcttggcatttccaaaaggttcaactcttctatctctagatgttgaaggtttttyagtttgggttctctaaggcagatgtttgcatgcaggtggtttttagaaagtgtttgtaaaatttgttctcactcataagtaggagctaaataatgtgtacatatggacgcagagtttggaatgatggacaatgaggaatccacggggttgaggagtgggaggaggatggacaatggcaggtttcttggtgggtacaatgcacattgctccagtaatgaatgcactgaaggctctgacttcaccacaatgaactatgtcaatgtagcaaaaattgcacttctattccatgattataaataaataaaaattcaaataaaggaaataataaaagaagaaaaggaaaaatgcttgcagaactaatatctctaatggcgtaagagaagtacggagtgaaaggaagagaaaaagcaatgtagtagaggcttcagcccaccctatggggagctctgcagctaggagaaatatgaatatatatacaaacatataaacatacatataagcatatgtataaactttttataagaaatttgtctcacataattataggggttgactaaaccagtctgaattttgtagaacaaacaggaagggaagataagctgactgaaactagaacctcaaggacatgagctaatgcacaggtgaaagtttctttgacaaagaaaggtcaaaacccttttttaaagactttccaatggattaagctccacattgcagcttaaattatagatcccttgggttcacaattcattttagtcacccctaaactttcattgttgtttttcagcatcaatgtatcaatagcactcaaaaagagccacttcctttgaacttcccaaatccctaaattatgctttagttacaggtgcattcaattcttctataagcccattccagttaatactggtaaagtttttaacaattgcccactatgtcatgctaggagctatctgtattccaactactactagtgttggagttttcattgccaattaactggtggattatccagcagcaaaatcctatttcagagaatgcttcctaagactacttttggcaccagtagtcctcaggttccccagaagtctcaggtgatccaacagctatctgaagttgggatggtcttttagaactgccccacgtcaaagccaggagcttcagtatttgttttcccacattgtctagtcattgcatttgagctgccccaggcaagagactcaggccagagactcccttctgtgagcacacttcttgaagagggactcagctatgagcaatcagcagccaacactaacagtagctgggggaaatgaatgctttggtccttcaggaacaatctgttcagtacagcagagcatccactacatggggatgatcttattactgtcatcttgccattctacttcctgcttaagtattcttttctaaaattccagaattgttgatgactcccaagcttatatctctagtccaagcttcatcttagagcttctgattgatatatccaattgcttattttaaaatttacttaaatattttacaggaattaaaactgaacacatctaaaagtgaactcttactatcatcctaaatatcaattctcagtgaaatcatgtctcttgtagcaacatggatggaggttattattctaagtgaaataactcaggaatgaaccaaataccatatgctctcactaataaatgacagctaagccataygctatgcaaaggcatatagagtggtgtaatggacatttgagactcagaaggtgggaggatgggaacagggtgagggataaaaaagttacctgttgggtataatgtatactgtttgggtgaggggtacacttaaaacccagacttcaccattatacaatttatccatgtaaccaaaaactacttgtacccctaaaaattattgaaaaaaattactttctcttccaaacttccacaacttaataaatggcacctgtacccaggttatttctcacacaataaacttggaagtcttctgtgatatagtttcccacacatctaatctatttgcagtagtcctatttctgcctgcaatatgcaatgactttggcatgtctctacttcattctaacatgccctcactgtcacatcacagccatctctctatttcagttctagactaagtcataatcttctgttgttgaaactactgcaatagccacttaacttaattctaactcccccacttgccttcttctaatccacagagcaattaaagtgaccatttaaaaagatgcttataacacttcagaagcttaatatttctctccagttaaattccaaatcctcaacaaaaacctcctgttttagcccctgcctgcctttccagttttatttcatgctattctgcaacttactttcagtactttggcaagtaaattcaatgaatccgtttccactagataataaatttcatgaagataaattctgcattaattttgagaaattagattcccaatgtctggtccatagtaagaataggataaatattaaatggaagaatgaaagtgaaactcatcaaaaattaaatctaagcaaatagagaaaagtaaaaacagaataaacgtattttatgcttaaaaaacaataagatctagccctcacttcagtatgtcaaggacttccaaaaagtgaagattgctgatagctctgaaagaagtccaggttgcattaaactaggtartacttcaactaagaggaaatagagaacccaaactggtaaacatggtgacactgagaagtgggaactacttatagaaaaatcctcagtacaagttgaaggcatcttgatgtgataaatctttcagtgactctaaaagacaatgttctaagatggagatggtgaacatttccatcagagcttccatagcatgatagatcataaagaaaagttattaataataggcaatactggaataattcataaaaatagtttggttcaaaaaaattattttcagatatcaatggatgaaacatgagttgaaattagaacaccaggctaagatatgcggggctacagaagtagctagaaagaagttctggcccttaagatggtttcagcctaggaagaaatataaaaaatatttatactcccaagctataaaaatgtgatagatttggcttagggctatagaagaagagttatgaaagatgaaagattttatagacttaatacgtagggaggattttataatatgtgtcaagatctgggtattttacatatttgatctcattgcattatcactaaaattttgtgaatttattattattgtcacttgcaagataaagaaactgatatgctaagaggcttagtagcatgcccaaagtcatgctgccactatgaaattgagatccaaacctacagcttaactcaaagttcatagattttccaatatactgtgttggtagagattaccgccaggtgtgtgtgattgtttaatgtgtgtatatgtatctggtattagcatcaaggaaaaatcaaggaaataagtacatttaaactgatctttctggttattcaaatgactggtgtatcttaaatcaaggtttgaaggccaacaccaaaagtgtgttgagaattttaagtttgtgtcctttgataataatgtagcttttctagaaaagaaaccctgctctcctgcccrtcaaacaactacaggtcaccggggtgtgcaccttgtaaaacttcattaaggtwcatacttacttgatgcctaaaaatattttgagtgtagacacagacattaagtaaaaaagaagaccaggagctatagatattaaaatttttattaaaaacatttacaagtacacatggaaaaaacattttttattgctagtagtctaatgttagtagtcttgaatttaatgctgctctatattagaaaatgaattaactagctggtgttaaattatctmtaaaactaggatggtggccatggaaggagaaaaggacagatgtgagaaacctcaaaatgagaaaattaagaggacttagtgacataaataatagagaggaaaaatcaaaattcacattcaacttgaaaytgttttttccctaagttttcctttttgtctaactagactaataactagtcttttctctaactagactattacctaatttttaagtactaaaaagtaatgcgttgatcatatacttaattaactgtttccatttagtttttctttataatattttaaggaaaactattaagattctttttatggttctaagtacccctaacaatactcaatatttcctattaggcatggcttttaggtataacaacacaatgagaattacatttaatttaccagttactgagaacttattgaaaatcagaaattttgctagaactcaggggtgaaaagatgattaagactctaaaaccatgtactactttgaagaaaygcacacttactggaggtgacaggcaagctgataaatacctatgaaattataatgaaaatgtaatcacttctgaaaaatattttaaaaacacactttcrtaaataagttcataatatagaaaaaataacaaactatccatagctcactacattatttcttcaggttggcccaatttctttcataattattataatagatgcctttctatcttttctatgttagacataattcaatcactattactatataattgacatatacttgtcacatacacaccggacatgagtatattatttcaattttaatgaggaggacacttgaagaacagagaacttcccaaagtcacacaactagtaaaaaggagagaccaggacttttaatcatacattcctgattttacatcctcatccttcgtgctatccatactatttccttgactttcaaattcatctttgtctaattagtaaaattatcattattaatagcatttagaatttactttgtgaccctagacaccttacagcttattgactcatgtaaccctcattctacagataaaaaaactaaagctgataatcatttttaaaacatcatccaaggtaacagagctcacattggtgcaggcaggattttaactccagcagtatgactttacattttagagattttgtctcagaagaaattgtaaccaccacattatatggtcagttctggaattcaataggtccagaaagatataaatctataaagtcaatcaaaagaaatcatcagccatcatcttgacagaaacctaaaagctcctggacaagcaattgaagcagcatcactgtgtcatgtattgaccttaaaattgctgtctcaggtaaactgtttattctgaatttaaaaaaataaacactggaagaaaaactcatcactggtagtatataaaaccatcataaagaacagctgatgaggtatattctatttttcctaggaatataacttgttgtctaggttaaggttggaattatgagattcaatgaaatgagatagattggagaatgcagggaagattactaagagaagaaagaagactttggaaaagctaattctaccaacacagatgacatctaccacaatccactttggaaaaagatgggaggagatgggttgagtagaaaaatgagcagagaaaaaagcaaggaatattagcgytttggtgatattataatgttttaactctgacctgccaatcacctctgttttgtgttagggaactgacagaggaatatacaataaacaatatgcaaaggggagagaaggttctattaacagcgatgtcagtgactaactttagtttggggttctctgctaaagctaggttggtgcacaagacttaagcaatagtctcaagtgaaactttcaatggttagaaaaaaatgactccaaatctggggcacttaccacccttagtctatcaaattgtgaaaggaaggcaaagagagaaaagaagcacaacaaagatgacagcaacctcaatgacagtctagcatatgtatggcatagaagaaatggaagagagaatgagaatatgggataaggtcctgcatccacttttctcccagggacaaaagacaatgagagatgaaggtactaagaggcacgcaaattgtgtcaggggtgcccagtatcacctaggtttactaattctctaaggatactcaagatctcagtatagttttactcacagctatgatttactacaatgaaagaatacaaagcraaatcagcaaagggataaagtgtgtgrggtgaagtccagggraaatcaggcacaagcttccaagagtccttttcagtggagccrcacaggatacacttaattcctccagcaacaagttgtgacttgcatgaagtgttgtctataaaggaagttcttttagacactcagtgcccaaggtttttattggaggttcatcacataggcatcttgcctagcacatatcamarttccagagtcccagaaaaaaagcaggtgttcagtataaaccttattgtttgcacgaaagttttgtaacattcagtcattgttatcatttagggtaatgagaattgtcctgaaatttcaagttcccaaatgccagccaagagacaagcttgcaagcacacttttctaaaaaggatatcagtctcaggcctggtgtattaactttttttctgcacacagatatatgtgtaatcctttacacacaagaatcatagctattaataaatgtgaccaataaaaatttcacaccctgtccaaattattgttctctattccctattcttgaaggcagaagaaagaaagggacgagaggaaaggccgaccaatcaaaatagaaaagcatctctgtctcctacagaaatgccgaagttggttcaaaaccagtaagtgaagaataaaaaataagatataaaaagttgcagaatcttccttcccagttaccacacctagaaaaaatagatactgtcaagcctcattatatgtagattccatatttgcaaatcacctgcttgctaaaaatttttgggacccccaaaattaatacctgctgcactttcatggttatttgcagccatgagcagagcagccaaacatttgtctctccaggctgacattcccagctgagccccaagtgtagtgaagttttgtttagtgttcctagggacgtcccattaaagtcttttttcagaataaaacaaaaagtctatcttcttgtcttgtggattatatatattagataaactttgtccagggatgagttcaatgttaattaatcaacaatatatattaaataaggtgtctttaaaaagaatcacacatatacaaggttatatattaaaaggttgacggaaatttgatcataggttcacgggagcctatctgagagtaatggtttgctattcactaattcagtctgtgtggcaaatttatagaacaaaactaccataaataaygagaattgactccacttcaaacatcacttcatacacaaagaacctctatctaccataaagtcaccgggttctgcagcacattgtgcacgttagggagctatagcaaccatgggcacagaaggggctgtgactgggcagggccagtgcctcaatgactcctctgagccctggggcagagaaaaactcagaatcaaggataataggctaattcaagcgctgaattggaaacagacaaactcagagcttggattaatccaaaaacccaaacaaataggcttttgccaattgtggcagcgaactttgggtcttaaagtctgtagctgggttattaaccaacagggaaaaacaaggttcaaggttaaagttaggttccaggaaataggtaaggaaaagagtttatattagaaaacaaaacaaaagatgtagtcatagtacaacttcaaggtatagctgtggctctcagggctctgtctgtctgttagccctaatttgaagcactcttcctgttactggtaggtaagggttaaagggaaggggtaactgccccaaaagacaaggcttaacaatgcccacatggtcataatatatattactagatattttgtttcaatctgctttggaaaacaggtataaggtaactatgccctcaatatttcccaagtgtcccattagatatttaaaataaataactaaacaaaccacttcctatgatcactgtaagagaaaaccaaggcacagaggctgctatttaaaaatcttgaaatctgagtttatttaccagtcaaaacctccattaaagtcttttatcaaaataaaacacaaatttaatttcagaaatcaccttgtcaaaatgcatgtgcatttggaatctgtcataattagcagttactctaagtgtattttttcacacaatatttgggtctatatctgaaatgcaaagccaattctggcatgtatgcttacatttcccagttgattacacatttatcagcaagctgcaaacttggcctctgcaacacaagccacttgtaaagatttctcagagattttcttgcctaatagaaagtctgatgagaaacttttactgtcacatattttcatatttttcagccctagcaaacacattcctgacacgtgaatcaatacaaataagggaagacatttcagagaaactgttagtcttcagaattgagatttgcatcaatgcctctctgatttgtgcatccttcaaatattttttccccaattatcttttgtgttactctctcgctggctgctgctgatgagtaattttacaacactggtgctattaaagcatgcactcatgaccccattgtgacacaaagcaaatagtgcacatagcgaatgcaagcacataactgctaatcttgccttttaaatgcatttgaacttgacctattgaaataaccattacagaatgtatgacagcttggcaaaatagaaggggcaagacaccatctcaggaaagcagactctttgaaaataaatcacgaaagactgcaatgtggtaggaattgattgagaaaaatgcagtaccacagtgaagtaacctgcttaaaccctacaaaacaagtcactacttctaaaagctctgtaagttagagctcagtggcatctgatttaatccataaatgactctaaaagaaaacaatggctaataatttaatgtaaagagcatatatttaaaaacatcaataatataatgtcttgtattctgaagcaaatatattttcttttttcttttcttctttctttttttttttttttttcccagatggagtttcagtcttgtcgcccaggccagagtgcaatggcacaatctcagctcactgcaacctccacctgcctggttcaagtgattctcctgtctcagcctcccgagtagctaggattacaagtgtgaaccaccatgcccggctaattttgtacttttagtagagatggggtttcaccatgttagccaggctggtcttgaatgyctgacttcaggtgatccacccacttcggcctcccaaagtgctgagattacaggtgtgagccaccatgcccaaccagcaaatatatgttcatgctgctgatgcaggaaagcatttcaacttggtatagcctaggcatatcttaggacctttaaaggtgcccacagtcatatatactgaagcatttttactcatcctatccactataaaattatcaatcctactgagagtcaaagtcaacatagaaacacaagctataatgattctcagagagcatttttagaaaaaagactgatatgcattttactgacaggaaaagtagttttcagatggtatcagaacactggtctctaggacagggcttatggcaaatggctcatatcccacyttggtaaatgttaggcacacttgacagtaactctactattattctttattttatgtcatttgaagattccaaaaaagggagattatgatgtgctggataaaataaacaaaaatctgtaagcaggagtttttacatgtgtgtaaatatgtactgtatactcaatgtttaggtaagattgactcctcaatggtcaaacataaaagctcaacatttaaacttcataatgaacatactatgttttattaattttctgtgcaaatatatatatttttaatattttaaaattatataaatatttaatgttcctatcttactgggcacaattatgagatttaaaaataataagaaaaaacaaaccaaaaataaaaccaaaatcccaaaccccgcatgttaaatttaaatatcagaatcctatcattcccaattacatatcctgctgtaaggaaaattacagaagcattgagtggcttggaaattagaacactttcgaagtgtttcaaaggagtagttcttaaatactacttttttattatcttcacatgtaagactgatccttctttaggatgaaaacaacactatgctcttctcaaaatcctagagaaaattcttgattattattgccaaaagtgcataattcccaatgaaaagagattttaagtatgtttgaacaaattttatttgtttcaattgtaagcactgtgtcatgttctaaagcaataaaggttttcctacatactatgactttatacatgctatgactttatagcaataaaattatatataaatatatgcatattttcgattatttacgaatattgaatttcatttagtgctttctcttcagcactgtataatgccacactttcatttaactagataacaaggatcaaatgccaaacctggattgctgagcatctcacacttggatgggaggactacactttctctaactgcaaacccgaaattgttgaatgctatgaaagctggagggtgttactaagcattattctagaatttcattttcactcgagtttttttttataatccaccataaaaatacacacatgcacacacacattatttaaatataaaaatatacaagataacatgagatttgatgaaaacccataatgtaaaatatctccagtaagagtaaacagctatacatttactttattcccatctaaaaaaaaaaaaagcagataaaacgtcttgcattttttgtaaatggaaggatttctagtgataagacataggtcttgaatttaattcagtagaacctctcataaacacctaaattttcctccattaaatcttaaataagtgggataacttatgctaccctctgcaattcctaacttaattttcataagtcaatacaattatctctagccatattgggccygaccaaaactagctaagaggaattcagaaagcatatactagatttaacaaaagactttctttgtggggagcagaacaaagacagacagtggtgctggtttgctgtgtgtgtttctctactcgcccagaaaataaaattaaataatcaatctttcaggcacaatggactgcaactcataaaagcctgagttttactttcttacaacagtgtttgatttttactctgtcatcaaaagtctactaagggagatttgcctaggaaatctctctcttcaccacacttctcctccctcttccacatttttgccacactacaaccctggtagatattattcccatttttatgtgagtggtctaatatatttcagggatgaaggctccaaattttctgatttctctctcagaagcctatttactccataaccattgaatgtggctgaatagaatggtaacactggcactctctcagggtagaacagcatgtcatccaattgtatgcttaatttttaaagtgatttctacttttcccacctctaatttaatttttttattatttatttatttatttatttttgagaccgagtcttgctcctgtcccccaggctggagtgcaatggccaagcttggctcaccgcaacctccgcttcccaggttcaagtgattctcttgcctcagcctcccgagtagctgggattacgggtgcctgcccccatgccaagctaatttttgtatttttggtagagatggggtttcaccatgttggccaggctgatctcgaactcctgacctcagatgatctgcccgcctcagcctcccaaagtgctgggattacaggcgtgagccacagtgcccggccttaaaacaaattttaatgaaaagagaaaaaaaaaagataatcttctgytaacgccttttggtaagcagataattgtcatatttaaataaaggtgtaattgcacctggtgggcacccagttctgccattaaaaatgccacactgactgaagagattgtattttcctaaacctgttagtccctgggaacctaaagaataaactgtgcagcacatccaatcacagagtgtagggtatgtcccaggtcatgttctaacatacatgcggtaaggtattttacattcctttgaggttcagctgcagatagaaacctagaaaatttaacagctttgtctttagccaatgtgttggctgcagtaaatttttaagcaagtaagcaaagctcccatcttatgcactgtggatatttctcaccactaaaatgaattacatagtcatactaaattgatactaggttcaagcgaatatgctgttataagtaaatatatatacttttatgttacaacagagacaatgtgtgtatctcaatgtctacaattgttaagaaggttttcattccctgggtgaaaggataacggttgtgaaatatgaccttgcaatgacagaattttaatgcattgtgtatgtgactaaagcaatgcatggcatcctggccttctttattgctatgtatattagagtattttgcagtgctggctctcatctaagtgtcggggtcttctctaggtcaaatagcagctcgtcaatgctttatttcttaaagaacctagatgtaattttaatctaagataaagtttcttgctaaaattctaatgtcagtgaaaatgtgaaaagttccttaaaatctagccaaacatcacattctttcacattcttccaaaccagagaaatagccagtttactatgtatttaagcatcttttgagttataaaaggaaaaacattattatgtcctgatgtgttaaatgattttgctttccctgacaatttttattcctcctatgagacatttcttgcccttcctagttccaaaatgtgaattttaacactttgcatcaggttgttggtctccgttctaaagcaacattaaactttctgctaatttttataaaagatccacatggcctttttttctcttatcttataataaacccctctttcctaagtattagatgttttctgctttttctctttagaaaacytagtttagctagtctttgcaattctgtcctttgagaataaagaatataatagtatagaatagaataaagagtcttacagaatagaacaataaagttagcgcaatagagaggatatttagaagagaaataacagtgagttctcattgtcctgaggtggctgaagtaaatgccaatctcagtacatttgatttcatttatttcctgtctcactagtttacaaaatgctgactcttttctcctgggcaaaaagtgagttatggtcatgtgagtagtgaacaatagtcatttgttttgacaccagtttttcctgggtggttagaaagctggtgaagttatgattttcatctatcaacttgaatttaaaattatattattagcattttctagaaactacactattacagatttctccaatgcaaaactctggagaacacagtccctttaccacaattatcatacttaaaaacaggtatatgaaaatggtttttaataggcaaaacatactagactaacaaatttagaataagaagatagattcgtaagaagagtatagttttctgaatcagaatctggaattaacactcagtatcatattttccacatggcactaaacagggtttaacagggagattcaaactcacagcgcaagatatttttattagatgaagatttcatggggaggtgaagagcctttcaatagaagagattaaaaaaattgaactccaggacgggcacagtggctgacgccagtaatcccagaactttaggaggccgagacgggcggatcacaaggtcgggagatggagaccatcctggctaacacggtgaaaccccatctctactaaaaaaaagtacaaaaaattagccgggcgtgctggtgggagcctgtagtcccagctactcgggaggctgaggcaggagaatggcgtggacctgggaggcggagcttacagtgagccgagatcatcgcgccactgcactccagcctgggcgacactgcgagactctgtctcaaaatacataaataaataaataaataaataaataaataaataaataaataaataaaaataactgaattccagtctcaggtctgctacaaactcaatagatgacttgtagcaattttaggccttagttttcccaatcgtaaaataagactactcctaccttcagtattttatattcaacaatataactgtatatggaaaaagtcatagctagcacaagaaaaggaaacttcttaaagtgaacagcaacttaaaaatgttccccttggtttgtttagaaaactcactttttgtctagtataaccatccttaagaaacaaacctttttttcttaaaatgtcttctcttttttataatgaatattcttcatcactagcattatctgttaatgacaacagtccaattgcctccagtgaatctctttaacaacggctcataatttaaatccatcacccgctgtgaatgctccaagtaaacactgatttgtgggtttataaatcacatggctgtgtagattaaattgattcagcctgttccttgtctacattgcttttatgctgttgttttaaatgcctatactaccacagtcacccaactggcattttaacgtcactgaatgaagaactatcaagcatttctcttttaacttgaaatttttaaaaaagcaaatgaagtcccaattgtatctatctatatgtatggatttatgtagtatatatgtacaagtgtgtgtgtatgaatcatagttttttagaattatttatatttaaaaattatagccttcccttgcataaatcagggtgatacagcaagattaaaaaccaatggaaagtcctattgaattctctgtttggaaacatataaagagaatgctcttgtccacaaaataaatgtcttggtataatcctatagaaattggtagtttgggccaggcgtggtggctcacacctgtaatcccagcactttgagaggccaaggtgggagaatcacttaagcccgggagtttgagaccagcctggtcaacattgtgaaacccctgtctctactaaaaatacaaaaattggtggcgtgtgcctgtagtcccagttacttggtaggctgagatgggaggatcacctcagttcaggaggtggaggttgcagtgaactgagatcacatcactgcatgccagtgtggctggaagaccctgtctcaggaaaaaaaaaaaaaaagacagaaaaagaaaagaggtgtatgagtagaaagacctatagcaatagccattttgtttagaggttcttaaacaggtgtgcttctttctggagtgtgtttgtaggttccccaaaattgtagggatgtgctgtatgtcatactaaacattttaatcagattctcaaaaggatacactatccaaaaattaataaaatgacacattttagtctatgtatgagaagtaatttgacttagtcacaccattagcctgcaacaacattgatagttccagaactcagattcctaaggcttctcatgctagtgtgcactcaaatgctaattcctttttttttttttttttttttttttttgagacagagtctcactctgttgccagggcagggttggagtgcagtggcacaatctcagctcactgcaacctcggccttgcctccccagttcaagtgattctcgtgcctcagcctcccgagtagctgggactataggcacccaccaccatgtctggctaatttttgtatttttagtagagatggggtttcaccatgttggccaggttggtcttcaactcctgacctcaagcgatctgcctgcctcggcctcccaaagtgctgggattacaggtgtgagccaccacggccggtgcaaatgctaattcctgacaagcagagtgtgtttcctaaacttgcatcatcttgtgaacaaatgttgctgctttattagttccaaagttatagtgagcttatagaaatttcaaggacaccatttcaattttaacatttattgctactaaaattagtgatgtaaggcttgtaatataagaatgatccccagagaaataatccctcaaaaataaaacaaagttctcttaaacatgcaagatgaagccctgcagaagcaaagatgacctatgtttgtcatttaacatttgaacacctactggaacttaaataagcaaggaggctcatctagaatggcagacaagctttgaaacatcatctttcttttgaaaaatcttctacctgttttaatgaaattaggtctgttaatataatcacataaacatatgagcagtatagagtcagtattgcacattaagcctggactaactcgaagtttcttttcactagttctttctgttaaatgttttcatgaaaattctttttaatctaaagactgttgtcaagacatactagttattaaatatgccttcagagctaaatctgcatgagcattccacatttcctgtcactttttggggttcatcttctttccacagaaaggagaatttcaaggaaaggaagaaatatctacaagtaaatatcattcagtatgggttagcatgcttgattgctattggtgaattatagcaaaaaaaggccttagcatctataatgttatgtttcatgtaacattttaacaatggcaaggtaagtcacactgctgatttcagcaatgtgttatatttgatagcaattgatagctgactactaaacaaaatcacttaactgtatgaatgttttaattctttttttttttttttttttttttttgagatggaatcttgctctgtcacccaggctggagcgcagtggtgcaatcttggctcactgcaacctctgcccaccgggtwcaagcgattctctgcctcagtctcccgagtagctgggattataggcgcccacgaccacacccgcctaatttttgtatttttagtagtgatggggtttcaccaacttggtcaggctggtcttgaacactgacctcgtgatccacccaccttggcctcctaaagtgccgggattacaggtgtgagccatgaatgccttaattcttaagatagtaatggggaatattgttctgagccaagaatatgatagccagggaacataagtttataagatcacacagtgtagttccaacagtaactttaaacccaatagttccctatggaaactcaggataccaaaaagtgcaactgtaatattctggattctaaacttaagtttgaataagaatatcatatttcctcttagttaaaaggtaaaatacaggttttactgttcatgaatgtgactagactttcaatatctccatcataaaccaatgtgtgacaaaggagataaatcttatattcagtccctactgacacacatgatgtcctttgttctcaaagtgcaaattaactaactatccttagaggctacagcctaagacaaaccctacctgggaaaaaaacaataataataacagagacaaaaatgctgaaaaaaggaaaaagttatcagtatatgtgtatatatataatatatccctttataatttatagtaggaatattttcattaccatgcaattgtgatagatttaaataaagatgaaaggaacctattaaatcattatgtctaatgcatgctaagggaaggcatatttccctagagagaggaataaaaagaaaaaatatataaaaatagatactataacaacgtttgaggaaggttcagttagcatatagtcttcagatatcaaatagaggtattagcataagtagtggagacgattagatattgacacaaagtacccgtataaatacagagtcttgtgctgtgttttcaaacatctaatatatttgcctggagtgcttgcaaattaaagctactctatttatacacaacatagaaaatggaattagagcttcaatgaatttttaattttgttcaatcttgcatttgttcaaccaaaaacaatttaaagaggaacacgacaatcagccttagactgagcaagttcagctcctcactagggggttcttgaatccaccataaaaatcaacagtgtgcatctaatagttttcttttaatttgagaactgaaaagtgaatcatcacatcaaatattcttcagggtctctttggtttccagattaaacatgtaatgtgaccggtcatcttgccagattctcacatttccattttaaataatcataaattagaaaaccttactattctttggcataacacmgctgtctgattccgctgagttccaaagtcttagaaattgcactcattccttctttagagtcctgcttcatggcaaaagttttcagctgaaagactctttattgtattcaaatctcgtcccatatgagttgttctggtttctcagtttatgaagagtcttrgatagtgaattgggtccacaacagaaaacaccaactgttttcctagaacaagagcggagaaaatggaaaatcaggtgcaaaattaggcagaacatgacaagaagtatgctttatgagcatggtttaaagtattaacaaagtygatttcttgctattttacatattgaaaacaattttctaattatttccaaatataaatgtcaaccaggaaaatattttatttacctcatacttttcattctagaatttaggataattcaaagaatgtacctatgagcacaaatatgcttattatcaggcagagatttatcagtttgccttagtcttttcatgacttgtcatcggtgaaaccagcaacctcattaagagcagtaattgatagatgtcaattgctaaacaggtgacctctgaatagatgttcagtccacactggacaatgtacattcttcttttattagacactttacacatagttatctaaaattcctacatggatttgcaaaagcagtgatgaataaggaaggaaagaaaaaagatattaccaatttgaaataataattttaagtggytaatttatattcacagtaaaacgaaaaacatattcatctagttcttttttatttatgcactgcaataatggtaacaaattccaagcagtttttattattctctaayataaaattttagtagttaaataatacgtatctctaacaaatagactaaataaatcccaggaaataaataatatttcaaattgaccttcttcccaagtttgatttgcatttgattcttcctaggatgtcaaaatgattaatatttcatctcatatcttgggaaaatccagtatgacttaattatctcagaataactcatgctgaacaaaagacattgaatccattaaaactggtaccaaaaattaatagtaaatactgaaaaaaaaagttattaaaactttttaccttgaaaaatgaaactaaaagctgtgaaaatataattttacttgcagccatgatggggtaatagggagtagatctaccctcttacattaaaaatctagaaaaaagcaaacaaaatagatgaagtaagtattttcggacactgaataataggtagcatggaactatgatccctgagaaaagggaagaaaacaagctaagcacagtcaccctctttgcttattgcctggaggcaatctactggctgcagcagacaggggaaactccagcaaagattggtgattacactgaggagacaaagaacggagttcattaaggaccaaacagctggaacttgtggagcagaatatggaagggaagggagatccacagaaagacgcctcggagattcgtagcggagaatcctcaagtctttgattaataatcagttcatatacgataagaaacttcatgaatgtgagtaaagagctatcagagatcaataggacaaataattgccagagtttacacaggactgcaaataatttgtattcacacacaccagaatagaaagtcctataaatacagggcaatgggttgtattctcagaaatgtaccaccttatttgcaaggagtagaggggatattggtaaaattagccttggactgaaggctgctctgaacttccactaacaaatcttaaaagtgagccttgtaaggatcaaactgaacccgagtaacttaactgcatgtcagaacaagtccaacactattaaataaatcaaaatttggcacctaatatttaaactttaaaatgtacagaaatcaacaaaaaagtaccaggaattcaaaaagcaagaaagtatgaactataactaagagtgttatgggctgaagtgtgcccctccaaaacccatatgttgaagtcctaaccctcagtgattcaggatgtgactgcatctggagataaggcttttaaggaggcaatttaagttaaaatgaaggtactagggtaggccctaatccagtctgaatggtgtacttacaagaagtaatktgaacacaaaaagagacaccagggaagtgcatgcacagagaaaaagccacctgaagaggcatcaagaacatagccatctgcaagtcaaggagagagatctcaggaaaccagtcctgcctgcattttgatcttaaacttccagcccccagaactatgaaaaaataaattgctgttgtttaatccaccagtctgtggtatattgctatggtagccctagcaaactaatacaagaagaaagagcattcaacagaaacaggctcagaatgatagagacgacagacgtggtcattgaaacagtgatgatacacaggcttcatatattcaaagaaaagcataatcatgatgagatgataaatggaatatttttaaggcccaaacataaattctagagatggaatgcaatatttgaaatgataaatatactagatgagktaataaaagaayaggcattgctgaagaaaaagtaaacttgaagaaaaagcattagaatctatccaaattgaagcccacagagaasaaaaactgaaaaaaaaaaaaaaaaagaagaagaacagagcataagtggcctgtgggacaataccaactagtcaaaaatacatgtaaccgcagtccaacatgagagaagaccaagggagaagaaaaaaaaaaaataaaagatctcattaaatctcaaggagaataaacacaaaggaaactatacctaggcaattgataataaaatactaaaaacgagtgacaaaaagaaaaacaaaaaaccaaacagactaggggaaaagacacattacaaatcatcaacagaaaatataagaatgaaatataagaatgaaagtgaactttttgtcataaactgtgtaagtcagaaggcaatgaagtgatatcttcaaagtactaaaatataaatcaagacatcaactattatatatcaagcaaattttatgccaaacaaaaatgatttttcagaaatgaagatggaataaaaactgtatacaaacaaaagctgaaagaattgtcagcaaaccagcactataaaggacactaaagaaaactactcaagaagtaggaatataaaattagatagaaatttgaatcaaccaaaggaaagaaggacaccaaaatagtaaaatctgtcagtaaatataaaatatttattttgtctaatttctaatatttttaatatatgttagatgtttaaaacaaaaaatactaataatgagaattataacatatgtatatgtaagatgaatgcaaaaatagcaaaagggatggaagaaatggaagtacatgaagtgttacaatattattcaaagtaccagcctggccaacagagtgagatcccattcctacaaaaaattttaaaagttagctaagcatggtggtatgcaactgtagttccagctactcaggagactgaggtgggaagagctcttgagcccaggaattcaaggttgcagtgagtctagatcatgtcactgcactctggcctgggcaacagagcaatactctgtctctaaaaaataaacataaacataaacataaaaaataaaataggctgtgataagctaatgatgtatactgtaaacttagaacaatgtttctttaattttggcttcatcagaatcattttagagacttcatagaacacaaatagttaggtctccccatccctagtttctgatttggcagatcttggatagggctcaagaatttgcttttctaacaagattccaattgatgctggtctaaggaatccagttcaggaaccaacaacctaaagcaattactaaraagaaaaaaaaaatacagaggcatgtctaactttagagaaaaaagtggaattataaaaaatactcaacccaaatcaaggtaaaaaaagaaaataaaacaaagaaagaasaaatagataagtacaaagcaatggtgaactgctagatttaaagccaactgtattttcattaaattaaatgtaaatgatttaaacaccgaaactaaaaagcttcaacataaagcaaacactgatggaactgtaaagacagataaattcataattatagttaattatttcaatactcttctctcagtaattaatacaagcagccagaaattcagtaagcctattgaaaacttgaacatcactatcaacctattggaactaattggcatttgtagaatgttctatctaacaataatggaatacaaattctttttaagtgcatatggaacattcaccaagattgaacatattctgggcaataaaacaggtgtcaatacattttaagggattagaatcacaaggagttcatttttagatcaaatcccaattgaactagaaattaagaacaaaaagatatctggaaaatttctgcrtttttggaaattaaacaacatttttaaataacccatgggtcaaagaaaaaacataaaaaataaaacatatttgaacgagatgaaaatgaaaacaaatcaaaatgtataagatttagcaaaagtggtgtttagaggaaaatgtayagcattaaacacttttattaagaaaaacagtctgaaatcaatgacctatgtttccattttaagaaactagtaaaaattaagaaaagctaattaaacccaaaatgagcaaaagaaataaaaatatatgaaaataaatgatgctatacttaataaaatttaaattactactgaaacataatgtagcttccattaaaatgaaaagagaattgagtcattttgtttctttgtataaactttctgtcaacaccatatgatggcaataagataccattattttcttgcttggctttgacagggcaattgtagagttagtttggcaagtttttcagatttcctaaaggcacttcttaaatacttgataataaaatcaagtattaattataaaataaataataataaaatcattatttttaaatcacacaggatattatgatttttgtgtttctttaacattttcttttgcaattattaactagcttaactctctgatatcctttttgtgtgtgtgcgatttgaggattccctaatgtcactctcactaacttaatgaaatcttacttttttttttctttttcgaattctacaaggaatctttgcaattcatttgtactaaatttgcattagaatgctgcaatccaacaattatctggagacctgtctacacgacctttgatggaatgagtggaggtacattcgggtactaagtagaaaatgtggtttggggtagacattagaaactagttctataaatgttcatacttgctttttcatgtagacttgtaaacgcagaatcttacrtaatgagaacttaatcactccggagagcttattcactcgttgtattacagatccaggagaactgagtcacttgactcagggtcacaggagtaaatgtgagagactaaacttagttattcttaatttgtattgtttgaaaacactacaaggcagtaaaataaagatataatctcaaagatttcacccaatcccagagtagtaattctctactcaaaaagccaaataaagttcaacttttctttctctctttgcatcatgcataaacttcacagctcaaaacaggatatacattttaattacaaacaataggaaaccaagttggggttagatataataaataattttctaatagtttattaaatactaaatggtttacaatgtaatatttagaatatctgtatttcaacaaaattagttattaattcttttagtgttacagttaacattctgctacagcattcttagtaaacatgggagtttcctggagcacctccctacctcccatctaaggggaacatgctaaaataagattgccactctttatctgtgacaagctgattatgacctgctgtaaagcacaatgaacttgcagtcaggacatttgtgttcatatctgcattctggctcattaaccatggcttttgataaatcattatattttgaggtcctagcttcttcatttgtaaaataaaaatgaaggcaggttgactcctaaagctccttcactttccatgatcatgtaataccatcatataattcagtttctgaatttaaaaaaagcaacaaagaaatgaatgactgtcacacacatgtggaaagtaaattaattctgacttttagtttttgtagagcagtacctaaatgtgcatacctgttgagccagcaattccaactcaaagatcttaatctactgcaatactctcacatgagaaagtatgtacaaagataattaccacagcactatttttaactataaagaaatataagtaatctaaatataaagaattagggtagtagcagtcatgttattcatactctagaatactttgaggtacaattacacagaaattgtccacgatcgaaagaagcacatcattaaaaagttagttggttcttcctagcaaagccaagaaaaaaataaaacaacaagaacaacaaagtaagctgaagaattacttggcatagattcaatttttgttaaaaaactaaggttttgattttaaatatatatcacacacacacatacaaacataygtttacatatactttcataagtacacacacacacactctcacacaaacttacaaaagcttctgtaagaatacataacgaagagttaccaatcattacctctgggccaggagtgtttaatgcaatttaaatttgtattctacatagtatactaacctaatgcctactggtaatcattttctgaatgcctactggtaaaaatatgtaatcattttctgaaagttaaaaartgttgcccaacacatgatattttaaaatcttaacttatatgcctgtcttccctactgttatctccatatgttttcagcaatttgtgtgcatgaggttaatcaaaatgctacattgtaaatgaaaccatccatttacacagtgcctttgtccagttaataagacctgaagaatgttgattcattcttttcctaagtatgctacataaaaatccttcagaaaatgtaaacacatttaaggcacctgcctgagaacaaatacacaaagtcaaagtgttgtacaaaatgtcaacagcagatggtgcacatttgctcttcttaaacaagttttccattttttccagaaaaagaacaaactactaaatatatacacacacacaaatggctctaaaacacaaacagcctaacaaatgagacttcttgagaactaacagtaggaaccaacagcctcaatctatttccctgtaaataatctgctctttagggatttggtttctgaattcagccaaagaacctatcagttttcagcaatatacaatgaaaatcaacaaaaaaattcttgtcagaagcagtaaatggcactaaagaggaacatgtctgcaatgcatagcaagagacagatgagtatgacaagattatcacatctaagatgggtgatactggagaaagatgggaaaggaagatagccaaaagtgggttgaaatcatttttttctaaatttcaactctgaatattacaaaaaagttctgctttgtaaatcatgcttacatcttcatccctaatactacaaaagtgttttaaacatgactgtaatctgaatcacatgggtaacattattccttcataaattttgcttcccaggctccattctgtaatttctaaaacaaaatctttgaaggtagagatagggatcatcttgaatcagtgatttcttcaataaattatattcatccatgatttcctaaattgcatttttaaaaaaaaatccatttaataagctggcctgtgcatttataatcaaatatccttttgatgtttataaaaatatatttttaaaattatgaagtgttcaactatataaagtaattgaaatgataactcaagccagaagtaaaaattaatactagagccttataattacagaaaattttaaaatgaaatatttaatttatgttcattctttttgctgaagtatgattaggattaggttagcaataaaaatatgattagttcaaatgtaaaaaattaattgaattttgataaaattatatgggttaatgggacagaaatacaacttaaatgaaagaaaaagaatgatgtaaaacatccaactgctaaaagaaaagtttatgtatttttgtaataaatgataatatcatctagctatatttatattccagtggatatgtttaaagaaattatgttaattacaaaatgtcaatatctgcgatatgttagaaatcacatcttttacaactatgtaaacttatgatgaaactatttagatgtaaacctaaaaatatgtgagtggttatatagttttcaaaatcttcttagaattcttatagatcagtgctctgcactatgataaatttacaaaagacaaatgggctggctggtctgtgccctaaaatgaaagctttccttctcagtaatttcttcagatcatagacacatagtccataagaacaagattctttataaaattatagtttctaaataatatttttggaaatattctaggtttaaagacggcatattacaatgcagagggtttttttaaaaaacaaataaacaaacaaaaaacatattcattatggtaaaaaaaggtacaaaaaatgtgatttttaaatgaattcattgttagaactaattgtaaagttctttgtttggaaacatgattttgaaaacttttcctaggatcacctgatatatgctgtgggagcgaatacccatttttaatataggcctatacaaatttataatcagataggagagtttagttcataaatacattatagactatttctaagccaaactttaattatttggaattacagaaatgtaggacgatacttgccttacttcttcctttgatagtgaaagagtgtttcagtgaatttgtcatttgtaaactcattgccaattcattttcaaacttcatgtaattatttgaaaatattttaattaatttattagccacatatcaaatttttgaggtatagtacttaccctctgttatattttgctatttcatcaaacaaaagtttccaccgaggacgtccaagaaacagtcttgaattcagtgcatgatatttttctccaattatcttctgccaaaaagaaagcactatattattcgagatttagttaagtaacctagttctctaacatcgtttctactggtgctgcggcttcccaccaaattgctgtgatataaagaatgtaagtatcaaatggcaacctattacgtagaattatttcaaaatatcgtttcctttctcctttcttttaaaatccattatctccttgaattccatgtgtttgtttttaaacaaacaaacaaaatctattctggtaaaaaggtacaaaaatttgatttttaaatgaattaattgttagaactaattgttagaactaatctccttgaatgccattctgacaaatggctaattttcttagatttcagttagtcgtttcatctttaaagaactgcaatgtaagacaaagaatgaattctaattggtcartctcaaaaaggctcagcacatggatttcaattgaagtattttggcaccacagatacagttgtcatatttggctcattatgtaagtaaaatactacaaattgtcatcgtaaatttggggaaatgatcctagacaagacagctcacaayagcagaactccaaaattgggtctatcaacaaatggctgtgaacgggcttctgtttgcaattaagagagcattagatctaaatcaatgtgaagagtcagagtgaactgcggagaaaggaggaagtatctgagtcccaggcaggcaaactgagaaccagatacaaattatgcttcataccttaattatcgcaataccaggaggaaaagtgatattgacttacttcatgagactgstaaaatgaaatactttttacayaccaagtagggtagaaatatgactgggaaaattagagttagattagttttgaggtaactgaaaacattcaaattttatattcaaagtattgtgaaaatgtatgacaaaaagtactaaaataaaatttgtgaatgcattcatgcctagatttatacaccagtccagctcttcaatgttgtcttcaaatattagtttcatcacttgcaaaatgggaataacattaactgcttaactctgttttaattacataaactaatatatgtgaaattattagcacagttcctaaaacagtaaataaataatgyatgatggctatcattattttttagttttctttgtctagaaataagcttaattgtatatgaactcatcttctcactccacataaaacgtgccctcaataaaaagaaatcacaaggctgttcatgtgtagtctgaatttcagaagaacttgaggcgatagtgaagaggggaggggcagaccttatgagtctgccccagctccctgtgaggacaaatggaaggcataatatggttgacttcaaggacaagctatgacttttctggacatattccaaaggaggctttcctctaggaaacttctgttcgaaccacctgaaggaattttcttccaccacagctcctacagtaaatctattatcaacaggcttgtttaatttacgataacatcaaccacatacctgtatcccatctgtttgactgaggtacagctggatgttgacatagtcaggtctgttctcttgccaaaactgagaggacagaaaaaggaatagacttattacaattctgtgggtatactcagattttctcctattctaacatgtgattctagaatttaacacaacctagcttatcatagtcaatatctataagaaaatgaatacacacacacacatacacacaaatatatataacagattctaatgttaataatctggcctcttggtatgaattaggtctgatgatggtagtggtagggaataattttctgttatctttatagatagaaaatttagcatgctaaatgctatacaaatattagtctttctgaaatactccttattttattccttaagagtctcaaaattgtaccagtttactcatcaagaacatgaatttcttgagaaaaaaagacaatagtgatttaatttatgcatgctagcaaatataaaacaacgcaaatagatactttttcctgttcctgccttccgcttattcagcaatgggctctggtttctcttgcacaaaaatgcacgaggcaaaaatatacctgcaaaaataaatagtctagaaaaaaatatggaacaacaaccccctcatttcccgctccccgaaggctttggcaacctgagaggattttactgtatctgaattgtttgaaatatttttagcaaggatgcatatgtagagaytattctacttcctgcctctgcaaattaaactactctagggacctcctataagtgacagcataatatatttgtgctttcgtgtctggcatatttcatttagcattatgtcttcaaagttcatccatgtactatgtgtcataatttccttcctttttaaggctgaatagttttgcattgtacgtatatatcataatttgtttatccattcaactattgatgaatatttgggttgtttccatcctttggctattgtgaataatgcttctattggcattggcatacaaatatctgtccaattgcctgcttttaattcttctaggtacatatccagaacgaatgttttcatttatttttatttatttattttgcataaagtctggaggacttacataatccacctcttcccagaaaagcacagataccacctctctaattgcctgtcctactattctttctcttgcttactctgcttcatccacacagatctcctttctcttctttcaggacaccaagcataccgctgcctcagagcccttgcctatgaagttaggtttctctatcttgattttttttctccaaaatatgtgtctagtctgctcattcacttcagtcaagtctgctcaaatggcattatagcattttgtttgatggttgttcctgaacgtgcaatataaagtaacacactctctactgtttaygctgctttactcctactttcccttccttctttgtcctaacccgaatctcagaacctgatgctcaatgtatttattggttgttgtctatcttgcccccttagaatgtaaaccacatgagatcagaaacttggttttattttgccacctgatgaggtttcagatcctagaatagtttcagattgatagttagcagttaataaatatacactgaatgatagaatgactgactgaatgagtgaatgcatgcacaaagaggtatatataatgatatccatttcagcattctttgtaataaaaaagtatctaacattagagaattgttcagtaagctagatatatctatacaatgaaatactctaaaagaatcaggtgggtctatcatctctaattgttggcaccgggaaaaacaatgaggcagttctatatgcactaataccaaaaaatagtcaagacatagtaatcaattaataaaggaatttgcataaacaatatagatagtatgatataatttatagaacacttaagagttacctctgtttacatagattaggtagggaaggtagtaagagaggattttactttatcagaattgtttgaaatatttgtagcaaggatgcatatgtgtatcacttgtataatgtgaataaagataaataggtcaaatgttacaggtaggataggaaaagattcctgctttatctctgcaaaaaataaaacacagaatttgggattgttgagatttgtatcgtataccaaaaagtctggtgatttgcagtattaaagatggcaatcaagggtaagtgctaacagaacaaaggatggaaggtgttacagcaggagccttctggtaattccctccattgtcttccctcatcacctttagccatatgcatacatttcaatgtgaaacaccctatgttaaaacatagaaatgaatgtttctatgttaaaatatatactcacaaatatccatatctgaaaagatgtgtgcctaattgctaacagatattatctctgattttttatgtttaagagacttatttctttccttgctacttatctgcataatttctatggtttattctatggcgagcatttattgctcttgtaatataaaagctataacatttttaatttgaaaaattgcaaaactagaaccaaccctaatgttaccttgttatgcaacatacagagtaagtctgcaaaccaatggaaggactggatatctctgcatgcccaaataaagtatagtcttctaagcttgtatggtttccagtcatccctttaaaattaaaataacatgatagtgattaggatggcaaacacaaatattaaagaattcatatatctttgaaagtttccttttcattagtaagcaaccaatagaaatatccaatagaaaccaatagaaaaatcagtcatttacattctagcatctgatagcacaagacctaaatgaatttaatatgcaatatactgactcaaggatatgacatacttcatgaatttaggtgtttaagtgttaaatgaatttaagtgtgaataatattgacaagtatgaatatcatccatttccagttgaaggccataactgaactggaccagaataatattgggctctgcatcacagaaaaaaacaagttttcaactttcagtgaattctatcacagactcagtagggctccaaaggtcattcagtcttgccctggatttttggcaaaatgagccaaaaccattccagaaacttggttgtttatcccctcttaaaaatcattaaagaaagagatttcacaatcatgtatgatgtaatgcattccagcaactcataattccaagtttggatccctatttataaagtaggtttgaggttaagaaaatgttcttcctttttcataacattaggtatccaaataacttgtaatgtgttgtcagaaacaaactatttctggcttggagcatgatcatttttgtaagaaccaccagaaagtaccaaatttacatctagtatttaaaactgaaataaaatatcattcaaccacatcacttaaatttattattgcttttttggttctgcaraaaaaaaagtaaatggaatagatatgagaataactttctactttttattttgctttgtgttttcataagaatatcaatcaattaacttttgcttacaatcctgaaactaaaataagttttagtttagtatttcctggtcagacaatttcacctttttttttttttttttttgcagagtcttgctctgtcacccaggctggagtgcagtggtgccgtctccccacactgcaacctccacctcccaggttcaagagattctcgtgcctcagcctctggagtagctgggattacaggcatgcacaaccacgcctggttgctttctgtattgttagtagagacagggtttcaccatgttggccagactgatcttgaactcctgccatcaagcgatccacctgcctcggcctcccaaagtgctgggattacaggtgtgagccaatgtgcccggccacaatttcacctttgaagttactttctttagtctgttgtaaatttgctaagtaacaaatgaaggaatgatgtgttcagttgtcatctcagaaaagcctgaccatatttcaacaataaacccaaccctttatttccatatccattaatgtctaccttttgtcaaaattctaatattttctgaaataattttatttatatttttcattgctttcttttttacctgccccatttgaacgcaagctttttaagggcagggtctctgttttcattcattgctgtcttcccaatacctgtaagacctattggcacatgggtgctcaaaaatatttgttgactgaatgaatgagtagaaccacttgccrctgatgaggacacagaaaatgaaggatggaggcgaatggcttttaacaaaggaaaaggacagaggagtgcataactgtgatatgacatctttctacaagagaatatgctaggagccacagaccacatgttgagaatcactgaattattcccctcatcaatcagtaaatggaggtccttgatcaacaagtagaataattcaataaggaattattttatactaaaaagagagatatcagaaatattggcagttctctatttggattaacaaaatagatcaaaatgacatacaacagggtgttgagtatttatgcaaatggagttactccaatgactccagccatgcagaggctgacctcatagttcagtgattcctcaaatggacttccaaaaggaccatcaatatacagcctgtagagcagtcagaaaaaggcgggaaaaaaatgaaaataagtgaaattaattttctgtaccatagagcaaacatgctgaatgcaatctctagattttgtgatgggtcaggccttatttcatggtttctcatagtgattagtttaaaggagtagcagatgttgtttatgaagggtcaagattaaaacaaatacatctgtttctaagtgtgccttttttgagggaaccattaattaaaagtatagggtaatgtaaatatgatcatgccaggtagctaaggactaagctctgatcatattagattactatatatgactaaattaaagtaagaattgctttactgtatctaaattcaataaacattttttcaatggctagatcagtacaggaaatacttatttaaacatttactatgtgaacagaaaaataatgaggagtaaggaaaagaatctaacaccgtccctcctcttgccctggttgttcataagtatagaactttacttacgaaccgatagttctttagctgtaaaggacaatcacaaaggaagctctgaagctctaactactctgctcatgtttatatattcaagtatgtgagtgtgagacagagagagagagagagagcatagagaaatccttcttaactgcaatggaaatgctaattgttcatataatattcatcctcccattctttcttagtaacagacaattaattttattcagggaagcataaagtccagccaaaatactacatttctcagactccctacatctgttttggttgtgtgactatattttggccactgccccctccttcctactggtctgctttctgagctacacacccmacacacacacacacacacacacaccccactccccacaaagctactctttggtgttttgaaataactttggacaggacgactagaactcagcgttctagtcatttactaaggctgggattccagacaagtaacttgtcctcctaaagtggatttctttcatctacaaaagggtcaataagatgggatgctacagaaaaaaagtgtgctaagaattgtagagggccacacaaatatcagaaatacattttgttaacggcatcaatgagtacctacagtatactgacaggccttctgtgaggcccagtattgatgcaagaaatgggctaagtccagtatgagctgggaaatgtaggtgggaatttggtttcaaggcccttagagaatcagttttcatttgaaatgkttttgtttttttttttgtaccaggagagagaaaattttgcttttcttggaaaaaataagaagataaaattattagtatttgattacttcatgacatctagttttttgagggagatggaaatggaaactacttaaaccacttttttttacatatttaatctgattaatgtgtgaaatacactgcctttcatttatgagcagtgactttctccctatcatacatagtacatgttctttaaaagaatgttatgttgctattgtcataatatatgtaaccagattgtagaaattaaaggcaactctttaaagtcttgctataacatagtagagatgaaatgaacttcatatatttttaaatttcagttgataactaatgaaaagatcctttatgaaggattgtgtatctaagataattctaaggataagagatatcttcttccctgacccactcaaaagtatataaacattttttgacatttaagtttctcctttgaaagtagaatttatttacattttaaaaaactgatttaaaccttttattaagcttaatgagtttcaagctacgtttctgttttatgtggctgagtgtgaatatacttgttaaagcttttaacatggtgcctgaacatagtaagaacctgataaatattagatatttaagaataatataataaatattatactattattaaaagtaaaggtttgtaatttacaacatttaatgttcatataagtgtaaattttygaaaaatatttgccttttaaaatcttctctgatcatgtgtcactttaaacagttcttttaattaataaaaaatttcaagggtctggtgcagtggctcacacctgtaatcccagcagttagggaggctgaggcaggaggattgcttagggccagaattttgggcccagcctgagcaacaaaatgagacccttgtcttaagtattagctgggcacggtggcacgtgcttgtaatcccaggtactagggaggctgaggcaggaggatggcttgagtccaggaggttgagactgcagtgagctatgatcacaccactgcactcctgcctgggtgacagagtaaaactcagtgtccaaaattttttttctttttcaagacatgcctgagactcttacctcagaaacctaaaataagctatattaacaatggatactcttcactgaacatttaatccaaggttggtactgaatgttctatgtataccttcactgttaatccacacaacaactttcataggaaagtataatgcctattttattgcattgggaactaaaactaaaaaaggttaaataattttcttaaggtcacacttatattaaggggggatgacttttactaaattcattctgagtctaactccaaagcttagtttgttaataatcagataataatctttacaattaccaattattttggtgaggggtattatataaaggtaaaaacaaaaaaagtttccaggacaattatcatctaacaattctctcttcatgtaggaaaaaagtgagtgtgataaactattcctcaggagaggatgttattgcagttttagaccattctagtctcaggagctaatcatatcaatagaaacaacaaacaaaaggagtgagtttagaaagctcacgatggttctcccttgatggctttcaaattttactgtgtatcaaaatttcctgcaggcttgttaaaacacagaatgctaggccctaccccgagacttgctgactcagaaatctgagcatttgtagttttcaccattcccccaggagctactgatgttgctgatagagcaggtaaggaggatcaggagtgagctagtgcaggtggtgattttacagagggtccccaacttaggatggttcaatttaattttttttaactttatgatggagtgaaagcaatatatattcaatagagactgtacttaaaattttgaattttgaccttttcctgcactagtagtatttggtacaatattctctcatgatgctgggcagctgccacagcttccagccagacacatgatcatgagcttaaacaaccaatactgtactctgcagtgtacagcagcattcaatacaggtaggtaatttttttcaatccctgcccctttccctcccacatcttgtattccccagtgtctattgtttccatcttcatgtctatgtgtacccaatgtttagttttctgtttttgcatgtaaacataaataaaaacaaataacctattttcatctcaatagatgcagaaaaagtttttgataaaatccaacatccctttatggtaaaaaccctcaataaactgsrcatataaggaatatacctcaaaataataagagccatctatgacaaacccacaaccaacacgatcctgaattggcaaaaggtggatgtgtttcccttgagaaccagaacaagacaaggacgtccactctcaccactcttattcaacatagcactggaagtcctagccagagcaatcaagtaggagaaagaaaggaaaggcatccaaataagaaatgaagtcatactatctctctttgctgatgatttgcttctatacctagaaaaacctactctgccaagagaactgataaatgacttcagtagtttcagtatacaaagtcagtgcacaaaaatcagcagcatttccatataccagtaatrttcaagctgagagccaaatcaagaactcaagcccacttacaataatttgtaattattatctaatgcaatctcatgttaaaaggaacactggaaaaataacaatttgatgtttatctcttggaattctgaatgattcagtcaaggccttacaaattaattaatttaaagtctgcaaggataaaagttctttggcaaggagtccccataaaataatcatgctaacaaaattatactccaataaccattatgaatggatacatttaatataagattttttaacaaaggaaggacttcaggctactttgtcgactgacaatctctgcccaaaaaaaaaaaaaaaaaaaaaaaaaacaaaaaaccccaaataaacaacaaaaatccctcaaacctaaaaactaaagagtctgaaaagatgtatggcagctgaatgcaggatggggtaacaaagaaagaaaatgtctctcaaaggcactagacggagaattacctgtgcttaatctatctccaraaagtggctacatccccaacttgttctgaaattttagccacctaacctccagctatagactcagcttggccctgtccttcaaccaattcttatctgagtcaggaatgagttgtgctctcagtcagcactaaggctcgtttattgcttgctcattagccttgcactaacacagcttcttgacttacatctctgagccaaaatctttacaatttaagcagtgcctcagttttacagtcctgatgacagggttttgccttgtgaatcccagcccaggggttgggatccactacccgctgatagaccagagttctttggacatcctacttgcctagttttgcaaacatcaatagcattaggcattcttataactacattccacactctagtcagaatactaccttttagatctcttgccatccaggtattcgaatttcacatactatataaaagaaagcctaaatttaaggattagaagatgaaagacagtaattctctaatgaaagacaatatgtatactgtggaaaatcttatgaattactgtgcttgtagaaactgtaccagaataaccactaccacaaataggcagacacacaagggaaagggctccttcctgactaatccaagcagagcatatcacccagagccacctctaccagataggacaatgcatcccttctgacaggatttagaatggattgaagatacaaaagcagcccacatggcagagcctttccccctgccctgaggcaagcaatggttttgagaaatggcataacagagctgacaatgagaatggtgatgaaaattcacttttgcaagaggccaggtgctttctatgcttttatttaaatatcgcaaagacttacaagaaagaattgtgtcatgcattgggcattcctcaaagcaacattagaaggaagatatctccattatcatcatttgtaatacagaacaaaaagtcaacataaagttgctcagatagccactctccctcaatcatgaggacttaaaccagaatgtgactcaagtgaaaaagcttgaagccacccaaagctccttccttctccctctctctcctcctctccttcttgcataatagtcatcacattctgttaattatgcctcctaacacccttagacatctatctgatcttccatattactattaccacagtacgaatccattatcatttcctgcctgaatatgaaattgccaactagcttgtgtgctggccccatgtagtacctcatgtacctctctactttcatgagaaatctataaaactgtaagtctgattatctttctccttggcttaaaatcctttcatgggtcttcattgtctttacaacaaagtccaaggtcatttaagtggcagtccaggccagatgcagtggctcatatctgtaatcccaatattttgggaggctgaggtgggatgatggcttgaggctaggagttcaagactagcctgtgcaacaaagaccaggcctgtgataacaatgtgataagacctatgtctctggccaggtgtggtggcttatgcctgtaatcccagcacttcgggaggtcaaggcaggcggatcaccagaatcaggagttcaagaygagcctggccaatatggtgaaaccttgtctctactaaaaatacaaaaagtagctgggcaaggtagcacacgcctgtaatcccagctacttgggaggctgaggcaggaaaatttcttgaatcggggaggcagaagttgcagtgagcagagatcgtaccattgcactccaacctgggtaacagagtaagactccatctcaaaaaaaaaaaaaaaaaaaaaaaaaactatgtatctaaaaaaaaaaattgtatatatatgtatgccaggcctggtggcacacacctgtggtcccagctacactggaggccaaggcatgaggttcgcttaagcccaagatgttgaggctgcagtgggctgtgcttgcaccactgcactacagcttgggtgacagagtgagaccttgcctcagaaaacaaaaggtattctaggccctgtccacatttctccttatacctcgactccaagtgtatgtgtgcttcacatgcatcacacatgtgctagcacacatacacagttttcagccacctgggagtaagccctcaatgacccaccacttctaagttaagtataatttgaggggccaaacacatctggattggagacccagctctgccatgtgactttgggtagggcatttacctctttgaatctcagtccccttatctgtaaaattagggaaacagtactacctaacttatagaggaatagtaagaattaaattaataatgcatataaagcacaattcctggcatgcgtagtgttcattatgtgttactattacaaacaaaaataacttgggccaggcacagtggctcacacctgtaatcccagcgttttgggagaccaagacaggtagatcaccaggtcaggagttcgagaccagcctggccactatggtgaaactttgtctctattaaaaatacaaaaattagcccggcgtggtggcacgcacctgtaaacccttctactcgggaggctgaggcagaagaattgcttgaacccgggaggcggagcttgcagtgagccgaaatcacaccactgcactctggcctaggtgacagagcgagactctgtctaaaaaataaaataaaatataataaaataacttggctcaggatcagatgacaagtacattacagacatgcagattgaacagaaattattaaagatagatgatgtcttgaagaagaactcaaaacttggctaggaaagagaaaggaggataagctggagaacagactgcggaaaggtcatctgaggctttgcagtttaagggtattaccccaaatcaccatttgaagtcatttttacgtagcccattagaaatgagattgaggtagaacattgcttttattgtccaaacaatgaaggttgttctttggcagcaaaccaagtcaaaaaagaacagctctaaaatttgtcataaatgatattcccctctctaaacagttctggtattaggaagctcagagaacttgatctttatgagaaccaagtagaaacagtttattcttgtattttcacaatatttttacatacgttgtggttaaaacttccagagccactgggtcatgttttgctggtttaattgccaaaatggttgcaagtaatttatggataaaattatatcagatgtacttaaacattttacatgtccaagctgtatttacaaggataaaaatatattataactactctctagtctacatatgttatgaacctaaatccttcagagtttattagcaataaaacttgtttctttatctccatttgtttcctccaacctataagtcaacaatatgcattttgtattagatacacattctttttttattcctttccactcatctatctctttctgacaattatcacacctattcgtgctctgagaattttcatggaacaatgtctacaattacatcctgaggagaatggatgccctggctttggcaatgagtcaaataagagctcacaaatgtaaaaattgattaatgaacattcttgtattttagaagagtgttcccaagcaccattgcaggtgatattttttaaatgcctttcctttaaacatacacatacatacacatatacatttcagaactagtcagttctcttcatgaatatttttcacctaaataaaggacatacatttccatatttcaatatttgttagacgtctcttggtaacagaaagttaaagattatagggacactatgttgactaaatagaaaccccagtccaaatccaaactactacagctcacactaaccagtgcacaatgagttcatgttagtaatattatgatctatgttggttatgcaatgatctgtaaatagtctgtgatatggtataattttatagggcaaggaagttgctttgtaacccatattttaggtcttaaaacatatttcaaacagaaaaatgaggaaaaaatctcaatgtagatacatataacagtggttgtgaatgaaatacattctaattgtttgactcgtttgactcatttttcaactttacagaattttttttatgttacaaagctacaaattctttgactttcagttatctgcaatgatgaattaaatgtgtgtgttctgactgcaactaccaatcatttctccttctcattcccttacctgggaccatcctcttccctgagacaaaacaatattgaatttaggccaattaacaactctaaaatggcctctaagtttcaagtgaaaggagagttgcatgtctcttacttcaatcaaaaattggacatgattaaacttagtgaggaaggcatgttgaaagctgagataggcataaagttaggcttcttgtgccaaacagtgagccaaattgctaatggaagggaaaaagtttttgaagaaaattaaaagtgctacttcagtgaacatatgaataataagaaagcaaaacagccttattgctgatatggagaaagttttagtggtctggatgattaaaccagccacaacacaacattctcttaagccaaagactaatccagaacaaggccctaactctgttctattccatgaaggctgacagagatgtggaagctgcagaagaaaagtctgaagctagaagaggttggttcatgaggcttaagaaaagaagccatctctataatataaaagttcaaagcaaagcagcaagtgctgatggagaagttgcagtatattatccagaagatctagctgacataatagatgaaggtgactatactaaacaacagattttcaatgtagacaagacagccatcaagtggtagatgccatctacggcattcacagctggaaaggagcagtcaatgcctggtttcaaagcttcaaaggatagactgactcttgtctatggactaatgtagctggtcactttaagttgaagccaatgctcatttaccattctgaaaaacttaaggcccataagaattatgctaaatctactctgtctgtactctataaataaaagaacaaagtccagatgaaaacacatctgtttatagatagcgtggtttactgaatattttaagcccaccagaaaaaaaaaaagaagattctatctaaagtattactactcacataggcagtaagcaaagctcacaccggaacaataacaatgaaatggattcaaactaattgtccatcaatggatgattggataaagaaaatactgtatatatacataatcaaatactattcaggaacaaaaaagaacaaaataatgacttttgcagcaatatggataaaactgtagaccattaccctgaatgaaataactcagacacagaaagtcaaatacttcatgttctcacttaaaagtgggagctagatgatgtgtacacatggacgtagagtatggaatgatagacagtggagacttgaaatgttgcaggggggctaggaagtgggtgaataatgagaaattacttattgcatacaatgtatgttattctggtgatggataccctaaaagccctgacttggctactacacaatctatccatgtatcaaaattacatatgtaccacatacatttatacaaataaatttttaaaattactgctcattgacaatgcacctagtcaaccaagagctatgatgtagatgtacaaggagatgaatgttgtttgcaggcctgctaacattacatccgttttgcaatccatggatcaaagagaaattctgactttcaattgttattatttaagaaatacttttcataaggctatagctaccatagacagtgatgcctctggtagatctgggcaatgtaaatttaaaaacatcctgaaaattattcaccttctagatggtattaagaacattcatgattcatgggaggaagtcataatatcaacattaataggagtttggaagaagtgatttgagccctcgtggataactttgaggggtccatgacttcagtggaggaagtaacaacaaacatagtataaatagagaactagaattataagtggagcctgaatatatgaccgaattgctgcaatctcatgatataatgttaataaatgaaaagttgcttactatggatgagcaaataaagtagttttggttttgttgtttgttttgttttttgtttgtttgtttgtttttggagatagagtttcactctgttgcccaggctggagcgcagtggcacaatctcagctcactgcaacctccacctcctcggctcaagcaattctcccacctcagcctcccaagtagctggaaatacaggcgtgtgccaccacagccggctaatttttatatttttagtagagatggggtttcaccttgttggcaaagctggtctaaaactcctgtcctcaggtgatccacctgcctcggcttcccaaagtgctgggattacaggaagaaaatagtttttttgagataaaatctactcctggtaaagaagctatgaaaatgctgaaatgacaatttacttgataaagcaacatcagggtttgagaggatttactacaatttttagagaagttaggctgtgggtaaaatgctatcaaacagcatcacatgctacagagaaatcttttgtaaaaggaagagccaactgatgcagcaaacttcatggttttatactaagaaactgctgcaggtgcccctaactttaacaaccaccttcctaatcagtcagcaaccatcaacatagaggaaagatcctctaccagcaaaaagtttatgacttgctgaaggcttagatgatttttagcatttttaacaataaagtatattttaattaagggatgtaaatagtatttctagacatatcgaggctactgcacacttaaaagactacagaatactgttaaaattacttttatatgcactgagaaactaaaaaaaaaaagtgtgacagctttattgcagtattgactttattgcagtggcctagaatcaaaccctcaatatctctgaggtattcctgtagctgcaaatagataaccacctgagaaactactatgactaccctcttcaagcaaaggcattaggcaaactgtaagcctaagaggcagaaaagcaggcatcatcagcctctgccaacagccactgtaagtaaaaatacaaataggtgtgcaccaatccttttgggcacattcatgctcctggtcaacatgtacatatagagcaaagtatgcattcaaggctgtataggcacatgtatgtctctgtgtgtgttatcaggggattgcaagtttattgctaaaaatgaagcctggattaaaatttgaaacaatgcacaagaaatataattaggattctgcatttatttttgtgatcataattaagtgagtattatcaaaggtaagtattagagggaaaataatttccccagaaagcaaagtttatgaatacttgaaaaaactctcaaagcgatcaaagaatttggcatagtgattagatgaaatatgtataaaccaaattctattcctttaagttgatggcctttcttttctatttcagatattagtttatttattctttagcctgttccacactaactattaaagagagttaaacactcatagaggaggccccaggatgccacaggaatgatcaagattcagcatgcatcagtctttaggga

SEQ ID NO: 96469 - DNA, 30491 bp, Homo sapiens
  misc_feature (1)...(30491): n = A,T,C or G
aggaatgctttgcatttgggagagagccctgagctactgcaaatagcaagtatgaaaagctagtcaccagcaccttctaaaaataaaacttgctctccttggggcatccttgattgctagccttccagcactgggctccaacatttcctcctgggacaatattccagaagaaaggacgatgcatttatttagccttgtttaaaaatattaagatgtggccgggagcggtggctcacgcctgtaatcccaacactttgggaagctgagtcgggtggatcacgaggtcaggagatcgagaccatcctggctaacaaggtgaaaccccatctctactaaaaatataaaaaattagccgggagtggtggcaggcgcctgtagtcccagctactcgggaggctgaggcaggagaatggcgtgaacccgggaggcggagcttgcagtgagccgagatcacgccactgcactccagcctgggcgacagagtgagactgtctcaaaaaaaaagaaagaaagaaagaaaaaaaattaagatgtttctcactgggatcctgacaagttcaatttacagctcctcagaaggtaacactccttccccaataaataattctaaaacaatcccttgtagatttggctccacagaggtcattgtgttcattcttttactcctgggaatgtcacactgtcacacacaagtgggggtgaggagggaaccagaatctcccacctgaaactttttttttttttttttttggagataaagtctcgctctgtcgcccaggctggagtgcagtggcgcgatctcggctcactgcaagctccgcctcccgggttcacgccattttgctgcctcagcctcccgagtagctgggactacaggtgcctgccaccacgcccggctaatattttgtattttagtagagatggggtttcaccgtgttagccaggatggtctcgatctcctgacctcgtgatccacccgcctcggcctcccaaagtgctgggattacaggcgtgagccactgcgtccagccatttttagtttttttatttttagtagagacggggtttcaccatggtctcgatctcctgacatcgtgatccgcccgccttggcctcccaaagtgctgcgattacaggcgtgagccaccgtgcccggcctcccacctcaaactcttaactgcatctcggtctgctctgtctgccagaagaaatccttcatgagtcaggctgggacaatctgatcttctgtttctcccaagattcttgaggacgtccaatgcctgcaccacccaagggaaaaagagtcctcatctttagaacttttatatggagactgctctcctcctccacagggtgcccctaggaattgagcaagacatcagctttatctgtgcgcttcctctttagcccaatatactcccagctagcaggctgaaggagagccccatttctttggagtctcaagagagatctcaggctgagtaaaagatggagaggaacaagggaagtagttgttttacctccctccccagcacgttctccaaaagtggtgcctttccaaccatgttgaaggtgatatatattgacaagatatttgtaaagacatctatgattaaaaaataaaaaccaggctgggtatgatgggtcatgcctataataaccccagcactttgggaggccaaggctggaaaatcatttgagcctaggagtttgagacaatcctgggcaacatagtgggaccccatctctacaaaaaatttaaaaattagccagtcgtggtggcgagcacctgtaggcctagctattcaggaggctgaggagggagaatcgcttgagcccaagaggtcgaggctgcagcaaatgagacatgatcgttccactgcactccagcctgggtgacatagtgacaacttgtccctgcacctcctccacaaaaaaaaaatctgcttagttctataacattaaaataataaatacataagaaaaagaaaaatgtgcaccaggcatcttggtgcaggcagttaatttcaggggtacatatccacgtacccatcatccagaagccctgtaatttagaggaagcaatgtgaaaaggggacaatgacacaagacaaaaggaagtcaaagagtggcatgttttggtcatcctgacccaccagcccatggggaggaccgcaggctccccatctttcatccccaccacctgacccctctgtctggttcattcctctagtgtctccagtctgggagacactaaagggacataggacattacttgaccctatttatctcatccatctgaccttgcagagctgtctcccaaggttaccccactggattccaccctttaaggctctggaactcagctcttccagaccatgaggaagctaggccttgaggatacttccatccttctctcacagtcacatggcataggtcacccacaggatgtccccagctaacccaacccagagaaccaaatccagccctatgccgctcattctttgaaacctgccctggggaaagcctgcttctctgatggctcctgagccaccttgatgtctgatccagatgaatctatagcttcctctccctactcatcacagtgctctgatattccagtctcctgagcaagccacagcctgcctttatatgaacatttgcatatcaaagcctcacatttacattttataacttaggctcctgggaaacaggtcagagctcagcccccaatctactagcgtagccgggaaagaagcatttacctgtgcaacccccaccaaagatgtgctggagggtgtcagggagtacgctgcatgtgtccacgaagctgtgtgtccaggaggggactgtgagcgtcctgcatccaagagtgttcctgtgtatctctggctcaggtgtggcctccatctggcctgttgtgtctgcatgcctgtgagtctgtgagttcaaagtgtctgcatgcctgtgagtccatttggggtggtcctcagtctgttgtggggggccttggggtagatgtgtgtttgtgagggctctgtttcctcatttgtaaaatggtaatgaaaatcctaatacttacctcacaggatcgttatgaggttgcctgagttaatgcaggtcatgcacttacagcagggcatggctgtacatgtcggttattgtgactcgattcccaacagaaattccagcccctctataccctccccaccaactacttccagtggtgtaagaggctaatgttccccttggaaatatcactgttttgagcctggacattcaatcagaggtcagtgacagcagcagtatcttctcttagcctgagggaggaaggccactcagcctctgccagggctggagaggattgggaatgtggagggggcacttactcaccagggagccaggggccctccagaagaatataagaactcagaacctgcagcctgggcaacatagtgagaccctgtctctacaaaaacaaacaaacaaatgaacaaacacattagccaggcatgatagtgcatgcctgtagtcccagctgcttgggaggctgaggtgggaggatagcttgaagccaggagtttgaggttatagtaagctatgatggcaccactgtactccaacctgggtgacagagggagaccctcctgtctctcaaaaaaaaaaaaaaaaaaaaaaaggctgggcttggtggctcatgcctgtaatcccagcactttaggaagccaagtggatcacctgaggtcaggagttcgagaccagcctgaccaacatggtgaaactccgtctgtattaaaaatacaaaaaattagccaggtatggtggcgggcacctgtaatcccagctgctcgggaggctgaggcaggagaatcgcttgaacccgggaggcggaggttgcagtgagccgagattgcacctttgcactccagtgtgggcaacaagagtgaaactctgtctcaaaaacaaaaacaaaaaaactcagaaccagaggggcactggcatccctagagaggtcccatcctactgaagtgcccagtaccaacttaaagacctactggactcttcttcgttgtcatggagaccacatcaaagctgccttccaggaagagccctctgtcctcctctccacttctcttggccagaactcacacttgtctctaaactggttccatccagcccaaagctgggatttgcttgggcttgtttctccttccttgggcagggttcctgctaagctcaattaatttggtctttattgtacctattcactacacaagcatttcatgccaccctcataagcatgctaacaggctgaggaggactttcagaggcaaatgagctctggagagctctccatagataaggatgtctataccatgaggcaggatgaaaaacatccacaccagagatatagtcaagaatgttgtatatggctaaaggaactgattcaggctatcatggaaggcttcctggaggagagggacaatagacatgagccttatagaatattacagcacctatagaaagggaagtttacttccatttgcacaagcagatctcatggaatgagcccttatgaacactaaacagcaattgtatgttttagccttagttctggccagacaggcccaaagagcttacatgtgtcatttccttctctgaaactccactgcctcatctgtaaagtggcgggtgttaggttagatgaatttgggaagccactcctgctggcctggcatttgaacattcttttgtgtttatcacaaacaggcaggataaaaaatcaggctgtcctcaaaggagtgcataggctggagacatagagaattgtctcagcaaaaaggcctttgaggattcatgtcctttgtgcccccatggccacagcccaagcaccccaggtcccctcagatgtctgtcttggacatagctgcttgcctggaacccagcactgtatctgacacgataaatgtttattgaaagaagtggtgaatggatgagatgacagagactatgaccagcttcttagctaaaactgaaacccatcctgcctccagatcatcagaacctttggggcttttgctccttttgctggctctcagataagagggaagatggctgagagggagctacactttcggaaatcatctaccctggggcttctggtttctgctgcaatcagtagaaagtgggtcacaaaacagctctgcagagaacagacccttgaggaaaagcctggattctgtgccagtttacatttattgatcacctactgtgtatcagttgtcacatagcttaactcatttaatcatggcttcagaggggtgtacaggagagtgtgagggatttgaggctgtaaaccccagaggtgctgactagctgagtgacctcaggagagttaccatccctctctgagtttcatttttaatatctgtaagatacaaacgatccatttcgccgggttatgggaacgaaatgagcacgtggaagcggagcgcttcataaatgctagttattattgttcctctgggcacacaagcccggtcgcctccctcctgggcgcacacagacatgttcatactcccacgtacacgcagatgcagagacgtgtgcagacgccagccggaggagcacgcggcgcatcagacccaagaccgtggcgagacggtgaagaagccgcggggtcctcggcttctctctttttctctcggttctttatgaatgaactccagccgcgagttttatttttttatgaatgggagccggagcactgaatgaagccgggagccaacccctacattctgattggcccccgcggctgggaaactccgccccccggccaggccggacgactctccggattggcgggcgtgcccagccctggggttccattcacaaaagtcaatgaaacaaagggaaacggggggcggtgtggcggggcggggggtggagagctgaggccgagcgaaggaaatgcaccaatcagctgctcccccgggctcacaactgtctgctgcgcccgaaaaacaagtcggtrcgctggggacccggggccggggccgccttactccggcctagccccgcggccctcggtgcgggctccagggcatgctcgggaccccccgcggctccagcccagacgccccggcctcaggtgaggctgcgggagggaaagggagggagagtgtctgtgattccccgcctcgcctccaatgcacaccacactcactctcaccacccgcctccgcagattccagggcgggggtgggaggtgctgggattcagggttggagggggcgcgggagttgtgggcatgcgatggtgtgcgcttcgcctgctcctccgcgcgcgcgcgcgtacacacacacacacacacacacacacacacacacacacacacacacgttcttatgtaaccgagcccgggtaaagcagggctgcagaaagcagaaacggcgagcccggctcctgggagcaggtgggacctcctttggcctttggcgggaggggagtggtggtggcgctcggcctggcaggcggaaacctcgccatcgccccagtgagtcggagaagtttcgccgtcggacccagagccttgggactgccccctccccgcccccatcgcagccctccctggacggtgtgcgaacgcagccccctcccccaccaggtctcggcccccgcttggggccccggccgtgcggccggagggagcggccggatggagcggaggatgaaagccggatacttggaccagcaagtgccctacaccttcagcagcgtgagcgccgcgccggcctccacgcccgccccgccccgcacccagcccctactctcaccacagcccccctccccgcagtcccagcggagtcctgggctgccccgcccctgagtcacccgaggaccccaacctcgtcccccagactaagcgcctcagggtgactcgcgggcattctccccgcttctmgcagaaatcgcccggaaatgggagcttgcgcgaagcgctgatcggcccgctggggaagctcatggacccgggctccctgccgcccctcgactctgaaggtaaagagcaagagagacaaaccgcgaccctcctccgccacacacacacacacacacacacacacacacacacacacacggccgattctggaacccccgcctgtttccccaaaaaactcgccctccaagggattytggtcattcttctcggtccctactcccaaggcaggggagtcaccgggtcttgctagggccccttctctcttaccgtcccctccacctcacctccaattccactatttayccctcagatctcttccaggatctaagtcacttccaggagacgtggctcgctgaaggtgagtagttttgtgaccttttctattttgggaggctggacagggggacactccgtagcccctggtattccaccctaagccctacacttctcctctcccttccctgcctcaaggagttctccaaggccctctccccaggtcccttgccactctactcaccccagcacccagcgtggacacttatattgatatttattttctctaccctgagccaggcttgtgtaactaggcttgaggatgaatcagaccattgtgtggggtatttgcttatttgaatggaacttggccccaggcccattttcctggttgaaattttcatttgtaaagtttgttttgcagaagcygccaggccaaggtgcatgttggggtgttgttggtggggggtggggggagaaattaatttgtcactcatcctccagagttgcccaagcattgattcttatcccctgggtttctcttcttcccaacccccagcaccaaacaatttactgtccaagccaaaagaacaacaaaagtttaaataattcttttcggcagtcctttggcacagagagcccagggctccctccccaaatagccttgattgtaattctaatagcaagtgttcctccctcttccatcccgcttgaatacctctgcctccaggcaaattccccccttcctgtgtgctggggagttagctgtgagctggctggggtggggtccgtggctgggtccgtggctgggtctgatggggaagtggtgtgttcaggaggtttcctggttggattcttcagtgcgttttggtggggcctgagggtgtcgctggtggggctgcaggtgggagggaaaatggtggtttagacagtctctgagagggaagggttaactacccccatcttagggtttattttaacactatgaaaatgaagaagccaaaacactaggaactccttttttgaggtctttttgaggtattttccttaggatctcctcatccctccaccctgggtatctaatttttttaaagctcaaatccaactaccctggaactctccatagaagctcggagtaaaaagaaaatgacccctgactagatccttggagtgagactaggtctgtcttgcccactatgatattctaaaaatatatatgttgacagaatgactatttagcatagagcaagcactcaagacattttgtggaaataatggctgaatggctgtgtgagtgctggagggatctggaggttctgagggtattgtgtgcatcatccccgaccctgcaagtcctgcatgcccagctccaatttacaggcagagctttgccccgtctccccatccttcttctgaggttctggagctgggctagagctgaagaatgcagaggtgtcagtttccgtgggctctcaaagacttcctttcccagtgcctgatttctctctggctcaccgggcttcattccttgcctgtcagctgagagtccccacagtgggcagctcctagggctgtgagctaggggtgggctgaggttggcattttggcagcagctggtccatctgtgcctgggtttgagatgggagggggaggaaaatgctctcatctctctaccttggaagtcccaccccttggccaggggtctggagagggtacaaatgtctgtctgtgtcagtgtcggtgtgacagcaagtgtgtgtgtgagagagagagagagagagagagagtgtgtgtgtgttagttacatgctgctgccctgtacatttaaatccagtgggtggggaggtggggtggggattgcaaggcggaggtgaggggggtgggcgctgggatctccttggttccctctccttccttctgagggagcagctcaggttcccagctggtgatggatggccaggtctgagggggggatgctgaggccgatcgctccttctcactttctctgcggagacagatgcagctgccggggccctgtccccctgcaccatcccaacaccaccccagcctcctctcctgtctcttcccaccaggtcagtgaccccggcaacccatggggagctttggggtggcagggagggactagcttctttggaaacttgccagtggtgggacgcattaggaggaaaggggaccagagcccaacctccctttctcagtttggttttttccaaagccccaatttgaagagaagcagcaggggggtcctggtagtgtgggtgggtctgtgaagacagcatttggaggaggcacaggttggagccgggcagatacaggaagattccagtgtggttgcaggttcagtgtcctgcgtccgggcgttgaagggtgagtgtgagtgcggctttatggaggcagctcacatatccttggggttgggtttttgtacacaggggtgaatgatgtgaggctaggagggcgtgtctgatttgggggtgcctgggatctgttgagatgttggggaaagaatcaggctgctacagggagacccaggctcaggcaggctgagcccaatatgtgtctggctatggtaaaagatatgctggttttttgtccaaggttcctttccaggcttgtcaggagccctgaatccttggggaaaatgactttgttgtctatttggtagtaagggccattgactctaggccatgacccctttgtgtgaggctcaggtctgtggattcccagaagccctatggataggttgctgggatccttgatccctctgatactgtgtgtaaaattgctggaagtgcaccatacataaaggtgtatggatttttttaggaagagaatgacccatagcttttatcagattctcaaagggatcgatcgatctgcgctccccttttcacaggaatcactgctccccaaccctcctccaagggctccagtccctttgccctttggctgtcccaatcatatttgtaggtcaaaaaaagaccccatgtgtggagggcatgcatggagggcacatttcaccctgtgctgtcttgctgctgcaagagtgaagtaaaaggaattagggtgtgtgcatccctgaatatgcgtccgagtgcatgtacactggtgcctcggcatgtctgtggggagggatgaggttaatctcctccctaatctttcccagctacaatgcctccttctccatctttctgtctcttccccttcctgaagactcttggggacaaatatgtcccctccacaactagtgaactggttccttccagtacagaggctgccagggtgggggcagggtaagggacagcggtgacacaatggagcagaagctctggagaatgcctctacccccttcaccctatgactggatcctgggaagagggtgaccgagcatatgtagtgtgggtggctaacctatggtgagcttcagtgtatctctgttttaacctctcagttcttccagaatccagcttgggagaccccccaagcccctcctctttttttactaacccccctttttgaaaggagagtccctaaaattctttctctctctctgggcattatgctgtcttggcacttttcccaccccctccttaatcatctgcctcgtccccagacagataaactccatcttagtaccgggatggagctggggacagaccctggcacactggcttggcagccaagactcagccaagttaacaaataaataaagagagtggtgtacacttaagacsaaacatggtaattaaaaattctcctgctctccaggaacgcgaggctcagtgttcctgtttctatcctgttgacagtctctggatgactgagggccctggcctacccctttcggagaaggccagtgtttgggggaggggctgagctaggacagatttctcctggctctgggaagaggatggcaccacctcttttggggtgtggtctgtgtgctggaggaagcctcctcctggattccgggcctggaggggtccctggttaaactgtcaggcccgaggcaggaagaaaggcaagatgatgctgagggttctctgctctccagcaccagtgacgccagcaagagatacccccagcccattacctcaatggaaagtagcagttaatgaggccccaggggtggggccggaatgcgtcagccacccctgagttctgcaccaccctttcccttgggacccttcttgcctagtaggagggagggaaatgttggtcactctgctcccatyaccccagcttcctgccaccttgggggatgttgcctctgaatggaccagagggcacagtggggagcctggctttgcatccctgggcaggtggacagatttggcctcttaccctctatccaaatgtgcctatttttaaggttgtggtggctgaagtgaaaggattacctgagcccaggagttagaggctgcagtgagctctgattgtgccactgcactcaagcctgacacaggagacttccttataatagattttaaaatgcagatgcctgggccccaccccagtcctatggaatgggactctccggaggaggggactgggaatcgtgtttttattttatttttattattgttatttgagacagggtctcactctgttgcccaggctggagtgcattggtgctatcttggctcactgcaacctccacctcctgggttcaagcgattctcctgtctcagcctccagagtagctgggattacaggcgagaaccaccatgcctggctaatttttgtatttttagtagagatggggtttcgccacattggccaggctggtgtagaattccagacctcagatcgtctgcctgcctcagcctcccaaagtgctgggattacaggcgtgagccaccacacctggctgtaatcgtgtttttaacaacgtcctggtgactcttgaatcaggccagtttgggaatggttgtctttttgccgtgtttgtgctcctgaaaagatgtgtgctggctgtgtgtttctgtttgttcttgccagcggatttcatgtctcattgatgtctttggtcacttcagaccaaagtattattatgttgacttgtcctaagttctcgtttagctgctggtggcttgtgattgttaaactccctctccctaatgcttctgtcaagaaatcaactatctattaatataagcctatgtttataaacacttggcacctctgatatttaaagcaaattgttgaagaatattcttgccaagcaacatatcacaacctaaaatatcccctgtgagatgtgctttcctggagaggacctgcctctagtgttgccttgtgtgtggagagggggagcctgcagggaagggctaggatggtcaggatctcttcagtgcatgccctcaggcccacagtgctgacttctgccagcctgaggacaaacgattattgcatgtttattcatgtagtcaagaaataacagcactgagcgtctactctaaccctgtgctgggtgctggggcatcagatgacaaaaaagataaagctcttgccctcacagagcttaacttcctggtggaggagataggtagataacaaacaggtaaacataaattaatatattcaggtggcaatatgtgccagggagaaaacaaaacatagatgcaatagagagccaggaggaaccactttggtttaggggtggtcagagaaggcctctccagagatgtcaaagtgagctgagactctgatggtcaggaaaaaaagaaaaaggcaagaaagcatctggggaagaaggaacaagctcagcagctttgagggctagaaaggagaccagagtgctgcagattcacaggcaaggagaggcaggtcagagaggtaggcaaggccaagtcatgcagagccttggaggccaagggcaagcgtttggatttcatgctttaaataacagagagaaatgattttatttctgttgtaaaaagatcactgtgacasctaggtggagagcaagggaccataggaggtaagaatgaaaatagggtatcctggtaagaggccgtgggtgaaatccaagtaagaaatgatggagccttagcctagagagaagcaaaagagatgggatatgtatttgtataggccgggggtgtggaggttttttctagccatctcatacccctcaccagccattttgacctctctgggcattttatcagtttccccattgtccaatctgagagcagtctccagggaaggagagagcagtctccagggaaggagagtccagcctcctcgggctacaggttccactgcatcaccctagaaccactctcttcctggaataatatcaggaagttcttcttggtgtctacatttcctgctgtgatccatttatttttgagagaggggcaaaagtgggccaagactctgggatcaagggagattcttagctgtataaccacctgagaagccccgctctggggaggccagaataagaactagaaatcagagtttgatgttcaggttagaagccatggatgagctgctgctgtatttcagttttcctgcctattccccaacccagctccacccatcctggcatcctgggagagctcttcggatcrccaaccttgggaatccctcccctccttagctgcacattaaggggatgaggcacctatgtactcagccagtgtcctttgccttctgcagtggtcccagtcaccagcctcctgctctcccactgtcatcctccttttttattttatttatttatttttgagatggagtcttgctctgtcgccaggctggagtgcagtggtgtgatctcagctcactgcaacctccacctcccgggttcaagttattctcctgtctcagcctccggaatagttgggattacaggcgtgccaccacgtccagctaattttttttttttttttttgaaatggagtcttgctctgtcacccaggctggagtgcagtggcctgatcttggctcactacaagctccgcctcccaggttcacgccattctcttgcctcaggcatactcctgcctcaggattagctgggactacaggcacccgccaccacacccggctaattttttttgtatttttagtagagacagggtttcactgtgttagccaggatggtcctgatctcctgacctggtgatctgcccgcctcagcctcccaaagtgctgggattacaggcgtgagccaccgcgcccggcctaatttttgtatttttagtagagacaggatttcaccatgctggtcaggctggtctcaaactcctgacctcgtgatccgcccaccacggcctcccaaagtgctgggattacaggcatgagccaccatgcccggcctttatttttcattttttggaacagagtctcactttgtcacccaggctggagtgcagtggcatgatctcagctgactgcaacctctgcctcctgggttcaagcaattctcctgcctcagccttccgagtagctgggattacaggtgcccaccgccacgcctgactaattttttaattttttagtagagatgggagtttcactttgttggccaggctggtctcaaactcctgatctcaagtgatcctcccacctcagcctcccaaagtgctgggattacaggcatgaaccactgcgcccagccacccccctatgtgattttatttattatttaattttatttttcttttgagatggagtttcactcttgttgcccaggctggagtgcagtggtgcgatctcagctcactgcaacctctgcctcccaggttcaagcgattcttctgtctcagctcctgagtagctgggattataggctcccgccaacacgaccagctaagttttgtacttttagtaaagatggggtttcgtcatgttggccaggctggtctcgaactccggacctcaggtgatccacccgccttgacttcccaaagtgctgggattataggcgtgagccaccatgcctggccgcctcctatgtgatttttaaatccacaggatcccactgcttataatgcctgcccatcctagatatgactgttgtgagctttaagggagttttgtaaactctgaggggcgaggctgtttcacttcagaaaaatggaggaaataaagacaaagcatctagaagaagaaagactggaatctgctcagacaggttctgagaacagtcttccctcctgggtcttagtggagcccagaggtggargacactaggacctagggtggagcagcctttagtctcaagcaagcttgtccaacccgtgggcctgtgggccactttcagcccagggtagctttgaatgcggcccaggcccaacataaattccttgtaaaatttcttaaaacattatgagatttgtttgtgattttaagttcatcagctatcgttagtgttagtgtatttgtgtattttatgtgtggcccaagacaattcttacaatgtggacacccctgatctaaaggctgttggtcctttcttggctgttgctaatctgcagggctgtaataatggagcctcccaggggacaaccagggctccgccccaaactcacctctgacttctctctgcagctcaggtaccagacagtgatgagcagtttgttcctgatttccattcagaaaaccgtgagtagaggtccctggggagagggtatagggagtggaggatggcaggaagtgagtcataggatagagaatcacaagagagcagcttgttctctcctaaaamacagtggggtttgatcttaaagaccaaggcaataactggaatgaaaaccttggttgaaatctggggcttgacatgttcttgctgtgtgaccttagagcagacactatccctctggttctccattgccttatatctgaagtgaggggcctgggccagttcagcagagtccagttctagtgttgtttgtttgtttgtttgtttgttttccccccaagacagagtcttgctcygtcacccaggctggagtgcagtggcacaatctcggctcactgcaacttccgcctcccgggtttaagccattctcctgcctcagcttccagagtagctgggattacaggcatgcacaaccacacccagctaatttttgtatttttagtagagatggggtttcaccatgttggccaggatggtctcgaattcctgaccttgtgatccgcccacctcggcctcccatagtgttgggactacaggcgtgagcccagtgcgcccgcccccagttctagtattctaagtcacttccataaactggggacaattttgcctcccaagagacatttggtaatatctgtagacatttttggttgtcacagttgagggtggggtgctactggtgtctagtggatagagaggccagggatactgctaaaagcatcctatgatgctcaggaccgctccttacaatattattaataaaacactatctggcccacaggtcagtagtgccactgttgagaaaccctgctttaggctgggtgtggtggctcacgcctgtaatcccagcactttgggaggctgaggcgcgtggatcacatgaggtcaggagtttgagaccaacctggccaacatgatgaaattccgtctttactaaaatacaaaaattagccgggcatggtggcgtgtacctgtaatccccagctactcaggaggctgaggcatgagaatcgcttgaacctgggaggcggaggttgcagtgaggcaagnnnnnnnnnnnnnnnnnnnngtgacagagcgaggctccatctcaaaaaaaacaaaaaccaaaaaacaaaccctgctttaatgtcagatactttgctgtcaactgtcttcaccagtgaaacaatggggcacaaagaatcaaaaacagcagagaatagttggttacaaacggcatttgactggactgcggttaaaactgaatctcacaccggcttggaaccaactctttgctgctcagcctcgtggccagagtttgggaaccccgcaggggccacaggaaaggccagtgttcttcacagataagtaggagcatgtgtataatgttagtcagctgacattcaagtgggccaatatccaacctcaaccagaaaaagaaagattcttttatttatttatttagagacagagtttcactcttgttgcccaggctggagtgcaatggtgtgatctcggctcactgcaaccgctgcctcccaggttcaagcaattctcctgcctcagcctcccgagtagctgggattaaagggatgtgccaccacgcccggctaatttttttgtattttagtagagatggggtttctctatgttggtcaggctggtcttgaacttctgacttcaggtgatccgcccgcctcggcctcccaaagtgctgggattacaggcgtgagccaccgcgcccggccaagaaagattctttatatcctcaaataagaaaacatgtcactcccctggaattttccagggcactcaggaaaactacaggccctaggttggaggtgctcactccttgaaagtgttttctggggcctggggttgcattaaatgtttttgttttttgtttctttttgagacggagtctcgctctgtcacccaggctggagtgcagtggcatgatctcggctcactgcaatccccgcctcctgggttcaagcaattcccttgccccagcctcctgagtagctgggactacaggcatccgccaccatccccggctaatttttttttgtatttttagtagagacagggtttcaccatgttggccaggctggtcttggactcctgcctcccaaagtgctgggattacaggtgtgagctaccgtgcccagcctaaatgttgaactttagatggtttatttagtcaataatcagacactagtctgatgtataaactagayataatgtaaatagccaaaatgttcttgtctcactgcgggtctcagaaaattgatacccagagagggaaggaggctgtaccagtcacccagctggtcctcaaagctcagaaggtatcagaagccctgcctgcctcttgtgtgacaggctctggccttgctctgtcccctccacccccacagtagctttccacagccccaccaccaggatcaagaaggagccccagagtccccgcacagacccggccctgtcctgcagcaggaagccgccactcccctaccaccatggcgagcagtgcctttactccaggtgagccccagcctggacctggtgaagggtaggagaagggttccagaggagggaggcagggggcacccatgagcagaggcagcagctgagatgcaagttagacaacagaaaggattttctagcacttgtaaggaagcaatacagctaaggatttcctctgaatagacggaaaacgcagcagagggcctcaggaatatatactgaggccagagcagattctgtttccaccaagaggcccactgtcccacctaaaccattgctctgagcaacaaatcccccctgtatgaatcccaggggttcaagactagcctgggcaacagagggagactgtctctgaaaaagaaaagaattggctagggctgagtctgtggctcctgccgttcccttctcagccccctctatccttccttctcctgtaatccctgtgacctcgctttcctaggaatgaagggttcaaagatgctttccagcttctctgccccctcacccctgtctccttctcaactccagtgcctatgacccccccagacaaatcgccatcaagtcccctgcccctggtgcccttggacagtcgcccctacagccctttccccgggcagagcaacggaatttcctgagatcctctggcacctcccagccccaccctggcmatgggtacctcggggaacataggtaaggagacagggaaacccactgctcatgggcccaggtgttttttcaattcctgagtgttctccataaagacttgagctgtggggtggtagaggcagggggcagtggaatagaaagggagaaatactgacaccccaaccccctaccccccattccrgagcccactctaaaagcctaggagtaacaggctcgaggaaggattaatttaaagttctcttctcttccttctccatccaaccacatccagctccgtcttccagcagcccctggacatttgccactccttcacatcctcagggagggggccgggaaccccttccagccccctaccaacaccagctgtcggagccctgcccaccctatccccagcagagctttaagcaagaataccatgatcccctgtatgaacaggcgggccagccagccgtggaccagggtggggtcaatgggcacaggtacccaggggcgggggtggtgatcaaacaggaacagacggacttcgcctacgactcaggtaagagactggggtggggcagggtggcatgtgatcaagtgttcagttaagcccagaatgtctcccgagtttttttacattgctgtttaccatttcatacatccaacccacccacccactttttttcttcataatttcaaaagaatgttatttttctttctttttctttttttttttgaaatggggtcctgctctggcccaggctagagtgcagtggcacgatctctgctcactgcaacctctgcctaccgggttcaagcgattcttgtgcctcagcctcccgagtacctgggattacaggcaccagccaccgtgcccggctaatttttgtatttttagtagagatggggtttcgccatgctggccaggatggtctcgaactcctgacttcatatgatccatcgcctcggcctcccaaagtgctgtgattatagacatgagccacctcacccggacaaattattacttttcaatgagcaaacctatattcagattaaaagataaggggggcccccggggcatggtgagtcatctgtaatcccagcactttaggaggccatggcaggaggatcgtttgagcccaggaattagttcaaggccagcttaggcaacaaagtgagacctcgtgtctatttataaaaaagtaaaattaaaataaagggggatgtagatcctgccctcaggtagcttgtgacttaatagggaagttaaggcatttatttctatttaacaggtgtttgaggttttaattacctattaagaccaaactactgtgacaggaacacgagtgtgcagagttgggaaatacaaagatgaataggatgtgtctggtccctatccccacagaggcttaaaaatacaaagggatttgaatgaagagaaacatgaatttgaaactagccaggctcatggttcttgctagttctcaataggagggcagggttttcttgttttgttttgttttgtttgttttgagacagagtcttgctctgtttgtttgttttgagatggagtcttgctctctcgcccaggctggagtgccactgggttcaagcgattctcatgcttcagcctcccgaatagctggggttacaggtgcccatcaccatgcccagctagtttttgtatttttagtagagacggggtttcaccatgttgatcaagctggtagaagcacaggttaatatgtggcttacatatttgagcctcccaattgatgtatgccctggccagaggcaagggcagaggaagtagggacttctttaaattctagttccacctggctgttgactggagtgagatgcactcacctgtgttcataaatagctatagttcaaagcctcaagggccgaaggagggccagtcccaggaagggtccagaaaaccctgccttttcttctttcctcctggcttttgttacattagtagccctagatctgagtttattagagtaggcccagagctagctagaactttagaatttccctttttgtggtgcccacaaccgttcaagggcagggggatgaaccacaaccccccaggctgtccaactaagaaccggatggtgctcctgtcctcaaatccagggcataagcctgagccaggcttggcagtgagctggggagaggaggagggaggcactcttgccgctgaccttcaaaggctgtagaccggaggggattgtgttacatgcccttgaactcctgcccctccccccagctactcctgaatggagtcaggaattccattcacaaaatggaggcatgaatgagcccaccctcccgcctcctcccggaggtgtcatgtttcaccatcttctcattcataggtgggagtgcagtggggggagggcgggaaggggttggaacttgaacgggtggcttcacacagccgccttcccgatgtggagtgggaaggttcctatcctatggaatggaatgaaacgaagtggaatgtgctctgttagacctgaaaaaacaaggcccagtgcccactgcctcttccccaggtgcatgcaggcgcacgctctgtttctgtcacacacacacacacacacacacacacacgcgcgtgcacagggctgggaacctgacctgctgaccggacatttttgtccattctgagggagtcttaggcgtggacaccgaactctttccccggacgttcatctcaccctccctcctccccctgaactcgcaggaaacagctgctccctggcagcttgggcccttcagaacagcttgcccagcccccgctgctgccttccatggcctcagccgcagccctcaagttgaggaggggttccagcatcacactccctctgggtgaactttccctgggattttgtggttggcaggcaacctgggcaaagaacagtcaccaggaagcaggctggaaggaagaaattcttgaatgtggataggacttcctcctcccctgccctcragctccaccccaagccacttctcacatcaccccttcttcccccacagatgtcaccgggtgcgcatcaatgtacctccacacagagggcttctctgggccctctccaggtgacggggccatgggtaaggcagccccccttcccctgccaagccctccatgttgggggagggagcgctgccatgggggagggtctccctggccaggagtccctctggactctctggggtctcatcggtgaacccccagatctgagcaacccccaatttcctccacaaggctatggctatgagaaacctctgcgaccattcccagatgatgtctgcgttgtccctgagaaatttgaaggtcagagaagtgactgttgatgggagggtcaaggtcttatcacgctgtgtccctgcaggagtcacatcacgtttcattgttgcaagagggtgggacccatagaaaagtacctggggagaccccttcgagaaatccctcgggtgggaggcggttgcttgggggaccaaaagacacaaaccccacacctcctattttcgtgttccccaggagacatcaagcaggaaggggtcggtgcatttcgagaggggccgccctaccagcgccggggtgccctgcagctgtggcaatttctggtggccttgctggatgacccaacaaatgcccatttcattgcctggacgggccggggaatggagttcaagctcattgagcctgaggaggtgggcctctcggatgttcccagccctcctttccaaagtttacagcctggaggtgggagaacctgggaaatggtggcacgtgcctccatcatgattcttgctttacctaacctgaattcttgccaagcctaagtctgtgggctgatgctttgttgcagagytagcttggcactttgcaccaagaatctcaagtgctctttctgaccttacccccattttttcctctgccaaggtagcatctctaccccaaaactgttttgttcccaggtcgccaggctctggggcatccagaagaaccggccagccatgaattacgacaagctgagccgctcgctccgatactattatgagaaaggcatcatgcagaaggtgggggctgtgggtctagggacaaggtggtggggggcagtggctgtgagaagctgactggggagagggtcagcagggcagttctcagcaactttgtaggatcagataatgaatcagtcagagagacaagaaattgtggagaatcccaaggttctcctcccccaaaaaagtgcaacactgtaactgagaagcccaagcatggagaagttgagatgaaaaaggagtaagaactgtgaagggagagtcagcttctcaggaaccagcatgggagagaaatgccccgagcatctgcctgtactggtagaagggccacattccccactcccccaccttaccccatacaaaggctgggcggctagccaggctgaccagaccttctctctccccataggtggctggtgagcgttacgtgtacaagtttgtgtgtgagcccgaggccctcttctctttggccttcccggacaatcagygtccagctctcaaggctgagtttgaccggcctgtcagtgaggaggacacagtccctttgtcccacttggatgagagccccgcctacctcccagagctggctggccccgcccagccatttggccccaagggtggctactcttactagcccccagcggctgttccccctgccgcaggtgggtgctgccctgtgtacatataaatgaatctggtgttggggaaaccttcatctgaaacccacagatgtctctggggcagatccccactgtcctaccagttgccctagcccagactctgagctgctcaccggagtcattgggaaggaaaagtggagaaatggcaagtctagagtctcagaaactcccctgggggtttcacctgggccctggaggaattcagctcagcttcttcctaggtccaagccccccacaccttttccccaaccacagagaacaagagtttgttctgttctgggggacagagaaggcgcttcccaacttcatactggcaggagggtgaggaggttcactgagctccccagatctcccactgcggggagacagaagcctggactctgccccacgctgtggccctggagggtcccggtttgtcagttcttggtgctctgtgttcccagaggcaggcggaggttgaagaaaggaacctgggatgaggggtgctgggtataagcagagagggatgggttcctgctccaagggaccctttgcctttyttytgccctttcctaggcccaggcctgggtttgtacttccacctccaccacatctgccagaccttaataaaggcccccacttctcccattagttctcctgtgtcctctttgctgccatgtgggaacagacctgggggtagaaagagctctggtcttgaagcagagctgactggtttggggccaggccctggcgcttaaatcctcatgtagatttgaaaaaaggcagttcacctgactgtttctcttctgaaaaatgggcttaatgatacctgcccttcccccttcccagcattactgtgtgaggatccagaaataatggacagggggtacttgataacctggacaggcgccccttgtgcactttgggcctgcttccagcagcagtctccctgcccctgtgggcgggtcaggtgggctactgagtggcaagggtctccctcctgggacttcctcagacagggttttggtctttggtttctgtgatcccagttgttcccatgaccctgctgtcccacatagaccccaattgcatgtcctccctcctacctcagctctaggttgctacttttgctggggttggggacaagtgtttgtctggagaatggggcaaaggagaaaggctcccaggccagatggtacagagagaggctagagcaggccctggattctggccagtggagattagatcttccggggagtgggaaacacctagattctccttgcccaaatttgggagagatcagagtcctgaggctgagttttttgggggtaggtagaaatggcaaagtggacaacatggtgacacctatggaggacgtatgactgagatgtgacaacaggtgggaggggcagaatgggtggttctagagccagctgctatgtaaaccgctgcccaggagacatgctcaggtaaaaaccggtgctctcctgttaaatagaaactgcagctgtgctgaggttgggccagcccaactctgttcatgtctcaggttggcccagcaccaacctgagaccatcccttgcaggaagggatgcccctcgactactacccacaaataaaaggcaacattacttcttcctagaaacacaaaatatcaatgtactgacataatttagtgcaagaaacaaaattttaaaaacaggttttaaaaatatataatttaattccacattaaagccaagctatcgtggtgggaagaaggtgtaaaaatcggtggaaaccctgaaggccgagtacacacacgaagagagagggagttagctgagaagcagcatccagggaaagaaaggtctccacaagctgagatgatggccctctgccctctgaactgttcattaacaagtcaccagtcccagttctttgttcaaatcctcaaacttggagaggcactgctccaatgagacagctacagcaaccacagggaggaagtgctttgggctgcaggagagacagtcaaagccaaatcacgtccaggcgggatgaagtaaacctggaccgaggagcctgacccagctgcggagctcacacatgccccatagggacggtcctgccatatacacaaacagcacactcagcatgtgtgcagaggcaggcaactcctgagcttggttctcgcggggtgggggtgaacaatatactttaatggccaagaagatcccagctctctgcatgagacccacatcctctcctgggctgtcactcaatcttgggaaatactggttcaaggaagagaaacaagggctccattgtgtgagagcagcaggcaagctccccttctgcatctggacaggaccccccccttctccctcagagcaggctcagctcagctgctgacattgctttcctgatggtcaaaaggtcagaacccagctatgttgtcatagcagagaagtgacctcagctctagcgtagagagatggtcaaggaacacccacagaatggggatccttctttttcctccacctgagccagaaaagataacgaaccctgctgtctcttatccttagcccattcaacatcccttttcaacctcagcttgaaacccaaccctccctccccaggtgtcaacattgtcagtgctgggcactcagtcaggacaggctgggccactatatccaggagtgtttctgaatggggaaaatttaggctggaattaggactgggagccaggtgtggtggcatgcacctgtagtcccagctactcaggaggctgaggcaggaagatcacttgagctcaggagtttgatgccagcctaggcaagatggcaagatcctgtcttaacaaaaacaaaaacaaaacgagattggggaggtgggtgcccagtccccgtttcccctttggtttcatttgaggtccctgtactgtctctccccagaaggccttcaaggttaacacacaacaatgccctgccccttgattactggcctgggcttacaaaggcgaatactcagacagaatcaggaggcactcagcttaatgaaggggcagggatctgcagccagcagattgcctggcctatattcctctccctcggactctttctgaattgtctttagggtgtggtttgctgcccagtgacaacatacattcctttatatcctggaatgttacatagtctctcttagtgtctggcatacagttctacagtagttctagcatttacatcacttcagaacttactaataacataaggacaggagaagcagcaacgtaacaggatgtgcccaatctctcagaagcttctctacaagcactacatccagaccagctttccgtaagttccgaaacctggcctggcaagacctgcctgatgttccgccaggtaaggagcctcctcagtgcagaggacagtggctctcaactgtaatcccagcgctttgggaggcagaggcaggaggattgcttgacgccagggattggagagcagcctgggcagcacagtgggaacccatctctatgggaagaaaaaaaaaaaaccctcctcaggagctgtgaggagggcacaaggaggtggctattctccaagcaagtgctaggaaaaaaccactaagaacaagccctgcagcacagatactggcagcacaaaccagctgagaggagaggtgttatgtttgttttctgtttggagtggggaaagggaggttttgaccataaaatccctttgttaaagtccatccaggacctcaggggaaaaaaataaaaacaaaataaaataaaagctgtgttgttacttagtatgtttcaaaaggaaatgggacatgctgcacattgcgaatgtgggaggtggagggagcaaggggaaaccttctgtatttaatatgtgccatctgtagccactcaggcctccagactgaagtgctctgtggagaggacatggttgatcatcgggtgatcccccagcacggcccggctagtgctgatgctgaaagacaaggctggaagtctgggttgtacgtcgtttccgagcgcaaagaggccctgcgttctggtttcaggggattcaggggattctcatcatgtgtgccagagcacagatactaaatctccctcaccctgagcccaggccaatatcctaacctttcggctaaaagaaaacagtcacagaaaaccatttttgtttccttaagaaaataaatatttccacgaggtcaagccaaagtacaggggctggagacggggtgggaagtggggcaaacactttagatgagcacagtagctcctgctagctggggcatcagggcactcaccatgtccctgcacaagatgctcacccactccaccttcccatcctggagctgcacaaattgtccctttcttgaagttgatgcaatgtgtctctgtgttagatatgagctcccaactgggcccaaggacttggggtgatggaggctgcaggctcttgccaaagccaggtttaaatccctgtttctattttaccagcagggaagaaatgagagtcgagttgagaaaatgctcagttaagacagtcagtcacgggacagctgtatcctcaggaccagcctgtcatcgataagtccaagccctggctactgctgctggagaggcaaaggaacaatcttgcctttcagcgccgtcggaaagctcgagatattctccaggcattgggttcctcatagcggttgtacaagggttcaagacgctgttgcttcttctgtttgcttagcttagttgggtctgagaccttgaagaaggctggggcaaactccacaagccaccgagggtcgatggtggtaacttcacgcatgtattccttggtggtgagcaccagctcatggtacaccaccctgaggggggacagagatagtactcaagcctctggatataggccccactctacagtcaacctggtccctagtaggcctcagctgagcttacattttatactattacctctcctgcctgacacctataagactgcagtctgtttatgacagccacaccccaatactgaagcacccgcacacctctaaccacaagaaaggtctcaggagaatgtattctagtcctggctctggctctaactagttaagtgacatggagccaatcacatcccttctctaatctgtttcttgctctataaaatgtgaggatgtttattagaatgtttccacagaattctagggctctgaagaggggcctcacactgccacaagggatggagaaggccaaacatgcaaggagccacatttctaacccttctactgtgataacatggtggttttaaatcagttttatattagggttctagatagagtccaattttttaaaaatgctactttaaaacaagtttttttttttaaactacatcactaggtagttgtttttttctttcttttttttttttttttgggacggagtctcactctgtctcccaggctggagtacaatggcacaatctcagctcactgcaacctctgcctcccgggttcaagctattctcatgtctcagcctcccaagtagctgggattacaggtgcctgccaccacgcctggctaactttgtatttttagtagagacatggtttcactatgttggtcaggttggcctggaattcctgacctctggtgatccacctgcctcggcctcccaaagtgctgggattacagacgtgagccaccatgcctagcccctaggtagttggttttttttttttttttttttttgagatggagtttcgctcttgttgcccaggctggagtgcaatgggtgatttcggctcactgcaacctccacctcctgggttcaagcgattgtcctgtctcagcctcccaagtagctgggattacaggcatgcgccaccatacctggctaattttgtatttttagtagagacagggtttctccatgttggtcaggctggtcttgaactcccgacctcggctgatctgcccacctcagcctcccaaagtgctgggattacaggcatgagccactgtgcctggccactacgtagttttttaaaccacaattttttttttcaactaggtctcacccctatgattttaattctctcatagggtttgatacattgtgcctaattcaggtttctgctgctctagaaaggcaagcagtgttatactaggacatactgggagtagtgaagacacaatcacaaaataccaggaaatttacaggtttttctctgcccagaaaagcccctagaccctgggacatgtccacctaccattctggctgtctgttgaagagggcactggaaggatggatatagaccacctgctggtcgatcagtgtccggtaaccctcctgcgggtctttcttggcagcattacggaagaacccactgcagatggccttctgcactcggactgtggacttgccacaggaaacaacatccagcttgtgtctatcaagataggacaaaagatatgagcccactcagctttcacaggtctattttcacaatgacagtgcccaacacatccatcttggggtgcccagagtagtcaccaggaccttccttccagccctaagtgtactacagaggcagctctacacagtgggcagacggaggcactcagagacagacactttgtttagacaggtat
